United States Patent Application Publication US 2006/0210537 A1 - sequence listing, part 3

SEQ ID NO: 72 - DNA, 1835834 bp, Theileria parva
tatatagaattctatatctatgaggtcttctttcgaacattttagtgtagctgtcaaaattgattataagacttaatttattagtaacataaatcactataggaaattctgcatcattatcagttttttcccatgcagtcatattatcagcttttatctttgtacattttacacctgggtgtaattcgtatctaaaggatgcatgtgaagtaaaagtaactttgtaatgttctttagttagtaaaatttctttgccttcggaatcttctgtatagaattttacatactctggaatcttttcttcagttgttgtccattctcctttaattctcttaattaatataaatccttgaatattagtaatgacaacaatcttagtttttttactataagttaatgatgaacaatatggagttccatcttcatggaggtagataatttgattgtcacattctatctgctcaagatctgcataaaataaatattttgttttatttcgatcatcatatgtaacttcataatcttcatttgtcatttttacaagatttccatcagaatcaattttacaaaatttaatttcattatatactttaggtttattcggtcctcttcttttaataggttgttcatcaccttgtttttctgattgatcttcacttggagatctagctcgttttggtttcttcggtttcttttttttgtttttgtggttgtactggttgttgagattgttccttactaggttcaggttctttttgtgcatatggatgatcatgttctgtaacatggaaattatcatcctcttctaaagtttctgattgagtttgaggtgactgaggctgagttacttctgtttgagtatgaggaggttcataataatgttgttgttgggtaggatgactaggatcataatactgttctggttgttgagtttgagtagtagtaggttcataatactcatactgtggttgtggtagttgaggctgagtctgagtaggttgactaggttgataatactgttgttgttgagcaggttgagttactggaggttcgtaatactgatgttgataggatggttgatgtggaggatacccagggtagtaattttgataacttggttgttgagtaggttgagttactggaggtatataatattgacctggttgactaactcctgattgttcataatattgataaccaacatattgttgacctgtaggatgagttggtgcttgatacgattgataatgttgaggttgatactgatcatactgttgaggttgatatactgataattcttgttgataatatgttgtctcaggttgatactgtaatacttgttgatattgatctggttcaggttgatactgaggttctggttgaggttgatattgaggatcctcaaaacgatcaagtcgttgttgaatgattttatctaggtctaaaacttcaaagttgtcctcctcatcctcttcatcagcaggctgatcaggattattgtcttgtgatttgacacattttattataataaatattaatacacatttgtatgttacacatctcatgttaatagacttttataaaaaattttccatgggggatttgtaaattaacaactcgttttattaataatatttcataaaattattatatattagtaatattaaatgatttttaataaattaatcatattaaatgatttataaaattgttcaatcagatatataacataaagctatatacaataacattatattgtatgtgttaaaattaatttatttgtatttacgtcttcccaaagtttttttattatatagcattctatatctatgaggtcttctttcgaacattttagtgtagctgtcaaaattgattataagacttaatttattagtaacataaatcactataggaaattctgcatcattatcagttttttcccatgcagttagccatttaactactattttatagcattttacacctgggtgtaattcgtatctaaaggatgcatgtgaagtaaaagtaactttgtaatgttctttggtcattaaaacataatttccttcctcattttgtgtaaacattctgacatagtctggagtcgtttctgaaattgttttccatgattctttagtttttttaattaatagaaatacgtcactgaatgtcatgacaacaatcttagtttttttactataagttaatgatgaacaatatggagctccctttttattctcataaataatttgatcctcatattctatccgctcaagatctaaaataaaatcatattttgttttatttcgatcatcatatgtaactttatagtcttcatttatcatttctaccagttttccatcagaatccttcttataaaatttgatatcaatagtttttttaactggccttcttcgttttctaggttgttcatcaccttgttcttctggcgcttgaggatcttttctctttcttgctctttttcgcggtttaattggttgttgtggttgttgaggttcctgttgtggatatggttgatcatgttctgtaacatagaaatcttcctcatcttctaaagtttctgattgaggttgtggttgaggttcataatgttccattggttgtgtttgatatccaggtggataagttggtatatgttgataaggatcgtagctaggaggtccataatgctgataatactgttctggttgagttacctgttgttgaggcgtctggtatggtgtatatgattcaggttgatatcctggatattgttggggttgagtttgaggttgagtgggttgtgctgctgtaggttcataaggttgataatgatcatgttgttgttgttgactctgtggttgtgatgtctgtgtttgatatggttgataatgatcatattgttgaggttgataatgaccaaattgttgtggtagatactgatcatactgttgaggttgatatactggatattgttggggttgataatatgttggttcaggttgatattgaggatcctcaaatcgatcaagtcgttgctgaattattttatctagatctaaaacttcaaaattgtcctcatcttcttcgtcatcagctggttgatcaggattattgtcttgtgatttgacacattttattataataaatattaatataaaattacacacaatatttttgtacattctactattattagagctttactccatggggatcttgaaattaacaactcgttttattaataatatttcataaaattaattatatattagtaatattaaatgatttttaaaattggctaatcagatatatcacataaagctatatacaataacattatattgtatgtgttaaaattaatttatttgtatttacgtcttcctaacgtttttttattaaataccattctatatttagaaggtcttcttctgaaaattttagtgtagatgtcaaaattaattataacacttaatttattagtaacataaatcactaaaggataacctggatcattatcagttttttcccatgcagtcatattataaattactattttatgacattttacacctgaatgtaattcgtatctaaaggatgcaaacgaagtaaaatcaatattatattgatcactagttaatagaagttcactgccttcggaatcttctgtatagaattttacatactctggaatcttttcttcagttgttgtccattctcctttaattctcttaattaatataaatccttgaatattagtaatgacaaaaatcatagtttctttgctataagttaatgatgaacaatatggaactccctttttattctcataaataatttgattgtcacattctatcctctcaagatctgcataaaactcatattttgttttatttcgatcatcatatgtaactttatagtcttcaacagtcatttttacaagatttccctcagcatcaattttacaaaatttaatttcattatatactttaggtttattcggtcctcttcttttaataggttgttcatcaccttgtttttctgattgatcttcacttggagatctagctcgttttggtttcttcggtttcttttcttgtttttgtggttgttgaggcggagttggacattgtgtcggctgttgagtttgttcctcactaggctgaggttgaggttcaggttcaggttgttgagtttgttcctcactaggttcaggttcctgttgtgcatatggttgatcatgttctgtcacatagaaatcttcatcctcctcctctatagtttgtggttcaggttcagatggttgagtttgttgttgaggttgtggctgagatatttctgcttgagtaagtgtaggtacgtaatattccgttggttgtgttgttggtgtatatgattcaggttgataataatcgtaactaggaggtccataatgctgataatactgttctggttgagataactgtggttgaggtatctggtatggtgtatatacttgaggttgatactgtaatgattgtggttgagtgggttgtggttgttctgctggtggtccgtaaggttgatattgatcatattgttgttgttgactcgatggttgtgatgtcggaggttcatagtacccatatgtatcaggttgatactgttgctgttcttgctgttgtggttgatatcctgggtaatattggtgttcaggttgaacttgaggttctggttgaggttgatactgatcatattgttgaggttgataatatgttggttcaggtggatattgatataattctccttgatactgataatgttgttggggttgagcttgtggttgggttggatattgagattcttgtatttgttgatattgtggttggtattgaggatcctcaaaacgatcaagtcgttgttgaatgattttatctaggtctaaaacttcaaagttgtcctcctcatcctcttcatcagcaggctgatcaggattattgtcttgtgatttgacacattttattataataaatattaatacacatttgtatgttacacatctcatgttaatagacttttataaaaaattttccatgggggatttgtaattaacaactcgttttattaataatatttcataaaattaattatatattagtaatattaaatgatttttaataaattaatcatattaaatgatttataaaattgttcaatcagatatataacataaagctatatacaataacattatattgtatgtgttaaaattaatttatttgtatttacgtcttcccaaagtttttttattatatagcattctatatctatgaggtcttctttcgaacattttagtgtagctgtcaaaattgattataagacttaatttattagtaacataaatcactataggaaattctgcatcattatcagttttttcccatgcagttagccatttaactactattttatagcattttacacctgggtgtaattcgtatctaaaggatgcatgtgaagttaaagtaactttataatgttctttggtcaaatacattagcttgtcatactcatcttttgtgaacattttaatatcatccggaattggttcttcagttgttttccatacccctttggtttttttaactaacacgaatacgtcactgaatgtcatgacaacaatcttagtttttttactataagttaatgatgaacagtatggagttccgcttgtatgtacgtagattatttcacccttgtattctagttcctcaagattcacaataaacataaattctgttttatttgaactaccacatataataacatagtcttcttcagtcatttgtttcacatttccctcagaatcctttttgaataatttgacatgtgcagattttttaggtcgactaagggtttgtactttaacaagttcttcaccatcttttttctcactctgatctccaattatagttcgagttctttttctttttcttggttgggttggtcgttgttttgatggcttaattgacttttgagtactttctctaccagctccagctccaggtttaggtatagctccaggtacaggtttaggtacagtttcaggttcctgtattggttgatcatgctctgtcatatagaaattatcatactcttccacagtttgtggctgaactatttgttgaggttgaggctgagtagatggtggtacataatatatataacttgggcgaatgggttgaggtagtggatttaaataatattgttcaggttgagttactggtgtttgtggatgccagtaatagtgatgttgaccatatggctgagtttgaccctgaacttgaggtgtctgaaattgctgtggttgatattgaccatatggctgataatctaatggttgaggttgataatatgttggttcaggttgatattgtaaaaatccaggttgatactgataatattgttggggttgagcttgtggttgggttggatattgagattctggtaattgatgataatttggttggtatccaggatcatcaaattgatcaactcgttcctgaacgcttttatctagatctaaaatttcaacattttcttcttcatcttcctcatcatcagctggttggtcaggatttttatcttgtgattcaacacattgaagtatcataaatatcaatataaaattatatgtgacgttccttttcattatactattattgtagctttgatccctgggggatcttaaaatcaataacctatatttagtagagatacggcttagatttaaatcagttataaattgaactatcccatttatataaatatttaaaatattatatatatatataaatataataattataaatataaatatagtgtgtgttagtgtaatatattatagaagttttatattaagttatttttttctttttctttcgtaaaataaattatagaagtggctttttaaaaatataagataataggcatcaaaataaagaataatatctttttttaaagtaatactaactttacatgggcaaggttcattagaatttcttctccaaactagtttatccttaaacataactttactacaatttacatcactcttaaattcatatcttaagaatcctcttggaccaaaactaatataataattgttttcacccagttcaagataacgaccttcagaatcttgtgtgtaaagattaagataacccgaacgactccgtaagtatactttccacttcccttcttcgtggcaaataagcataaatccattttcatgttgaattgtaaacacgttattaattctataataagtcaatgttgacgcgtaaggttttccagatatttgttgaaaaatgactttataatcacagagtatcatttcgagatttttttgaaatatgtatacttttttatatggatcctcaaatatttgtttatagtctccttcttccattggtaccactattccattttcattttctttcataaaaatcattttaccaggttttttactcagttctagatgttcggtacctttggggggttcagaagtttctgtaacctcaaagttgtcttcttcatcactgtcagtatcactactaacgggatgttgttcaggtttgtcagcacattttacaaatccaaataatatgaataacaatatacatttgtatgttacacatagattcattatgaattgtaattatattttcaggatggggatcttaaaattgagaacatacacactaaagacatgtttaagatctgcacgaattccgatttataacatctcattatagaaaagttaaattatatcaagttgtcatgtgtgtattacaaacactaaatagtttaatccgtgttaaatactaatacaaataaataatataaaggtataaacaaaacattaacatgaattagtgaaaacgaagagtgttacattatttaaaacactcaacgttgctaagaaatattaaacaaaataaccctttaggttctattactagcctcggtcaatgacctcaacataaaatcattttactactgcattaatattagcaccaataaaactcaaattagatgactgcattttggaatcaatgcacatgatctggtatataaacgggatcatatacagtatatgtacacatttgaattaatggtttagtgggtaataattctaaataatttacagactttttgctgtaggatcaggtttcgaaaaaggtaaatcaggttaagttggtctagtggttaggttaaggtagaaaagatgtgttctaagaccaactgttgatagggaaatggataacttagttaagtttgatgaataaattatgaaacaagttcattgattagatactttttatcttttaatcagacgaagccgctgtcggagatcccgaatcttgatcagaaccagtagtagctgcagcttgatccgaacttgaggaagctgtagtttgatcaggacttgttgcagctggcgttgaggaactagtggcatcaggagtggtagatgaatcaggagcagttgcagattgatcttgatcagttgaactagtggaatcaggagcggtagattcactggcatcttgatcaggtttggggcaaaccctcttaactttgtcagagtgatttttaacaaaaaaattgtttgaaggaagatctaacagaaacatcttaacggacttaaaatcactatcatcgctatctttccagacaacgtcatctccatacttcaccttgagacatttaactccctcattgaattcatatctgaaggagtaaagcctcaaattaaccctataatcatatgaactgagctctttatcactctcaccatataacttaagtttggatacatcatacctcttattggtcatatcattccacctagcaaaataatatttgaaaaatgagaacttattgttatcaagcagaacgatcaggtatttcgtaacactaacaaatatgacctcagtaccatatacactaccatctgactcccaaacaacagttgatccttgtacaaccttaccgaaaacaccaccgtttttaggaacgtacttatgaaaattacgatcattggtgcactcatactcagctgtgctctcagttttatttacatcaagggtaacacctttggcagaatctgttgatacaggtgttgtaggcgttgcagaaactgttaaagtttgatcagtttcagtagctgattcactggtagattgatcagttgttgattcagttgaatcaggagctgtggttagactcgtggcagatggatcagttgattcactggcagttggatcttgatcagttggactagtggcatcaggagcagtttgatcaggagttgttgcactagtatcatcaggagctgtagatgaatcaggagcagttgcagttggatcttgatcaggatttgaggaactagtaggatcaggagctgtagtagctgcagattgatcaggacttgaggaagatgtagtttgatcaggagcggttgcagatggatcttgatcagaaccagtagtagtaccttctgttgaactagtaggatcaggagtagttgaggcaggtgtagcagaactactgtcagaagtttgattagctcctacacccttccattgaccaagtaatgtaatataaaaaaataaatttactgctataatcaattttccattcattttacccgtccgacgctaatcttattcttttgttgaatataatagtgggatggggacacacccaaattaaaaaataagaccaataccaatatcttataataataataacttcaccaattgacatatatcaaacccaattcaattacttataattaaaatatcacttatgtcataaactattgctcaaacactactattaatcctattataatttataataacgacaatatacctatgacacgaatattccttggtatatattatgccatattagttaactcgggttaggttaataatctttatatccctgaaaatttgttctagtaaatacttgtttaaaaactccatctttccttgcaaatgttttaacgtatcctgggaaataaactataaaagcaaaccggaccgtgtaagaaaattctactggatgatcatcaaaacatgttttaatccatactacttggcctcttacagtaattttttacatttaactccaggcacaaatgtgtatttaattgatccggcaggactcatttcaacataatattgttcttttgtcatctcaacttcgtttcccaaagcatcttgcgtatacattttaatgtaattaatatgtctgcgtccactataactccattttccattaactcttttaattagtacgaacatatccacacgttccattataaacgcattttcttttctattataagttaactttctgacataatctttctcaggtatatggaaatatataacctctccgtcacatactacttgttcaagatctgcaaaaatattatattttgttttggcaaagccataatgtaaacacatatagtcttttatttctatcattggaaccaaaattccttgttcatcctttttcataaaaattattgatttacattttttgggtttcttagtttcttcaggttttttttctttcttatcctcatctccatcctctccaccagctgcaccctcttcaggttcctcatcatcagatcctacttctaccggaatatgttcaggttgtaactgctgatctgaaccacttggttcggttggctgagctggtttatcctttggtttatcaccagccaattgaagttctgataattgatcaactaacttcccttcatcatctgaacctagttgaactggaacagtttcagatttcaatccttcagcaccttttgtttcaggcggtttggatgtctcagctggtgatttatgttcgtgagttggttgagtgggtgttttcgattgtggcaattttgtttgttcccgccggtatagagtgtattgaggataactgggtttatcttgagctggacctgagataagtggtctgagatttgtaggtggtctaaatcttggtccaagatctaattgctgagttgatgtaggatatgcttgtgtaggtggcttatataaaggctgacctcttaattcgctaggcttcgaaactggtgttttagatttacgtttttcaggcttcttagaaaatttactggaatcataacccttagatttagtttttttatcaaaagtttttcttttttcagattgttcatgttcagtctgttgttgaaatggttgcagttgagattgttgatattcaggataatactgttgttgtgacattggtagcgattcgggaaaatatactggataaaattgttgttgtgggccataaggaatattttgcggataaggctgaggttgatctacatattgtgtatattgcgttactggttgatatggttgaggtccgtaatatgtatgttgtacaggtatataatgttgataaggatcataatgctgtattggaataggttgggatggtataaaagttgggtcaatttcttgtgttactacaacaaagcctggttcaggccctggtacatactgcacctgttgataataatgttgtggttgtaaaggatctactggtattggctgttgtggaattccatcctgctgtgttggttgtgtatcataaagctgtactggttgtgtattataatactgtactggttgtgcatgttgatttggatcagaatattccacaggctgagtaaccatttcagatggttccggttgtttttgagattttgtttcctcagcatttccagaaccctcgggttccacagatgtttctgttactttaagatccccatctccttctccttcactgtcactatatggtactaggcctaagtcattggtatcatctggacctccatttttattatcacctgatttattattaattttatcagctgatctcacagatccgaataatatgaataaaaatatgcaattgtatgttatatatgaattcatatttgatatatactactttgttccatgggggatctaaaaacaatttatctttagatattaaaaaattttctcaatcaatcattgattaaaatgactaaaatataaattaaaatcaaataattacataaaaactccaaactaaatcaggtataacaatgtctcatctcaatgttaaacaattggttattattaaaaatttgtagcaaataagattctattgtatataaatggtatgtatgttaaattaaatgttaaataattaatttttagtatttttttgattgttgatacatttttctatatttcccaccactttttccaaatactttaaagtaattttcgaaaaagactacaacgtttaattttttggaaatagataatcccacaggatattcttcattttccgttttttcccaggctaatgtttctttaaatataattctggtacatttcatacccgacttaaatttgtacctaaatccgctgtgagaagtcacataaaaaaaataatcttctccatcagcttcaacttcatttcctttttcatctagtttatatattttaatatgctccttaacacgtcgacatgttgttctccatcggtctttatcacctttaataaaaagaaatgtaccatcaatagtaatagtaaaaatgttagtatttttattataacttaatgtttcacaatatgcgttatcaggtaatttcgtataaatactttcaccatcacactttatttcctcaagttttcctagaaattcatacctaatttcatttacagtacttattatttttttgtaatcattttctgtcattggtattatgttaccatcagaatcttttttaaataatccaatttcattacatgttttcatctttttatcaccttcagaaccctgagcttggccagtggtttcagttacatcaaaattatcttcttcatctcctcctccaggttcaccaccctgttcttctggtttctcagattcactaggttgttcagtaggaggttggtcttgttgctctgttgaaggttgagttgattgatccgttggtttatcgtcagttaacttatctggttttggttgttcaagagttttggaatcttctttagtctgttcctgaggatgagatgatctaatcattatctgtacaggtttttcgggtcccatttgtttatcaatttgagatttgggttgtctaaatgacttaggccgtctaggctgtcgatgtggtccataataatgtattggttgtctttgtactggcatttgttgtataggcggtgttggatattgtccatgtaccataacaggcgtttgttgaacaggaggctgtatatacggttgtccggataatatcataggtatctgttgcatatccggtgttggatattgtacaggtactataacaggcgtttgttgcatcggtggtatatgcggctgttcggattgtggtatatactgttcataagattgataaccagaataatcttgttgatatggtccatattgagatattggtataggttgaggatcggtttggtaaggttgatatggaatggtttgtggaggctgaggttcaggataatagtaatttgctgcttgttgcacaggatctactcctataggttgaaattgaggtccataatactgtactggttgtggatcataatactgtataggttgtggatcataatactgtataggttgtggatcataatactgtataggttgtggtggtatagatcctggataatagtactgcaggtgttgtggatcatgataataaggcggaggaatggtttgaggttgttctggttgtgtctgagcttctaattcagaagtttcagttgtttgaaagttcccatgattattgttgtcaccatatgatccaaggccaacaccactgttatttgattgatctgtaggttcatctccacacctaccatatccaactaatataaatataattataaacttgtatgttaaacatggattcattatttgatctataagatttattccatgggggatctaaaaatttggtaatctaaccatttctgaatatatttatagatgaatatcttcctcacaagtcaggaaagaaattttataaaattaatatacacttttgataatttaatagtaatttaatattattttattgcctaattagtctatggtgatgtattgatataatctgacgttatgtcttagtatttaacaaattaattatagttgaatgtgtaaagtatattattaaattgaaaatattacatgaattataaatatttttagaaatcatcttggtctggctagaatctgtttaaaagatccttgtctttttccaaatacaataagatacgatgaaaaatatattataacatttccctttggagtaaaacgaactgattctggagacgccttaaacttttttctacgccagattgtttcccctttatatgtgactttctcacagtttactccttccctaaatgtgtatttaaaagcttttgcagcactaagttcagtataataatcattacaagttatttcaacatattttccccaatgcgttttagaatagaatttaagatattcctgatctctcctgccctccactctccattcaccttcagaatatttgatcaatagaaagccacctctacgagtaaaaataaaaatgttttttactttattatacgataattgtgtgggataatttattccggcgttatgtttatataccacatcaccgtcacacaataatacttcaaggtttgcatataataaatatttttttaacttatcatcgtcgtgtattcttttgaaatcttttttaatcattggtattatgttgccttcagagttttttttaaagaatcgaatttttttacatttttttactgcttcagatggcttttcttcctcttcttcctcatcatctccatccccagcacctccaactgctccttcctctgcttcctcaggttgttctggttcactgggttcttgacctatttcctcggtttcctcatcatcttcatctgaccctacttcaactgtaacacgttctggttgtaatggttcttttgaagcctgaggtggttgagtttgttgtattatttgtgaaggatgagggagtctataaggatccggatgtaataaaccggatccagtatttgtatgcggagtatgaccagaatcagaatgagattgttcatatggatgataacgttgtccaaaatatttattaccaggtgtctcacgtctagaataataactgggacctgcgggtctaggataaggttgtcttggctgccttatttctggaggttgataatgatatattggcccatattgaggagcttgttgaattggttgtggtcgtggttgagtttgtaggtatggtggtctatatattggtcgttggggatgatattcataatgaatttgttgagttagtggataaatttgttctggaatatgttgaggcggaataggtacaggttgtaagtgttgctgataatatccggattgtacttgactagactgaggtattaattgactgggttgagccgttccatatgtttgatcagtaatagatccaagtccatgttgcataatattatctgagattacagtttgtccagcggtttgatcatcatcttcgtcaaggagattttctattccttttattatgagattaaaatcacttccctcatcatttccgttatcttcaggatgataaggatatttatctgaagattcaacacattgtattattatgaatatcaatatatatatgtaagctaggcatctatgcataatataattgaaatatattactcataaaagatctaaaaattaaaatcatcgggtattttaaagtgttacttctaattattaacttgattattattaaatcaatttaatgagaattgactattttaacaataaataaattttatttataattttacagtatagactaaaatatcttatttccgattagctttttttaaaatcaatatcacaatttatagattaagtttgatttgtttcaaataaatagtcttatataatataatttatttatattggatcaattatcattataaatcaattaaaaaatatcatgtgtaatttaagaatcattgggtatgtttctggattttctgatacatttctgcgtatattttttagaagtcttttcaaaaaccttcctacaatctttaaaataaaccaaaaaacgttttttagtagtataacatattaatattggatactcttcatcactttctttttcccaaactacttcatccttgttttttacccttacacattttaaaccttcaacattaaacctaattgattcactcaaagttaaatcaatattaatattttctgtacttatctgaacgtaattaccttcagaaccctgcgaataaattttaatgtcgcgaggaacattgtgaaattttgttttccaaacaccatcgacgcatttaataaagaaaaaccgatcgttaccacgaattataaacacgtttttaaatccgtaataacataattcattgcaataaggctttccagctatatgttcaaaaacaacttgataatcacaaagcaccatttcaagacttgcatgcaatgtgtattttttcatattaaaatcatcaaatatctctttgtagtctccttcagtcatttctactagttgtcctacagaattctttttcataaaaatcatctttggaaattttattgtttttttctcctttccccccttagcattttgtttatctacatcgccagattcatctgttttttgagttggttcatcctttggtttatctccaactaattgttccttttctccatccctagtagtttgagtatcttcttcttcatcagagtccagttcaagtttaacaacttctgggaccaattccttaactggttcagttggttttgtacttttagttggtctattatgtttataactatgttttggctttttcatttctgtaggttcacttggaactttatcttgattcgatttttgatttgggtgaggataggttggtccagaatttgaatattcactactattcccatgacctatttgttgtgatcctgggtgataatatctcggctggtttaatccatactgatattgaaactgaggaggaccttgataaccttgttgatatggatgataaaatctaggactataagtatattgataaccctgaccataatgatatataggataacctggattgtaataaccacttggataaactgtactgtgtgagtgataattatgaccctgtagatgtccagctacttctgttacattaaaattatctccttcatcaactgtatcaccatctccttccttatctccaccaccaggtgtgttttgtttatctgcacattgtacaaatttatcttttgtaaatattactaaccatatatatgttgtacataaattcattctataactaatagaggtttattcatgggggatctataaataaataatactaaaatattcaacaattaactatttattaataaaaaaattacttacttatattaagttctgatatcattgtttcataaacctcaaccaaattaaaagtaagaatttaattaaacttttatagttatgttttcaaaagtgtattattataaaaaattccaaatttttaaatgtactaagtacaaaataatgaaatgttataataagatttacttatgaaattattttaattttatccgatgaccttgcgattccattctccttcatcatatgtacattcgaagactttaccaggaaaataaaaccttactatacgttctccagccagttgagttattactcttacatagggtctacttggttctctctcccagataatctcatcatcatatttaacagtatctacaggtacattatcgtcaattctgaatttaaatacattaggcccaagaagttcaacaaaatatttattatcactaacttttactaattttcccgtaacaatttttatgtaaaaactaagattatttggaatgtaaaaaactttcatcctccatcttagattgtaggataccattgataaaattttatctctaaaaataatgttgtagatttgggaggcttttttgtatactaatcttagcggatgtctagtttcagacttattctcccagacatttaaattatagtgaagtatttttttacatctgcacattaattttagcattactagagatgagttgctcaaaactatgtctatgtctttttgagtcactggaagtattttatcgttatcatctaatttatatatcttagtataaggcaattccgggataattggtattcccataccaatttttgaatgagttataggtggaatacttattaaggggggttgaagatcatgttgttctggtttataatactctattttctgaggaccatataagttatatggtttaggttctaatttttcaggtggttgatacggtagatattcttgagtgtgtggttttggtagttgataaacaggatcgtaatctgaataaattggttcagtagctgcttctgctttataacttggctgataatgtcctttatgagttgatatggatgaggttccgggagttaaataaggtggtaaatcaggtttgtggagtttattcggttgttggtcaatatcatcagtcactaaatcttccagttgtgttacaacagtatcaaatccatcttcatcaatattgttagcctcatcttcctcaatcaggtcttccaattcctttactactacattataattatcatcctcatcactttcatcacccccagtacctcctagttgtaaattagttggtttatcagcacagtgtgcaaattgcactagtaaaattattaaaatacaattgtatttgccgtatattcgcattattttctatgattttatcatcaatccatgggggatctatttatcaacaatttacaaataataaattagaatgattttttaaataaactattaactgatacgatattgattttaaaacatttatttgtggagttatttgcttttttcttttttgataaagtatcttctccattggttatcaacacattcgtaaaccattataaaggtaggaaaataaaatcttaatgaatttttattgaaataactcaacgtccttacataattatgttggggattatgtaaaaaaagagtactttctccaatagttaccattctgcattttacaccagggtttaatatgtagcgaaaaccaccgtatgaagtaggttggactgtatattggtctggggttagtctaaaaaatatccccttttcatctctatcataaagataaaaatctcttggaagatttaaaaatttcttttcccatttgttattcgtaaatttgattttgactatttggtaatcaaacgaaagaaaaaacagcctcttaaatcttttataaattacactttttgggtattctgcatttggcatatgcatccaaacaacattataattacacaaaatcagttcaagacgtgttttcaatgaatattttaccgcatatttatcaaatcctaatatttgatagtctgttgtattcattacaataaagttacctgaataatctagtctgtaaaacgacattgcttggtaagttgaatattcgtcctgataataattttcattatttaatctttgattactaaacattttattcaaactttcatattccaaaccaacgtctttcacttcctgaactgtacttggttcctcagattgatctgtttgaatttgaggtgggaattgaaaatcatcagttggataatatccaaatcgacttttagttgattgttttttagttttttccttttcaggaggtggtacaatacaggtttgaatggttgttattttaattgggccacctacgggtccataatctattctacgggcacttttatcaggatcagttttaaaaagtggtatgggatcaccaacggctccataccttgcttgatttgcatctggatgatattcttcgtcttgaccaaattcagtttccaattcattaacatcataattatcatcatcactatcatcttcatcatcatgagatcgttgagtatgtttatcagcacaatttccaaacttgattagtatgaatataactacacatttgtatgttacacatttcataattgtttgaaaataagtttaaatttcattcagtttaatatataactataaaatgattaaaattaacaaacgtcaagatattgagaaaatgttaaaaattaaaactaaaaacattaatttaaaacaaaaattaaatatatattcttaaatattacatatttgtatgttttattagtaaaattaaaatcataattacacatattaaagacataatgatcatttaaaaaatctagcagtttgcataatctttcaaacattattaataaaaaatactttataaagttgtttaacagcacaacacacgaaattaacgagtttacacaccaatttaacaagttcaaatccatctgaaaaattaaaccaataaatcaataataattaatgttctttaaaaattaaaattcattaaaattttgttttgatgatcttggctggaataaatatgtccaagagttattaactcttgtaactttaacaatataattgtggaaaaaaatcacaaacagattatcgttcacgtagctgaatgttctgacataaccattactaggatctcctccccaaactatagtcttttgaaattcaattattctacactttattccttctttaagtatatatctaaaggaaccaaaccctgttggttgaacattgtattggcttttaaatatgggaataactcttccctgttcatctatatcgtaaattttaattcctttgggtggtctcaaaattttcaaattccaatgatcgaaaactttcctataaacaaacgctagatgtctaaaaattagaatataaatgccccttttttccttgtaaattagttgttctggataagctttaccttgttcgtgttcccatattgggtctttgtttgctaacaatttttctagaggggtattaaattcatatttaattccaaattgatcatatccctttacaaaataatctgaaatattcattggaactaaattatcacctgagccttttttaagtaataccatttccggtattatactaacttttttttcagatttttcaggagtaggtggccaaccaatttccatagtctcagtaacaggttgatccttttgtttaccaggttcaaagctatcatgtgtagcttcatcttcctcaagtaggtcttccaattcctttactattacttcaaaattgttatcctcttcatcactttgatcaccaccagtagcaccatgttcataaccttcacctccttgatattcaatacattgttgtggttgaccactgggttgtcgaggtttatcatttgctgatccagttggttgatctgttgaggtttgatcagtatctattactaagtcttccatctttgttactatagtttcaaatccttcttcatctatattattagcttcagactcctcgggttgtccaacatgtttatcagtgaatttatccgaacactgcgtaagtcgaaatatcataagcattaatataaattgattttcaaaaattgcattattttatatgaatttattaaaatctatttattaacatcgaaatggataaatagtaaaaacaaaaattaaaaaccgtgtttatctgtatactattagattgtaataatagtctacttaaaaacaattaaaaataaaaataataaataattgttagtttattattttaacttaatgtatatttgtagatctatagatccatatatttccgtatatcaaatattataactatattagatactatacttttaacattcccaaatctatttaattaaatttaaaagatttgtgccaaatttaagtaatttagcgagattttgtcaaatttcaatcatgaaaaattcacattctcaaatatagatcttaaactcagtaaaataatttaaaattctatacatatatattgataagaaataagattatgttattttttacaaataaaaactgttacaataaattcattaaaatttaaatataaaaatgaaatcatttcataaagcacttaatagccaatgcgataaacaaaattccaacgattacgataacaaccaaaaaaatagcaacagttttgttaaatttaacaggtttagaatcatctgcaccccttaatttagaagctttctcctcttgaggcttaccaactggagcctgtgaaggaatatcagctatatcttgtgaaggaatatcagctctatcttgtgaagcatctgggaatgtaaatatgtttttccattcgttgttaatatacatataagcgttaaagaactgaggtgattcgacaataagcatcttcatatcccaatttacatagagcacagctggattaatttgtccaatctgtggattttgggcccacacagtattatcattgaacttaatttcagaacacttggcgcttttgaattgaactgcagcagcatatccaaatggatacttgatggcttcataatcattcttatcaagtaccacattattttctccaatgaatgaaaagtcattctgagttgagccatataatgtatcagttgaaattaaatagaatacgcttccatcgtattggtaaatcatataaaattgtatgaaatcaacaatgatcattttagtaaaagaattgaaaaatactttggcaggatgtttgtctccagaatcatatgagccatatgtccagacaggcttattgtcatacatgacctgagtacacttgacattagacttaaatgtaaattcagaaccaaaaccaaatgatttttcattaaattggcccgggtcattgaaaccagcctgatgcatgtcattttcagttacaaatgtgagtcttgaattagtgaaaccatcaagtgggtattttgtaataatcatacattcttgttcagtacatttgtatgaataaatacgttcatcgaactcggcaaaaaggagtcttaaatcttgatggaaacacaaggttctagggtaaccaattgaagtatcatcagaatacttccacaatgtctggcttccgaatttaaattcagtacagttgtattcattattaaatacatactctgatactaaatcatattccctcactaaatatgaactcatatcgccttcttgagttgatccggcctgatcattggttataattgtaatgccacttgatggttcacaaatctttgtcttagataaaagattgcatctatcacttccacaactgaagagtaaatagaaatgactaaactgaatcaaagcaacttttttaataaagttatagttaactcttcttgggtactggttgtcagtttcacttcctggtgtccacaatgggtttccattataactaacactagtgcatttggttccatcaagattgtaatcaactgaaacttttcccttgatcattttattggcaggttcgccatcttctgtaataatttcaacagattcgttaggcaaattttcaaataattcattcaaattcttagtttcactttcccattgattattggtaagttgatacgtaacaaggttaccactgaattgaaaaacaatttggtttgaatccatatgcatacatatagctctgggtttgctatcagaaccatcaagagtccaaagtacatagtcttgatattttacttctttgcatacagcgccagtcctaaagctgaaataaagtgagggacccagatcttcaataacatattgagttctatcattagttctctgttctgaaccgtcttgggtaatgattttgagcaaggagctggagagacctaactggttactagtagaatcaacaaccttactaaaacaattcaaaaatactaacacataaatcaatttaaaaacattaattttcatgctatcttactaaatgattttaaaaagttaaatattgctctaatttactttttacatgtatttttcttctgcatggggatctaattttggaattttcaagcaaataaccatttcccaagtttatttcgaaaatgtgtaagtgattccatttgcattccatatttttaaataaggaaggattatataaattagcacatgtccattcgttctctttatatttttacacattcacaacaccagaatcacttcggctataaatttgataataccgttgacatgtttggatagaaattattataataaaaattttattaaaattttagtcgaacatataagcattttgaagattcccggtaattctacagaataagtattatttgattgagatcgtttaactcattgtctttcatttcattttatcatctttattttgtttaagttattatttaatttataatattaattatcccaaagttgcttttttgctttttatttaacatatttgtaaatgtataaaaaaatattttctagcatattatatcaggaaaatattatgtaaaacaacgaaaacttatatttaaagtctattagctattaatatataataaattatttaggaagtctagaaaaaataacgtagatcttatattaggatttgtgacagttatatatgaaatattattgtctatactaaatattattaattatataaccaaaaattattgtaaataaccacaattttgccaaaactttaaatttgtctctggttttatccgttcaattgttggggttcaataattattgactttcaagccattctgtatttttaattgttgtttttaacatttgttttaatgttctgttatacatatttaaatgttatatcttgttattttggggaatacatcatcccaattccttaaattacaaaacatataatatttctgtttaatttttaaattcgtgttagtcaaaatgtaaaaccttattattgttttaaaattaaactttgattctcaggtttgaataattaacagggttttatttgcttcctaaccaacccttatcatataacctttatgacctataaacactaaacacataatactacaaatatgtcttgacatatattatctatttaattcaaacctctcttaataaatatataattggatttctgttattctataattatcagtaaggatggtatattattttactacattcgatgagttttctttaaattcagttcttaatttaaggaaattcggcattttttaataattgtatgtttaaaatgaaacattcaattgtttatgatctacaaatttgtgtctaaatttctgtttattagtttcacgtgctgatttgaatggccgagcatccggatgggacctttgatttaactaataattccaaaggttctctaaatggtaaatatgattcaatacatcattactgggtgagtcaattatattctaagacctactttaaagaaaaatcccatgacacaaaatttaaatattatgactccagcagtattttgaaattctttttctttcactgggtatctaaatgggcatatgttgtctccaaagaatttatagaaccatacaaattacaccctttgcccattgcggaccaaattcttcgttggcagccaattttctccaagaatcttagtgacgggctgcttagattagaatcacatgaaacaggatatagtaatgcagacaaacttggctctaacagacatgttctgttaagagctttatttttaacattttggaaaaggacattacttggtcttttctgtattgttcttactaatgttatgagcatgagtgttgctattttgattaaacatctactggatgttttgaacaccaaatcatttactcttatgaaaatatttctatttctttcttctataataggattacagattgttgatgggcttgttcgagagaacataatcttgtttatataccgattaatcattatttgttattattcaatttcaattggtgtatttcaacatgccctatgttatagacgcaacttctttaataatgtaaacggatctaacttgttgaatacttgtaacaatgttttacatagttgttctactgattctaattgttcaaagaacccattatactgcccagcaatgaggtatcaaaataaggatatgtctccaatcatatttactcttgtttatttcgattcattttacattggaatgtttttggaatcttcagtacccattgttaactttttgtcaaactttatctatggagtaatattaatttccatgcagtttaaggttaatttatgggtactattttttgttggcatatttttcacattcctgatggtggttgttgagatcttaaacacttatttgtttcactttatttctttaattaaggattataggataggagaatgcatagaaattatatcgcagttacctctaatcaacaagttgctttatgacgatattgcaatcaacatcattactcaaaccaggaacggtgaactgttgttgattttggttagattgttattgacttttattaacattacattctatacaatttgtgctaatttatcattctatgttttgatgaggtactttgtaaaatcaatcagagatgcagaggttattaccgaagttgatactgctgctttcttatcatcaatctacatatttatgaaaatacttgattcaatgttcctaattccttattcattaagaatcatcactatgtcatatgtatcatacaacagagttaataaatacctaaacgaatgttcacctaatttttacatcagtgataacaagtttggtggatcaacagaaatgtcatacgatgttccagatgtcactaatgacctttgtgaggatgttcttgtactatataaggatgcatggttttcatgggttaacagtagaaaagatttcgttagtatgaataatgaagttcttttgaaaaatatcaatttccagattaagaggggtgaaattgccatcattactggtaatcaaggatgtggtaaatctaacttcataaagtccgtacttggtgagatgacattgatcagtggttcaatggccgtaattccacttcacacatcaatgccaatattttatgcatcacaagatatatggctgaaacaaggcactatcagatcaaacataacctttggatataggtttgatgaggaattatataactcagtaatcaaagctgttgaacttgatactgatatatcaacttgggaaaatggtgactttagagttgtctcagataatgctcactcacttagttgtggacaaagggttagaatggaaatggctcgcgctatctatgcctaccttatattcagcaaggtgaacaaggagtacaacagaagtaagtgctcattcctaatgtgtttggattctcagtttcatgggttagatccatacgtatccaaaactgtattccacaatctgttcaatgctaagactggattacttgtcaaggacgatcttgcggttatagtttcatcatcaatgacattgttggataaatgcgtcagaacttcagacttggttaagtttcccagaattcccatatacgagattgataacaaatatttaattttcaattgttacctgtcagatgtttttggagacaaaaagccaccaaatgggtttgaatatatcacacctccttcaggtccatataaattgaatttcttcaccaaggatatgatgaaactatgttatttcggttcttctaaatcagtaagacggtttgttaccaaatcaaaatatgaaagttcaataacttcaattattggtgacgcttattctgatgataaattcaatccatatctactgtatttcaaggcggctggatttacattatttctttttattgtcctaacaattgcatcgagtgtcatggataatgttaagtttgtttttgcaaccaatctctcagattatatatccaataaaactaacgaattcaatgatggcatctctattgatttatcggaaatcaaatcacacagcaaatctgccctaaatacaatagtcataattgttaatatcattattatttgctccttagtgtcaaccttattgtttacagtgtcatgtttagttgcctcaagaagaattcacgaatattgtctcaactcagtcttcaagaacagctcatcaataatcaagattaagaaacaaataaaccaaatcattacatatttttcagctgatattgtcattgttgacgattttttaggtggttatatactggtaacaattttatcatctgttttaactattgtttgtatattatcattattttacacaattcccctttgtgttccatttattgttctatctttggtcatttcatttgagttgattttactacagtacatcaaatctagtatcaatatccaatttttatatttagaatcatcagcaaacattaacacgtcttgtgaaaattctatattgggaccatcaatttatcgaagttttaaaaaggagtgggagttggttaatgatataattgagcactcagattacagatctagatcattttttgtatattttgcattaggaggatggatttctgtactgttcaattggatattttctattacaaccgctttattcctaaccgttctgatcatgttcgataagcttacaaactacaagatgaatgttgggtactttggattaggtttatcactgagtatgagcgctataaaatcattcggcaacttttcaatgttattaacagccttagaattatctatgtgttcagttcgaaggtttcaatcttttattcctcctggaaccaagtgtgtgtttgacagattcctaaatgttcatgaggaggatgttgttattgattctaccaaacctagtcccaaatgggatgaaaagaacctgctgaggaggagaacgattgagtttaaagacaccaatccaaatatcttaaagaggcttgtgttcaggccaaagttcaactttatacatgtttccagatatttcccatctgatcacaccggagtggtattgaaggacgtctgtgtttataccaattcactgatgaataaggaaggcatgatccttaacaatattacttccactgcctctagttcggatatcattggaatcattggtagaactggtgctggtaagacaactttactatctgtcctccaaaacactattagaaatagaacaggtcatgtcctgctagatggcagagatttacaagaaattcccaaaagtgtcattagaaatatcattggtgttcttccccaactgccttttgtctttaagggttggaccattagaaggttcttagatccaaggagactatttactgatgatgagattaatcaagcattgaataactgtggactcctggattttgtaaataaccttcatggtggaagaaaactagatactgttattattcccagacctatcactttaaaaaaggggtctaatgatgaatcttccaaagaatcttttactcaggacaggtcattaactgaagattctcttaaatcagatggtattatgttatctgtaactcagcttagaactctttggtttgccaagcttgtcttgtgcagagatttatacagaatgataataattgacgagccaccgtctgaaatattttatgatgaagatggttctgaagttcaggatatgggcatcccaatctacgaactcttagataaatactttaagcattgcacatgttttgtgactgcgcattatgccaacgtcctcaaatcttgtacatcagtatgggtgatgcataatggcagactcataaagacctgcagcgcatctgaagtatccaaaaacgaatcaatatcaaatgtaatcgaagaaatggttaccaaatactcaaactaattttaatgcagtaatttaacaatgcgaaattgcgttggacccttaatttttcagtctatacatacataaatatataagttaatttttatgcgatagttcatgattattgaactaataactcatgatattagtttgggaatattaaatattttgatattaaaaattattgtttaaaatttaacaacattaaccttgatacttataaaagatcattaaaagtataaccttagattccctattcaatctcttctaaatatatcttacaaacactaaaatttaatagagattgttgaataacattactgcattattttgagaaaatttcttatgtattatataccaacttccattcattgttaatttttttataaatgttgaatgattgaagattaaattcaacaaatactaaattcaaatctttgtgataataaattgatcgtggaaatatgttttctgaagtgtcatctttcttccataccaactgatcatcaattttaaattctgtacatctagaatcttgtctaaatctataatcataagatgttatggttgagccttgggaaccattcattatatttttattaaccacatacttgctaatatcattattggaatgtttactagggtctgaatcatcaattgttacaacagttacatcactaggatgttccgactgaagcagatactttttatttgaatcaggatctgaatttattgtcggatatattgaatttttgtctaaattaaccttgcttccgttaataagtgacacttccaaactaaacatatcttggttaatagggttaattaatattttgttacaatatggataatggtcggattcccaaagattgtctgataaagaacacgattcacctctgcaaactttggaaaacaaataaccatcttttggaatatatataccagtattggtttcataatcaacaaaataatggaactcatcagtcccttgaatggttttaagatcaagagtggttagttttgtattcttatctccaggtttataagatggatttataggtggattaaagctattttgttgatttttgccaggattattatcgtatttataggatattgagttttcatcacccaaatttatcataatcattttagaatttaaatcaacatacaagtttttgggtgtgtttttactgtggtaaccatacttccatactgttacgttaccatataatatttcaatacagtttgagttaacagcaaattttatgtttaacgaatgtctgttcaattctatctggtattttccagtatcattttctttaagattagtaccttctaaatcatccgcagttattatttttaatttttttaaaaaatcaggaaagggcttttcttgtttcattgtactagtcacatttaattcttggcgctcatttggattaaatgggtcttgtttttctcccattttccctatactttcacttcctacagatttataagaagcagaaagatcttcttcttccagatttagttcccattttctcccattcttgtgaaattctcttgtcgaaccattacataagaatatgttgacatactttatagattcaagtgtagcaactggatccatgatgaccttgacggcgaattcatctggatcattggtatgccatatgacattatcgttgattttaactattttaaacttgtattggtttttggcttcatatgttccaaccttaactgactttgaatagtcaaacatataggtgctttttttggtattaatgtcgagtgcaattactttcattttattattatataccaacttccattcattgttaatttttttataaatgttgaatgattgaagattaaattcaacaaatactaaattcaaatctttgtgataataaattgatcgtggaaatatgttttctgaagtgtcatctttcttccataccaactgatcatcaattttaaattctgtacatctagaatcttgtctaaatctataatcataagatgtcatgtctttaatatcaagcttactatcatgtaatttgttcacatcaacaacataacctttgttgtcattttcaactgaaactgttatatttttaggttgttcagatacaggtaagttagttaatgtttctactctagatttattttttaatacgtgaaaaaattccacatcgaaattagccttacttccgttaataaggcaaacttctacattaaactcctttttatttgaaccatatatcagaactctgttggaataaacaacgttgttcttgtcgtgataatttgggtaccataattcaagagtgttttgcgaataccatgaaccgttccgtttaaccatggaaaacaaacgaccctctttgggaatatatactgaagtgtttgtttccaaatcaacaaaataatcgtagtcatcagtactctcagacttgccgatgtcaagagtaattagtttggtttctttcccatttacgtagtaactaaagtagttttgtattgcctgatcaggggttttatattctgcaggacttggggattcatcggaaacagatgatgaatatgtgaactgattgtcataacctgttagttcttgtttgtatttataaaaatatctccagttgttatttaaatccaacaaaatcattttcgcatacacgttaaagtatattacttttggaaagttgtttttaaactcattctcgttgaatttccagacagttttatttttgtatttcacctcagtgcaacatatgttatctttgaatctgaactcgtacacgtgtttgtattttatgatatcgtaagactttttgtaattttccttcaacctattatcttcaccttttgttattattgttatattggataatgtatcgtcattttggtttgattcttcaggttcttttccagagttaggatcaattctaatttttgaaaaatatgaccaatcattagtcaaatctatcataatgattttagaatagagattaacgaacaaagattttgggtattcggttccacattcatcaacattgtgcttccaaattatattatggttatatctaacttctacacatcttgattcatctttaaagttataacccaacacatatccaatacactttttatcatattttgtttcatcatttaccttatagccaaaagcgtcataggttacaatatttatatcggacgggctgatcagatttaactcatttttggagtctatttcatatttatttttatgtttgtaataacacaaccacgtgttggtgtaatcaactaagatagttttcgaaaaaaaattaagggttattccttttggaaaaatatcaaaatttttatttggatttctccaaattggagaatctccgtacataacttctacacatttaccttcatttttgaatttataatttgctatatattcatgttctacaaaatcatatttactggtgtcattcaccctgtaatcggaaccatttacagtcactactttgaaactactatgtgtatcttcatctccatgcttctttgtatcaacaattttccttccacaaaatatcaatatgcagatatagatacttgttattttaatccatcttctcatttcttcgttccttataaaatcaattccttcctatctatgtattcgatggggacggttacacatctcttttaagttttatcatttatcctcttaatttcccaaatgtgtaattaacaacattttaaacatgtaaaactttaaataagtgaatcgcattataactcaataatccctggaataagaatatctaaatgcatacacttacattcaataataggttaaaacacgttgcttaaaaattattattaaatataaaattaattatcaaatttgataaaattaaaaattgattatgctacaacaattttacactggattaattaagagaggggtgtgaatcttccacttattagaacaccgtaatttcatcaatttcactgctaaaacttgatgcatttctggattttttaatttttctggtgtgatacaaagcgaatcccagtcctgctccaaggattaacaagaccactgcaattacaatacccaaaacatattcctttgtatgtcctctttccaacctttcagttttaactagaacttcatccttgttttctttagtttcatttgaagttggttcagttacagatgtatcagattccctccttgaaaccgcgacttgtcttggtttacctctggtatatctcttttttctaggaggctcaacttgataggtttcctcatctgagctctctgaatcaccaatatcactactactaggtgtactatcagttgaatatccagctgggaatctttggctggttgttggtttagaatctgatgattgttcagtttcagaaatatcttcatccgaggtttctgaatcactagtgccactactactggaactactatcagtggaatactcagtcgatgtctgcagtatgtctttatcaacgctttcaaatacttttctccacttgtcaagattaacgtaaacgtaaataaactttggggaggtaagtatgatcatcttcatatccctatttatatagatattgttgggataattttggcctaattttcttggattatgtttccaaacggttttatttttaaatttgagttgaactaagttagcgttggttttaatgttatacgataaagcgtatccataggggtacttgacgagttcataactttcttgatcattctcctttacttcagggccgattttagtgtatattttgacatcagattcggagagtgtcatgctggaagatttgcatatgtacctccatttatgaagatacatgtaaactagatgatagtttgaaaatttcacggctatcatcttcaagtacgtatttaaaaagacagacttggggtattcttgtttagatttatacccgtagtaccacagaactttgtctttatataaaagttctctcattttggccttttcattcaaattgaagatatatccatatcctgtatcctttctttcgtactgggtttcatcattttcattaattttggaataattgtaggggtcaatagtatgaatttttaaatccgatacagatattcctttcatgggattgtttcctatgcatttacacgtagtttcattacacctgaacattgaggacatatcattaaagtccatgaagattaatcctaaatctctgtggaaatataaagatgtaggaaatccccttttgtattcttcagttttatatttccatacattcttttctcctaatttaacttcgacacacttcacattatcttcaataacgtactgatatacgtaatcgtgcaattttaccttaaaattggaagtatcatttacctttggattagaaagatttttgttatctgatgtgataattgtaagtccattttcaaaaacaattttcaaatcaacttttgactcaaatttccaattatgatttctgtaagagtaggaaaggtataatgttggatagttgattataattctcttggtgactctttgaaaaaagatttctttggggtattcgtcaccatattccgtattatcatgcttccatacttgctttcccaaatagtttagttcaacacactttgagtcgtgataaaatctgaaatagaaggtagatttatattcatccacgtagtatctatccgtgtcattttcaaccaattcattagaatcttcatcaatggtataaatatttacatatgacgcatataattgtgagtctgattgatctagatcagctgcctttgaaaattgttgattttctacttgatttaaatcatgttgattctttggttgggttaatacaccgttagtatgagtggaatccacggacttccaacaaaaacaaaatattgtgtaaactgttagatacttatacataccattaattctcatatttacaagataataaatctaaatttgtgtttacatgtatttctaatatgcatgtttaactaatttctattcgttgttattttttgatttaaacggagttttaagttaatttttaaataacttatttattattttttaaatttcaacacacaattaactacattcaactaattgagcttatacattttcattttctattcatcaccattaccacaacaattacatatttatcctgttaattttacctttttcgttttaaaggtttattttaaaattaattttgcatttatttacttattctatctttaattagcaatttaagcattttcaccctacctcaaaccactactagtaattttagcatatatcttttatgaatttcaaaatttatagtttaatcaactgcaattctaataaaatgatccaatttttaaatataataaaaatgtgtaactatttaccttccaaattaattatcgcattcattcccatactaatatatttcagtaataaattatttagagaattgttaccatatagtttgttttgaaatttaaaaattatgttaaatcatctgaattacaaaattagggttttacactcaattatggatcactcaaattagtgaactgtcattacttcatgaacaggcattaaatttgccatttttttggcctttttatttgataaatatgtaaatccgaaggccaataaaagaatcaacattacaatgaccattgaaataattgctattattaaaactagtgcaagtgcaagtccaagttcgtctgtaattgcttcatgccttaataatttttcttttttgtttgagtactcttcataatttgatacatcacccgaacctctaagtgatttggtatctatatcagacaaggttgcgttggaagagttccaattatttccttctttctcatatacaattaagttatcgttaaaggtcaaaacgattttattttctttataattcattgaatttgggtactctgacccgtctgatttccataatgtgttttgattatacaaaatctgttcgcaattggacttaaaataataaatagtcttcaacggttctccttctttatagtatgcaaacacttcatagtctccacattccaccccaatttcactgggctcttctgacttttcaataggttttttgtgtgcacttaatttgagattatcattagaatatatgtactgatagtaatgattttcattacattcaattttaactccattatctgacaaaattaccgctctgggatattgatcttcgaattcccaaaatgacctattttggtatttaactattacacacttctcattattattaatttgatattttaaaactcccttatctgattcaaagttatagtttgataaatcattttcaacaagcttccccttaccttcaattactactgtaaaaccttgggaatctagtttacaaactgcaaaactgcaaagaatataaataaatacggctaatttatcaaacattcaatacacattcacaaaaatcaaaagattccttaaacacatgggggttggatttaagtcagatgttcatctgttctttaagtgatttttctactcgattccagttaactttattgaaccatgaatttgtatatcctcttctatcatttctataatcgatatagtacgcatgttcccatatatctgaacattgtatgtcattcatctcacgttacattataggttaacacatttatataacatgttaattatagtatttagaaggtagtaatagtgcggtacatgtgtacattaatatactagtactagtgtatacaatactattaatgcagtggtatttaaagatacctagtgttaacagaggtttgccattattatatagtttaattggattgtcgccatcatgtgtatccacaattcttaaattgggttcatttttgaaataaagaagccacacccatccgcttccaaaatgatctaaaagttatttttaagtatttaaggaattatgctattatacgtatttaatatatattatagtattagaatagtatatagtaatgttatttgttactggcagctgcttctacaaattgttgcttgaagttgtcatatgtttgaaatgttaggttaatgacatcttcaacaaatttcgtaggttttccagcactgtgtggatcaagtcccagccaatattggttatgattccatatttgacaggcattttcatatacttttccttccgctgaccttatcaattctaacaacttattttcatgtaattcttaccctctaatgtttggttgaatatgtgtggatttgtttctcctaattctaatagcttagattatttaacttactgtttaaattatttacgtatccttgatgatgtttcagataatgaaatctgactgcttcctccgataagtcgggactcaattcatctaatttctgaaaaatatgaaccacttgttttcttacatatggcaactccatcaattcaaaccttttaagatcattcaccaaacctttcccatcgttgaacaaactctttaaaactttgtatttgtataaacggttaaaaggtgaattaatgatgtaacaatgagtgaaaactgggattagaaataagaaaaattcattcatcttctctaatatttgggactataaatatcatttgacaggattccaactaaatgcgtgtcaataattattttcttacttgaatcatagatatgattatatatatatatttatcttcgttatcatcaggaattgctacaaatgaatgtaattgttttttcttactcagtattatcagtgacctattcttgttgtaaagatttgactctattatactctaaacattctatattactactaaaattaccttgagcagtatatttagtatgtttacgtttaggaaaatttttactaaagcattttgactgtccgagtcaattgggttgtaagaattgggtgtaacttccttttggctttgtgtattattttgatagtgtttagtggtaaatatttgcaaattattaaatatactctcgacgtttacgatggatccgactagaaatatacatattgaagatttcttacttgaactcaactgaagtttgcagctgttaacgttttcatttagtattgaaatgttccttatattgaactcaattattgtattacctggttaatatttagtaatcacgactcaccgattttgtttaatgaattgagcaaaaatgagatagtttgtagtttcgacaagtttatattataattggtgtatgggatgtttggcaaattaacgtagttattatatatgaccactattggtattttctaattaattatgatcaggtttaatctcctttgataataactggttaaattcgaaatgctaaatacaccaagttaccagtattatgttgattgtgttgtacactgaatcgatatatttgacgtataaatattcttcatccctgaagtattatgttattttagattaaaatttaccaaatataaactttaatgttttcgcttttaattgatgagtttaatgagtcatataatgaattaatatcaatttctatggtcagggtctcatttaatattacgggttcgataaacaattcattctaaaatcattcaattagattaatttatccacattgactatatagtaaagtttgaaacagtttaattacactatttacatgggataataattcaataaaaaggttttaatgtgcaaagaattgtagtataaatactgtgtataactaatagttacgttgttaatttcgaaataggaatcaagcaatccattcgttttgatgatgaaattgaccttttctttggtgattttcaatatatttgtactattcttgtaaacttccttacttagtttatttaaacagtttaaacaatctaaaaatgattaaatatcaggaaaaataattaaatatttttatattataaaacctaagaaatatttgaaattatcgattttaaagtttgcgctaaatttcataaatattatcaactaacattattaaatgtgtaattatggaatcttgggttttagattgggattctttcagaatgtgtaactttatattaacttctttacacaatattctacttacaatcatgttgtaatttatattaatgtcatgtgtattatttattttatggttagtttctcttctgatttttatttcttatggtatatgcttcagaataagtaataatttgaaacctatttcctctttaaagttttactccaaaattaatgatttaaatgtattaaatgaaaccatttacggacttagttctggtgttccggaaggtggctgtgccgttgcagtcatcagaatatccgggcctaattccttgcatacactaaatttactcactaaaaacgtaaaactcacttcaatatttcaatttataaattactttagagtgataatgtaccatataaacctagatttgttaaattgtgtaaattatattcattgatcaacaataatttgattgatgacgctttaactctttattttaaatctccaaattcctatactggtactttgaaatcaaatttaaactctatttgttcaatataaactgatcaattttaatttaggggatgatgtagtagagattcacacacacggtaacgaagttataattaaagaattatttgacaactttcgtcacattgccaataattacaacatcaagtaactcttttagttattatgcttttgctcagactgaggcaggcagaaaagggcgaattcactagaagagcttattactcaaataaattgaacctaatacaggttaaacaatattttatgacaatttgatttattatcatattcttgacattatctacgtacccttaaattatatatttatataattctaaatcaacttgtgattacaggtcgagagtattaatgaactaataagatcgaagaattacatccagaaacaaaattctatgttaaaagtaattccaatagctttaacttttgtttagttaaataacagtttgtgtgaaatatataaaagatggagtaacgagctgattgatataatatcaaaagtggagggctccatcgattttcaggaagagagttgcagtgacattatcctcaaagataaaagttcaattttgaatcccatacaaaatcttacagaagaaatattcaaattcattaatgacaagtaagttaaaccttctaatttattaaataacttattgcaggaaggagactatagttgacggtattaaacttctattactagggccaacaaattcaggtatttaacattctttgacccacattgatattaaatgactaaataaattccttactcatttttagtgattttattaaattattttacagggaaaagtagttttataaacaacttgttcaatgatgatatcagtattgtgtcaaacattcctggcaccactcgtgatttaattagagttaattacaaccttgatggcttgaattaccaaattacagattctgccggaatcaacaaccgcatattagacggagatactaatgctacagaatctttggataatgatactattgaactcattggtatcaaaaaagccctcaatgaaattgaaacttcgaatgtaattcttttcctgtttgatccagtgaacgtaaatgattcgtttagttcattacaactatttttaaatcttttaaatgaaattaagatcttttattcccatacatgtaattccctcagcaatactactactccatctattcctgttactgacactgagggcaacatatctgatcatgatcaccatggtctaaacggtgtttgtaaaaaactggtttatgtttgtataaataaaactgatttgatagagaacgttaattattacaaaaacgcaatcttggattttttaaataattataaggctaaaaacactaacggtgcaaaatcaactgttctttttgaggataatctgaagatattagaaaacactaatttagataggaatgttgttagaaatgtaataaatttgataaatgaagacatagttaacaattttaatctgaattctaactcggttttcattgacaaccagcgtcacaaatctcatttgaacaatataataaagcatttaaaaacaatcaaaggttagttttagttatttttcatcgcaattttaataattaacatctgtttagagttactagattcatcaaattatgacttggagatcatatcagaatatttgaggtaattgaaactattgtacatttaagcaattgattattcttgcagaatttcttcttttactctagaattcatttatcgcttctataatacattattatcaatattataatttcagggaatgcgtttacgaaattgaatttattattggagaacgtactgacgactatatactcaatagaatttttaattctttctgcattgggaaatagatcataaataccatattttccagattaaattaagcaaacttttcagcctatattaagtaaataatgttttgagaagcattctatatactacgtagattaaacagttttaaattctatattagtgaagggaattattaaataggcgttacaactattttacactgaatttatttttcaactgccataaattatcccttttagagaacgtgcagagatgttttaatattcttctgaatagaagcctgttttcctctaaggcaatttgtgagttaagtggttcttacctggaatgatgggattaaagtggtgaatcagctaaacatttaatgaaaataagacgagcttaccttttctgtggttgttgatttgttgtttttatttttgaaatagtttaaaatatggtctgtgatcagatatgtgaggtttttgttattcttgcattttaagttatacaggaacttattcttgtttacttccccatctatgttacagggcttacgcttcctgcggtagtttctcaggaaagtgtaatcgttttcagtggacagattaacctcattgtagtttatgaaggaacttatattctcgttgttattgagcaagtggtatatctcatctcctttttggtcatcattttggtcatatatttggttaagttgcaagttagtgtcaactccacggctcagttcagtgctactcaatactatgttagacgtagcgtcctggtttgacgaaacggactcttctttagatttgattgggacaacgattggtggcttgggatacgtgatcaggtactgtaaattattaatgtacttgttgtagaatgcgttattctggcttaggatttgttgagataagtagtatttgtagagttgtctttggtatatcttttcttctatggtactggctgttattagtctgtaaataataacttcattcttttgaccgattctataacaacgttccttagcttgcatgtcagtcattgggttccagtcaggatcgtaaataataattcttgtggctgctgtcaagtttagtccaattcctcccacttttgttgtcagaatcattaagaacaccttgtcatcatttgaaaattgctctattattttattcctattcttaactgtgtgttttccatacaaaacaagaatctcgtccttttcataagtttccaacaaatgttcataaattatgtttaacatagttatcgtctgtgtaaataataatattttcttattctccttcttccacatttcgattatcttcaaacttacgttcaacttactgctccctactgattctgtccacctcttacttgggctttggctacttttcccactaagcttagatttactaaccccattattcagccttaagttgaacttaacaggcgtgttattaagtgaactgcttgacgattgactcagtgatgacccgctggttctatttggtgaagatgaattattcatgataacgtcagatgtataaaaatacctattaatatcatgtgattctagcattcttgggtgattgcaaatcttacgtagaattgaaattagtctcagtacgtttttatcgtgggccagctcctttgatattgttcccctaagttctttagttatttgccgattagtttcaaatctgtcacgaattaagtagttgaacttgttcaaaacgcctacgtacagcttatactgttccatcgttaaattacacagtattattctttcccttttgttaggtaactgtatttcattattcgtatttattgtgctatttcccacatcgccttcttgatttactaggccactatcatctgaattagaagggcagccatattcctcattgttaggcggtgtatttgttcctttctgatttgaacctgggggtaaagtaccataagaggacgaggaagagccagattccatcctggtaggggaagtggcatcgacatcgatcgggttagtaagagtattaaaaagattatctttagactttctagacttaaccgtccggcagatgtagggtaaaatcaggagtttaagtttgttgatgtacttggaggcatcatatttagtattggtaattgggataacaaaatcttccatgaaagttgatagggatccaagatagtttggtattataaaatcaattagtgaccacagttcaacaaggctgttttgaattggtgaccctgacaatataattctatgagtagtttttattgttttaactgccagggttgttagtgtatttgggttccttatcttctgtccttcatccaaaatcacataatgccacttgtagctattgacattctcaatattaattcttaagtattcgtagccaatcaagtaaatcaagatggagggttcttcggagacataatctaaatcattatccactgtataacaattatcaagatagtttgaatgtaagacgtagaatttaactcctttaaatatccagttgttaatttcactcttccactggtcaattagtgttacattacacactattaatatcctattcatttcatcttcgttattttcagttcccatcactttattatgttgaagattattggattgtgtgttattatctaatgtacaagtgttatggtctatgagggtgtttcttacatatgaagaatatacaatacaattaatcagcgataataatgttatggttttgcccagacccatatcatctgcaagtattcctcccaaattttcacagtggagtcttattaaccagctaagtgccttcttctggtgcgagtagagtttattgtaatagctcaggggaataaacatattttcctcgagtttaactacattttctttaccaaatactactatttccaggtctcctaatatatcataaggttactttaaggaatatttaattaaatggatatatgaattgtaagataggttgtaagtgatgttgacatcgtacctatttgggttttgctagttctttgagtttgggattcattttgttcatgtgttaaatcagaaatgattaattcatcgttgttaatgattattttattcctatttactagttcataattaagttcacactctcctccgacaattgcttcatcgttcaatttaaatttaatgatttttgtaatattgtcgtagaatttcttgagtttactatactccttgttctaaataatatttattgggattttttgattattttgttaccttctctcttaactttggacttagccacctcaatatctcctgcaaaaaccgcaactcgtcaaatttcttgcacgtttcctaattaattaataatcacaaaatatatatcaagggatactatgtgtttagttcaatttattttggaatattttattaatttaatctattaccttttcaagggagactgaatcaatctcctttacatctgaaatatcgatatccattttaaacagttctttaaaacgagatcattgcaaaatttcgacattttattgacatttctgtaagatcttaaatactgttgccacacataatcaaaataaagataaacatacccaattcacttaaaatatttaaacaattattgattttaaacattaacttgtaaaattttaacatttatggaattttaaaactatatttttatttccgaaggttgaaatgaaaatacaacattcattattaataaaataattatttaagttattgttttgttatgttttaaatacagaacatttttaaattaaaacatattttttaatttgaaaggagtttatagttttttaaatcaatctctacacccttatcctcacatctcttgatttcatatttatagtactaaacatttaactctatatatgacatgtaatacctactatatgtaaaatactacgtagaatcagaatattttgagaattataattcattttgactgcttaagaaaagaatttgattaacacataaaactatgaaaaaattatcttaaaaacgaagttaatattcttttaaattctataattatttttaaatttaattttaattagatccaaacaacttagaaatttcgtttgtctctgaatgaataaatcaataagccataccttaatcctatctaccttgttcacacatttcatgaaacttttatataatatatagtgtattattaatagaaatataatttaaataaataattgagatttgtaaagaatacagcaggtataatatatgaaaaataggatcagcagatgcaattttgaatctgcaacagaaacgaacgaacaggaaaattaaatttagatttagaaacaaaacacaaattataaaaatggaaaaatttatggccccgattatttttattacattttatgtattaactttatccaccacatcagttagctctgttcccaatgccgatgatcaaaagattgagttgatagacattaaagatatcaataccaccaaatacagtataattttgtccgaaaatgatcaaaacgcagttaaaatagttccaaaaaccggtaaactcattgatatggtattaatctcaagtgacgttttatggctaaaaaaaggaggtgataaatgttcagaaattttgctcattaaaatttcagaggatcatgtattaatttctttaaaactgataaaaaagaaggaaagttctgttattagctttgttaaacaccatgatactataattgacactggaaatttatcatcctttttactgcttaacgatttatccggcacaattatgccaattgttgaacatgaaacttctgaagataagagttttaagcatcacaattatgaaactgaaatagatgaaacatttaacataagctgggaatttgacaagttgtattacttaagtaccaaagaaccaggttcaaaacattcaaaagtttatgaaccttgtggaagtggaaagattaagcaaatttatgatttcggtaagctaatttgcaaggcctccgaagaggaaaagagctttacaaggattgaagttcatagcagtgataaaattaaaactaagttccttttagctacaacagaaaacaacactactaaatattttcgccttaatgcagattggaataaggttgaaaaggatttttatgacaaatttttgggtgaatttattgaaaaacttggtaaagaaggttctagtggttcaaaaaatcgccctggtcataaaatagtttctaattcaaaaccggatccaaatagtgggtctgataatgataatgatctcttatatccttctggatatggaaaattttcgacaaatttatcaaatattaaaatcacacgactagctcccagcaatatatatacagttgatactactaacaagtttaaaattttgggaactgagattactttgagaaacgaatctcaagttactgaattatttataataaaactttccaacaaattagttttagttgagatatgcttaaggcatgaaggtgtaaggtataaaaatgcttattataaaagaactttaaatgaagggagatttacaggtactaacaaaagtgagttatttgacgccttatttaatgatttcagtaagaatgaaaacaaggtaacattaaagtatacatccgtgttccctataatccaaggcaaagaaacgggtaaaatgcctgatggcattttagatataattttacctgatcatccatcagttgccgatgcggccactcaaacagaagaagtttatacaccaacttatgaaatgaaacctcaagaagaaccagttgatgaatctaatgagaaagaacccatgacgaaggtagaattaagtcacgaaaatgataccaaaaaacagccaactcatgagaatactaaacacaaaaggtctgtatcaaaagaaaataaacatcatccagaaagtcactcagacgttaagaaaaagttaagacaagctgaaaagagctctatatcaagcttcctgcctaataaaattgagattattttagttgctttattattaatttgttgagtttatcatatttatattttatatggtagattaatttatgattccacttagtgtctttaatgatccagttttgaaccatttactcgaaaaatgataaaaaataaaacaaaattctgatttattatttatagatctattattataaatggagttaaattaatattttaacaattaaattttaaattttgtgtgaacacatatattgtactcaatccagatatattttaagtgaaaaatgtggcataaatattatcaatttataaaatattatttataaaataattaaattatttaaaacttttatgaatgagcaatgttataaaaatttctatacaaaattatcttatcatttgagtttttggacaaattccaaaggatagtataattaatttagaaatgttaaaccttaaaaaatttaactttgattcagtgtagaaacgacataagtttcagtaacattaggaatgttatggatcactcgtaagtattcatacctattttttatattacataaaatgattgttattgtagacttttgttttctaaaattgttaaaaaatattaacagtgaaattggcaagataatctaatagggattaattaaaaaatacacgattttaggctgtcttaaatgacttgaatgagatgaaattattaaaaatataataaagaatttaatataaaaaaatgtcaaaaaaggggcttcgaagtcaagaatttaaaaacctggttaaattagaaacttccacgtaagtcattttaaataattgtaagtttaagtatttaaaatataaatttggttctggtaaataatttagagaatttaaaaataaaagattggattgtgtaatattgaataactatcttcatttcatttttttaaatatcctaaataaaaaagcgttgttaaactaaaataagactttaagatggtttaaaaattttaaattaaataacgataaaaaatacaatctaaaattcttgggttaacaaagcccatcaggaacacatttatgggcaatttgattgattcaataacaatttcagaaacaattttcttggagaaatttgaaatggaatgtttagacaggaacttggttttctatgttttaatagcctttcaattatcctatacatttttttgaaattttaatttatttaattctaagaatgagaatagtttattctttaagttttttcaatgttttactaagttttgcagttttcaagccaatcatacttcaatatcacgtggataattttagagggtgaatggttaatttttcataatatcctaaattttgataatttaatatatttattctcttttgagattatttacttctattcttaatcaaaaatgtctgtgtcctatacatggtttcctttacttcaattatttattcatgttttttcttacattaattcttatttgcattttattaatttaattcaaataaattcagcggatttgccaattttattagtttgtaaacatgtaccactataattcgaatcttaatcagtatatattattttttaaaatgtccaattttagaaatttatttatattattcttattctggatatctaatttatttgttaaaaatgcgtcgtgcgcaattggattattaggagatgattttacgactcttgacttggatttgggatctttagatcttgaaaagatcaagataattaagtcactggataaacctgtcagatttaaaattaatccaagagaacaagttctaattaattcaataagtttattaggcaatactctatggacaaaacttggtgttaacgtttgtcacgatgtagttatttatattttcgaggcccctgaagttgtaatttcacctgtaataaacgatggtggtataaaaaaggtttactacataaagaaaactggtaatcaacttacatttataaatttactaagctttttaaccttaattcatgatgaattcaagccaaaggattatttaattccacagcttttagatatttcagaaggagctcacaaagtattttataaatacaatattattatgttgggtgatttgatacatgaaaaatatgaacctagcgataattctggtttcactgttttaatggatggcatgaaaactatttgggatgctgagcatggggattcaaaaggtaaattagctttgtcaattgagattttcgaaaaggttgacagacttaaaatgttgaggattactattcaagattcaagtgagatgcatttcataatgaaagaaaatggatggaacccacttttagttcttggttttatgacaaactttaaaaggttggagtttggaaagatttttgatgctcagacagaaaaagagaaaaagccaaaggatctagatccattaccaaaagttttagatgtcagtacaagggatgattctttcatttacacttcctgtactcttttgaatatgaattttttaactatcaagccaatgttcgagtttttgactaaaaaaataattgatggccacaaaataatccatgatactactttatgcaaatttcaggcgttattaattagattatctgaccctgtgaaatgttttcttggaattagcattaatgagagtgtatttagtaatcatgatatttatttcgagagaagtgatgctgatggaaactgggaaccggttactcaatctgtggttttcgaagctgtccaacagtctatagttgaattttctaaaacccattatcttaaatcagctgatttatacggagtttggactggtgttaaagtggctgatttatcctccaaagttaaatccttactcactggtcaagaatttgctccaacaccaatacctacatctgcttctgccactccatcttctactccaattcccacgacacctgttccagaaacttccggatctttaccagcgttacatccaggttcggctatttctacaccacctccaactccctccacagcattaccttcatatcttgtttcctcacaaaccggatcaagtaagcctagtacacccactccaatgacaccgccaccttccacagatcttgttccagataaactctcagctacagggccagctttatcaccacacccgcacaaaaaacccagaacagagattaccaaaccgtcttcacctactcatttgaccaggaagccttctccttctctcaaagatcctcatgttggggatgacagttttgatcctccaaaatccactgagccgaggcatagaaaaccaactaaaccaaaatatcccaaaccaacccacgaatataagcccagtacacctactataccagaacattcaacgacatatactgaatatacaattccatcatctgaatatattcatggtgaaactggtccaactttggatgacacagaattatccagttcccttacaaaagataagcacacccaaactgatgcatctagagaattggttataacgtatgagcttttagaaaaactaaagcaagacattattgaacagattgtagaaattctcaagtctggattttccatcagtaacataaccattacttcattaacattactacctattttgttaatttagtaatgggacaagttattggttttaaaatcagaatacgaataatttaatttggttattcgaccttcaatgaaaagaatcgttttgaataggcgatattttaactatgaagctattagtgataccttcagattcaatgttattaatccatgttacatgtcagatatcagtgagaaatttgaattaaaatttagttaaaattagttataaaaatatataattcagtactctcaatgcaatattgagtgttattaatgagtcaatactcaagaaatgcaacgaaaacatgatagtttgttcagcatacgatttagctaatagtgattcgattccatagaattttgttaaatagattattgaacaattattaaatatattattaaaatgaaattgttagcatatttttttacaaagtttttagtattaaacttattaagtggtgtgtgttgtgttaatgatcctgaaaatgtgggtgataaaagtattgtattagatttaaagaacatagatcctagttattttaaaattgttaaaataaatgagattcttggaatacatccagaaattttcaggtttgaattaaaacctggtctctcaaaagttgtaacacaaataaattttgatcgatttaatatttgggaaagaaacccagataaaaacgatttagaatttcattattttgaactatacaacactaggaataccgggattttatttgatgtacacacatcaggtactggaggaggagagacatttcagttctcattaggaggaggatcctcgtctttcataggtttgattgaattctactggcatttgataagggcgtttgctgagaatattaataccgatattaaatttgatgtcaacgataggtttgatgctttgtaccatcctcacgcaaccataaaagataatatatcaagataccaagagtttaattcattttatcgtgaagaattcgttcaaataactgatggagaacttatcatctgggattcaaaatcaccttatgacccacatccaaatgtatcaactcataatgatggttctccactattatcctccggaaagcagttatcatgtaaaagttttcaagtatacagaaaacttaacttaattcatttaatcgaaataagattggaaaatggtgaaattgtatactttaaaaaagtagatgattcagttcttgaacatggtcaacctccgaaattcgagagggttgatgaagaagagtttgttagcagcaaaactagacttggatttgacgaattgatggggaaagcatttgaaaaaatttcagaaccacctattactgaaagtgaaaactcttttggtgaaattgatgttagtatgaaaaaatattatttgaattatttgaggcgtagtttgtatggaatcagacaagttaccattgatatgataggccaaagatattttagatcttttaattatgaaggccagaatattgttgaatatagatatggagatgtttatcgaattaatataatcaaatccaatgagggaacaaagtatatagagataatttcaatgacacgtggaaacattgagagaatatactttgcaaaaaaacgaaatgaaacagcatggaaaaaatttacaaattatgattttgacaatgcgttgagaaatgaaataaattacaagggtcaatgtattgattgtgttgacgtaaaaacaatagtagatgatctaccgtcagaaatcaagatccaaattaatccggagtacaaaagacagccctctaaatataataataaaaaacatcctagttcaccaactaacgtgaatataaaaggtggtggtttacgagtcaactctagtttcaaaattaataaaagttccttagtgttattagcaattttgttaagtctaatttaatttctactttacacatttacattacagtataaacaataagtcatttattaattcatgttacatgtcagatatcagtgagaaatttgaattaaaatttagttaaaattagttataaaaatatataattcagtactctcaatgcaatattgagtgttattaatgagtcaatactcaagaaatgcaacgaaaacatgatagcaacatattctatagtatattgctgctaattaattgctgccatgaaattttattaaatatattattaaaatgaaattgttagcatatttttttacaaagtttttagtattaaacttattaagtggtgtgtgttgtgttaatgatcctgaaaatgtgggtgataaaagtattgtattagatttaaagaacatagatcctagttattttaaaattgttaaaataaatgagattcttggaatacatccagaaattttcaggtttgaattaaaacctggtctctcaaaagttgtaacacaaataaattttgatcgatttaatatttgggaaagaaacccagataaaaacgatttagaatttcattattttgaactatacaacgccggggatcatgggattttatttgatatacacacatcaggtactggaggaggagagacatttcaaattttaacagaaagaggccttccatacttcaccggtttgattggattctatggcaaattacttagactgtttggcgatgataataattatgtggatgttaaattggatgttaaggacagttttgatatgttataccatgattacaaaattaaaaggcatggtttaggaagttatgaagttttcaaatcattttccgatgaagaatttttccaaatttcagagggaaatgttatcatctgggattcaaaatcaccttatgacccacatccaaatgtatcaactcataatgatggttctccactattatcctccggaaagcagttatcctgtcaaactgttgaactctttagaagacttaacttcatttatttagttgtattgactttagaaaatgatgaaattgtgtactttaagatagtagataactctgttcttgaatatggtcgaaccccaaaattccaaagggtttatgaagaagagtttactaaagccaggacggaatatgaatttgacgaattgttgaaaaaaaggtttgaaaaaattccagacccacccattcctaaagagcaaaactctcttggtgaatttgatgttagtaggaaaagagattatttcaattatgtattagatagcttttttggaatcagacaagttacccttcatatgataagctatagatatgttggaattatgaaatatgaagaccaacgaatcgttgaattcaaatctggagatgtttatcgaattaatataatcaaatccaatgtggaaacaaagtatatagagataattgtaactaggaatggaaatttaaacataacatactttgcaaaaaaacgaaatgaaacaacatggaaaaaaattacaaattatgattttgacgatgcgttgagaagtgaaattaattacaaagacaaatgtactgaatgtaatgaagtagaaacaatagtagatgatctaccatcagaaatcaagatccaaattaatccggaatttaaaacccaaccaattgaagataatcctagaaaacttcctagtgcatcaactaacgtgaatataaaaggtggcggattacgagtcaactctagtttcaaaattaataaaagttccttagtgttattagcaattttgttaagtctaatttaatttctactttacacatttacattataatataattaacactatgatttgtaattttttaaaaaatgttatattgtatacactttaaccacacattttgtattgaatttttatctagaatcttttggttttatttttttaaatttgtttaagatgtcttctgaagttgtcgtccagaaaactcctatcaatgatactgacttatataccaaacttaaggaacttgaacgacaattagaattatgcgaaattcaagtatatttcttcaattattaatttaattcgtattttaatttatttttattttattaacaacaattatgtattttttatacataattcttcgttttaatacaatatactaatgtatttctaggaaaactatattaaagaggaacacaagaacttaaaacttgagctcataagagcaaggaatgaaatcaaacgaatccaaagcgttccattggtaattggccaatttttggacattatagataaaaattacggaatagtatcctcaactgcaggatcaaactattatgttcgaatactttcaactataaacaggtgtccttttaaatctaattattaaatacccttataaaattttatataacactgtaatgtatttcatagggagttgttaacacccaatactagtgttgctttacatagacatagtcatagtgttgtcgatattttgcctccagaggcggattcttcaatccaaatgttacaagtttctgaaaaaccagatgttacttacgcggtacaaatctacaaactaattaaataattgaatttaacatgctcattcacatggatccctttcaacacttataatatttattacaccttgatttaactatttgtaggatattggaggaatggattcacaaaagcaggaaataaaagaggcggtagaactacctctaacttgtccttcactttacaagcaaattggaatagatcctccagttggtgttttattgtatggtcctcctggaaccgggaaaactatgttggcgaaggcagttgcccaccacactgacgcaacttttattcgttttgttggatccgaattcgtccaaaaatatctgggtgaaggacccagaatggtaagagatatcttcaggtatgtttctaaacacactttatcgtccctgttatctttattacttttctatgagtcagtttacacaatatcatagattggccagggagaatgctcctagcatattatttatcgatgaggtagatgcaatcgcaacaaagagattcgatgcgcaaactggtgcagatagggaggttcagaggatcctcttggaacttctgaaccaaatggatggatttgatcaaaacgcttcagtaaaggtgattatggcaacaaatagagcagatacacttgatcccgcattactcaggcccggaagattagacagaaaaatagaattcccacttccagatagaagacaaagaagattgatttttcaaaccattaccagtaaaatgaatttatcaaacgatatcgacctagaaacatgtatatttcatactacttttctacaacagttatataattatgtaattattttataatttgattatttttttaatgatttaatgatatatttttatagttgttgcaagaccagagaagatatcagcagctgacatagccgccatttgcctagaggcaggcctacaggcaattagaaagaataggtagcaatatatacatatttattattgttgatctccttattttacaacaattaagaatgtgtaaatacaaatttacagatatgttgtgactacgaaagattttgaacagggctggaagcgaattgttaaaaaacacgacaaagatcacccgttttatggagtttaatttcattttaatcacctcatattatgtaacatacattatacataacatacattttatcttaaatttatttgaatttggtatttaaaaatgaaagggttggacggagatattaaaaaacctgagactatattaagaggtcacagaatcgatttgaaaaaaaggagtcaaatcgcaaaacaagtccgacttctaaaatcggtaatttttcatttttgaaatatttttgccaaatttagaaaaagaaatcttatcgagacaaaaatgccatcgtttcactcaatacgattttcaaaaaatcgaaacagctggacttggatcttaagcggtgagccttccaccactattataccctaaacactcacttagtttattatatttgtatttttattggataatttctattattctgtgttattttcttaaattaacggataaatttgagtaaaattgattaatttaacattagaactaaagcccaggagaaatcctctaaagtaactccgcaaaaggagtataaacttctttttgttgttaggaattcgagaaatgtagaatctccaatttgcaaagatattttaaaggtttttactattctctagttacttaacttacctctactgttcttaaaatctttatattatccaattttatttgattgtcagacccttggattaacaagaaccaattcaggtcgttttatgagtaattcagttcctaatttggaacttattaataaggtgttgccttttgtgtactacggaactcccactctaaaacacgtgaaggatctactccataaaaggttagtttttccgcactaaacttttataggggtacaatctatcagcataacaaggctgagatgattagtggcaatttagttattgaggagaacttcagtatctatggcatttacagcattgctgaattgattgaaaccatatataagggctccaatggctctgaaaacatcttacttaagctcggacctataaacttatcaaatttaaacgtttacaacaggttttataacatttatacaattaaaactcataaattacagatattttgaggataatcttaaattcggagacaccaacattaacaacttattaattgataaataaccgtgtaatatactaattaacaaatttttacacttttatttagtaaagacgtttacaatttttgaaaatattaaaatggtggttattaggtcctgacaatcatgctattgacatctctaccagttccgatctaaagtagattatggtgatataaagcaaacccagtaaatgaatactcccaggtattcctcaataaaaagtacataattttgtgcgttttgtggcaattcctcgaaggttttaaattttgaaatgtctgttttccagccaggcattgtcttgtatactggctcgtactcgtcatattggtaacaacagctgggataacgcccctcttccaataattttcctaaattgtatataatatcatatataatagtgtatattatattaaatattatattaagtatgagagtagatatattgtagtgaatacactggtgtacctactattctatatacgtatatagctggaaacaagttttaatgaagtaataccggtaagtttgtgtttatagtgggtgcaaagtttaatttcgtcaaattgagatagtatgtccagtttagagagatttatgagatcaaacccagagaaattctgcacgtacttggcggcaacgaggtcaagccagccacagcgtcgaactctaccagttgtgaccccaaactcagccccgaatttttgtaacttattaaagttttcatctaaaccaattttaattgacttaacaaatgtttatactattaatatatatatataattgtgtaaatatataatgaatggagaagtaccaaaaagttcggttgggaaagggccttttcctactctagtttggtaggcttttaaaactccaaccttcaaaatcttaacattagggttgattcctagtccattgtaaacaccacttgttgttgtgttactagacgttacatatggataagttcctaaatatgtttgtcaaatgtgataagttatctatatgtatatacataaaaagctgaagtagggctgattgagacatgaacaaagtgatacctagagccaggtctaacaatgaaccgtttgctccttcaaaaaaaacctttttaccttcttttatgtatttttgaatcatgtatgaggtatcaacgacagaatctgctattttggaaaaattgactttatgttgctcaagttgtttatttagtaaatctctggtgtctgagttagtgaagactttattctcatgacacagtttgtaggttaactttgacaacaacttctcgaaattatcccaatttaacatttctcctatctaaatcataatcaacagtgtcatttatttgtatatattttaatgtgtaattgtgtaaaaaagtacttgaatgcccgttcttttacatttggttgagtttgtaggaccgataccacgtttagtggttccaatgcttgtggagtgctctccttgttcattttctagttgtgcatcaacagctatgtgtaaatcgaagactaaatgggctctttcagagatgaataacctgttagttaaatcgacacctaacttagttaaattgtcaatttcatttatcagactttctaaatgtacaacaactccatttcccagtacatttacagtatttggatacaaacagccgcatggaagtaagtgtaatttatactttactccatccaggaacaattcatggccagaattatgtcctcctacgtaaggattttatagaattggaaaataagaatataaagacgagattaacgtagttaataatggaggaatataatgattttggtgaatagatgaagaatagtatgtaaaatagacaataactggtgaaattgggggaagaagaaataggaaaaggacaggaataattatatatattaatattataccgttatatctggcaacaaggtcaaaatccttcgaaagaagagaaacgagctttccctttccttcatctccccattgcatcccagaaatgagaacaacctggaataacatttattatttaattaaaaacccgtaccttgtcattcactgcatcgtagcatcttttctctaccataggcggaagagatttattccacttttaactacagacaaccgtattgggcctaaaatttatacaattgaatgtagtcattagattgcacgttttaaaggccaatttttaaaaaatatacgcaataatttaatcctttaaaatttaattttactactttaaaccctataaatctcaattttcataatagttcattgagattaaatttatttaaaaaatgattatttatcctatttcatgaaatgttcaattttcattgaatcctcatcatttatttatttattttatttaatcttttaacttattttgaaattgcaatatttgaacaaaaaattaagttgaagggttaataaatgattaattaatgaaagaaagggttcccaactcagattccactgatggatttaatgttccactcttaggtattttagttatttcaatattagtattttttcattctgattgtgtgtttactatacacatatattacacagttttccatcacagccatggtgttaaaatacgatataggtgatgataacggagaaactagatttgaaatcacgtgttattccaggtcatgtaaggatatttttattagggataaattaatatgttgtacaacttgcagaagatgttatcattctgggtaagcttctgttttatatctatctttttagctgcaacaaacctccactaaactatgatattgtcatcagatacccttggcattgtaattcttgtaaagtaccttttaattagcaccttttcttagttttgtcatacccagttaactaacttttaatgtaatataaatctctatagatatgtgtaaaatgtaatgacagtgagtctggagtgagtagaacactgttaatatgtgattcatgtgaccgagcttttcatatggaatgtacgaggaacaaatacaccgaagtataatactaaaccctattaatttatccttcgattaactaatcttgtaccataataataattggtgcaatgaattggtataggtaccaagtggaaactggttttgtgatgaatgtcagtactgtaaatcatgcgacataaaattttctgagcaatcaataattgtactattccttagttattttttatagtctagtgccttcaaatacttattttacgtagttaaatgtaatttaaccctgtaatatgattgtatagacagaaggatacgacaacgaggggaacaagttgtgtcagtcttgtatgttaaaaaggaagaggggcaaggatgccggtatcagctactgttgtgtatgctcaaagtctataaacccaattggtattcatcagaataggagagtggtttgccaaaagtgttgtcaaagtattttctataatactttattaagttgtttacacatgaattatgtttcaatactattaaatagagttatattctgattgatattaacatttagacgtgcacccaaactgctctcgtttggaggaaaaagccgataaatttagagagggtgaagaatcttggatatgtaataattgctataaaattttaatctcattcaaataatccatctattaaatttattgtgtttaatatttttattcaattttgttataattcaaaatttttgttatatcaaaaaatagaactaaatactcagaatattgtgtagttcccaattttcatcttgaattttttaagtttaattcacttttattttgttttaaatatgtattttaattgtccataatgggccaaactgaagatttgtccaatttcgataagaaggatgcaaatcaacaacctcccaaaaggtttttcaatatactttcattagacaaatattattacttatttactgattgcatacattaaatagtataatattctaaatatcatttacatatgattgaattaggcgtcggagaagggagggtaaatgggacactattgaagataccgtttctctaactgaattaaaggccaaaacttcagaagaggaggccaaaaaacggcaaaagagactctatgtaggaaatctgccgtcaggtattatttcttataaaccttcttagttaatgatctttattgaataagttacatacacatatttatattatctaggaacaaaattgcaagatgtggtggatttttttaatggagccttgatggctatggttcctggaaacaccattgatcccagggaccctctagtgacaaaaaccgagatttataaccctgaccaaggttactgtttcctggagtttaagactccggaactggcggatttggcctttaaattggatggtataacatgtaatgggtattctttaaagctaaggaggcctttggactttaatttgggcacgaattcagatgacacaaaggtatttgtccagaacatacctctggatgttactgaggatcagatgaaggagttacttgaaaagcacggaaagcttaagttggctaaccttttgaaagaccctgcaactggagttagtaaaggttatggattttttgagtttgaggatgctagaagttctaaacttgctgttttacaccttaacgggtctgttttgggtaaaaatgtactgagtgtcaaacatgctgctttcgggtattttgcctctggagggaagccgattgattgtaaggcgtcaaatttgccgaattcaataactcagtctattctaagtaatcccctcctggggttacagttacagaacggtaggaggattggatcaaacccttcaaaggtgattcaactcctcaatatggttttccacgaggatttaataagtgattacaactacaacgagatagtgagacttgtaaaggaggaggctcaaaaatatggccccttacaggaggttgttattcccaggcctgataaggatttgacctttaaggaaggtgttgggaaggtttttataagatatgaagatttattatctgccagaaaggctcaatacatgttcaatgggagagtttttgataaaaacagaattgtttgttccgctttcttcccggaagatttattcattacaggaaaatacactcttatctaatttgtttttttatttatcaacattttactataatacatgttatagttctgtgtatagtacagaattatagtagacaagttgtgttggaatccttctggaatattataggaaaattaaaaatttcaagattccaatggttgaaattaagtgaaatagtttatttgaagtggaatcttgattctgtttacaggatatataattctcctcagaacagtgaaataaatgtattaaaattagtaacttttagatataaaaattttttgatgataaaattcgttcgaaagtatcgttctttgtggcattaagttgatgtgtgattttggggtgaaaattatgatgcctcatatggtgtagctatcattaccatatactattatactgtatacataatactaatactattattatataagattaaatatactgtaaaaatctattatctgttggtcccctagaattgatttagaaactgtcagaaattgattaaaagtatatattgattctggattaggataatagtcaggattttcctaaaataattggtagaatatagtacaataggatgtcaccgaaagtaggtttacaagcacccaattttaaatgcgaggctgtcatgccagacggctccttcaaggaaatatcactgggggattatttgggcaagaagtacgttgttttattcttctaccctcttgatttcacctttgtgtgtcccacggaaatcgttgccttcaacgatgccgtcgcacaattcgagcaaagaaacgtccaactcctggcttgcagcgttgactccaaatactgccacttggcttggagaaacactccaagggataaggctggagtcggacaggtcaagtttccgatgctcgcagacatgactaaggaagtcgccagcagctatggcgttcttctcgatgatcttggtatttcgcttcgcggactctttctcattgacaaaaaaggtgttttacaacactctctcgttaataatctaccactcggacgcaatgtatcattttttccagtagttaacctttattagcgttatacaaccatctatattatgattattttataacaatagtgttattaattgattaggtaaatgaagtattgagattagttgatgcattacaagtgtttgagaccaagggtgaagtttgtccagccaattggaaattgggcgacaagggaatgcaggcaactactgagggcgttgtagctcatttaactactaaaatgtcctgaatatccataactattgatgtactctgtgttatatacaataatcaatataatagtatatattgaattttaaataaaattattcctgtaatttttgtttattaaccttttgcaactcctttttcctgtcgtttatttctttggttctttttaaattagataaaatgtcctttttgaatatacaatttggtatttcagggatcttagcctttgtaggagctaaaaaattggtgtattatatatgattcataccttttaagccttttttggccattcttcgaagttttttcttatgggctgataccatacgctggatctaatgaaataattattatcagttacagtatatatatatatataaagatattggataaaataaagcctgaataatgaattacattgtattttctggcaagttcttgccttttagttccctctgtaaaatatgatataatgattagtaaaaaatactcttaagtttaaccatctttacaaaactatttagattgcgattgatttttgggttaaaattaacaataacttaataatacaaataaatacacaatattaaatatttaaaaattattatacactaaaaaagaataacttaatgcgatgattgggtaagattagtcggagttggaaggtatgatatcaccagggtagaaaacatcattataatcatctggttgaatctaaataaatttaaaacaaataatttattcgttaccgatccatttgtatgacattgcattgttttatattttatccttttaggctctaagttctttagtttggctaggctaatattattatccttcttaaagcttctaccaatagtccagcagtattttgcttcaaattctttccctattaaattcaatgatacatatcctcccaattccccctaaatcaaacatcagctaccatactacaattacgctttttaataacaattttgtatagttaatttgactgaataaattaagtacattttgtagaagatcaaataggttttgcgattgtcttgttatattatctcccagacattcaaaatccacgttgaatttaacattttcactaacatccttaaagattctcttatgcaatactgtatatattctaataataattattttttcttattcttattataaaataaatatttacattagattttacccttttttatttacaaattgtggtatgttgtaaatatcggcatttttacaaattttagaggatttcgaatcatatgaaaacacatcaattgaacctcttttacacatctatgtttaagaaatttacacatttggtaagtacctcaagaacctttgaaacatcgcctctgtctgtacacattgtaaggctactgaagttctgaaaattacctgtagagtgaacacaaatggcatcaacatctataaaaaaatatcaggaatgggtttttataattttatgtatgttttcacctttcatgactagtatgttagggtcgttgaaaacaacatcacctttagcctctaccaaacattttattacaccaatccacatataaaagttaaaacataatttaaaaatcattaaaaaataatgtatgttaaaatttgaaatgtaaattaatttataataaatttttgtctgaatccttttgcctgtatgaaatcctccctcttttctttaaaatcgaaaattaatactataattccaaaaattatcaacgacaccgatgttgttatcagtatcgtaaacagcttctttcccggtatgatactcaacttcagtacccacctagacattatccatgtttccctttacaaaattggtatataactgtgtaaaaatgtgtagtgatatgatttagacgaatactgtgagggtgattcgagtggtactggcaccgtaataactgtgcagctcggtatgattgaaatccacatgtgaaagcaattcttatctgaggacgaggctcccaaataaaactcttcaacataattattcgtcttacccagcctacgtattaataagcaatattcaatttttagataaatacaatttatttagcatgatgtagataatataacggaaattacccgatgaatgtgaaaggggtatatagaggactataagctgtttgtggtctcagagttgcagttttggcgaattttatcccatgaatatcaatcactgttaatttgtacgttaatcctacgccagtatatactaacctaagtgtatacactactaatcgtagtaataaaataattaataaaatgagaataatagggaatgataccgttattgttagaaccggatatgaaatagttatcagggtatttagactcatcaattaccatatatttggtcattagcttcataaacaaatcaatagtttctctatagagtgaatagtacagacaactcaatttctccccagactttaaaaacacgatcatattcaacattcgctacaaatttttattaattggtattaactaagtatatggtgttttaggtggagtagttgtgcataaataattatgtatagtaagtaaacaaatactcgatcgacaatatcggctgtagtgacatgtgtgagtgtggcatcagggttgtcaattatgacaggtatgaactcatcataagatgcttctcctttgtcttttgaagagttttttgctatcaatgataaatatttaacagattcactaactttcccacttttttcatctttggatgaatatttggatctggaatcaacaaccttcatgggtataattaagtctagaaagccgttattattaaaatctccggcggtgacccgttgaagttgtgttggcagtttagtataaattaacttatccctttccaaatcttccctttctctatcttccaaatcctttctactctctggaccatctgaagctgtccttggaacttttaagtagttgaatttggatctggtcaggtttaactgggaagtgttgaggggataaatgtatgtatattcattgggcaattcaatgacatgacctgtaaagggagtgaaatccatcctcgagtgtacgcatagattagctgggtgtctacacagttgatcactggtttggaacatttgtgggcaaaatgggatttgtttattatatgaaattgctattttacaagtcgatttgcaataaccttccgaatcaactgaatcacaaaatgggaccagtacatcatttgttccatcattatcaaagtcgccaaaggttatcattccatgattttttggtaataagaaattattcgaatgtttatatactacagtgcccgtctctgcatcagataaccatatgtcaatatacacatctattacacttattagtatacgattactttactattaatgttattatgttaattataaaatactaactatatattaggatataaatgtgtaaggttgagtaaaacaaacttctaagatggggatcttcgaacataagcacgaggtctggtctacaatcgccgttcatatcaataaaggcgcaagagtgcgggttaggtatgaatccgttaacttcagaactaacggtaaaggtttggactttattgtgaggaaagggtaggaaaaattggcctaaattcatccagaagaatagcttcaaatctggtgtttgggccaaaatatcaaagtaaccatcgccatcaaagtcagccacgagtgggtgaattgtgctgtattggtattgtttaggttgcaagactttagatttaatactatcaatgtcaaatattttattgtcgggattggaaaacgggccgtccaaagtttgcctagagtcccatgtactcttcgtaccaaattcacctccgatgtgttggtagtataccagaaaatagtacaaagtgttggtgtctcctgaacttggttttttcttcataacaagtaaaagatccaaaaagtcgttggaatcaaagtccgccgctgtaattccatcacactcgccatcaacttgaaacttgtaatacgggtcactttcccctgatttagttatatcggaataaatgtaaattgtcgttttatcggaaactgtattatatgaatatgtagcaaaacttaaacttccggtgttgtcgaaatccccgaaatctcccaccaaccccttccctgtgaactttgaggattcaagcctgaagtcataggagtgagtttgggctggaaaaattaatatgaaaaggaaaaaagctgaggaaatagagttaacaagaggaatcctacaaattctctctaatttccgggataaattcatatttaatactaaattaaaggtatctgcattttaaaatggagttttaaatcaaaaaagcattcgaaatttgattttataaatatttaacattttaatacacatttctgcgatataaattttatttccatttattctattgaatcacattttataacttctggcacaccattctcacaataattatttttacccatttttattatttattttattaaattatacttggctaataaaactacttcagagttctaattattatatataatataattgttaatttgatgtaggaaatttaaattaggttgaaatgtttaattaacctttttagaattatttttcttagaaatagtttctttatatcttttaaatatattttctcgaccctttaactttatctgtaaaattatttttccctgtgtaaaaaattctatgagttaattatatatgagcgggtccattgacggatagatgtgtagaagaaggaataattaaagtaggaacttcacgtatgaatcttttaattctaccgataaggccctaaaatagaatgattattttggaaaataccgtagttcgatatgaagcgtcctcaagtaaattgacattaattcttgagtatctcctgttcgtattaaattctatataacatactctggtttttttccgagtgccaaaagcttcaaattctcgtaagtagtaattccaaggatatattcgccggtggatacatttaagtaaagaggcaggccaccctctccacagaaattcatagcactagaaaataactaatcgacatttaacaagttatattgaacttacttcgtagtttttatgatcgtcaacttgaatcacttcaatgtgtaatcctgtatcctttgatactttatcaattatgggcaacatcaactatatataataacaatattgtatatatcactgaattaaataattatggctgatctaatgtaaatacttttgagaattcggagttactgtgaaaagccaacagttcaggaattttaggccttttcttaaagaatccaaagatacttaaatacggtccattttgtacctgacaaataaattaagttatttacgaattagtatatatgtgtatgtagcaaaaaagatcaattaaaaacctaacatgatatttattaattaaaacagcttgagattcctttacaaataagaatataatgtatattgcgattgtaaatgcgatataaggtgtgttaagtagtgtttgcataaaatgaaaagtaagaatcttgacctgttgtgaggccatacattattgttatttaattagtttatgtattaatgtgtataatatttttaattttgttattttttacaaactttggttcgactatttattttaaaaggagcccttttaactacctttcattcttactggacaattcatcaggttcaggccgcgactcatttagcaatggcccacaacttgataaatctagtcaaaaaagtattaaaaagaagactgaaactgaaaacgttttaaacccagtaacatatgataagattcctgttttttgtggtaaagacgattctgatttattaaaaactccctataaacatgggaattatacatatttcatggattatgaagatgctttggaagttgtaaataactattttacccataataggcaaggtatttttgacacaatcaatcatatttctattcagaaactaagaatcattttggcgttgtagagtgtattagccttaaaaaatggtttgaaatggtcgatccttcaaaaaaacgtattaaaaattatagaattcctaagcttttaccctcaaaacatcaagtataatttacacatccttccctggttattagttatataaacttactcctccttcattcaatttcataatataagttaatatcatttttagaatgataaattggtatataaattgaagaatggaggttatcaagttccgattccagtgtattattcagtggagtttgtggtatcgaagaggaatttttggagctttttaactggtacaaaatctacgagaagtatggtatacttttttaattaccaggatttaatggatgaaattttaaggatagaagataaggctgaaaggaacaaagcccttgccaacattaacgttgcctctctccttacccttttaaccgtaagtttactgtgataaataatttaatggttagagaaaagatgttggggaaattttatttgttccaagcagtcaaaatcgtaatgcaatggccgactttacccgtgatcctacaccgtggtttttataatccacacttttttattaccactcattattaatattttttaaataaattaataattttataaattttacgtattatataattttttccttttaattgtttaatattatttgtgattttaatagtgtgttaatattggcaatgtgcttatgatagtaataaaatgccaagaggaaggaaggtatttgttagttttagcttattgatttttagaaaattaaaactaatgacgagcagcatattacacaccaaaataaatataatttcaatcataaagcttttggtaatattctagctatcatttatgctaatacacacattttttactccaatttattacttattattccatatcatgtaaaagattttatatttatccataaatattgctttagaagtcataagtaaccagaatattgaggaagattgtatgatattggagaaatttggcgttccaattcctcctaaagtattaaatttgaatctaggtcctgggctgaaccagtttagtcttgtaatgaatgtatttttagttgatattttactgtaaatttaggtattttctaaatattctgagtttcttctaaaatctattgaggattctaaagatgagcgtttcttaaaaaggaaagtaatgttcacaaaactcggtatattttaatttacctggatactcacactcccacttaattaatgatcctatacaataatattttcatataattattgtagtcaaggctgtaaatttgaagtttatttgctcatttcggtggaaatatttcgatattttacttctaaaacgggtaatactcatattttactacttatataaggattttattgtattaactagtaaatattgtgtaactacattctgttttagattgataggagttcttttgggattaacagtaatgttaagaatgttagttctggtctttaaactattgtttaggttaaggaatatttaaagatttataaatcattgtggcaagaacactgtaaatctatgcaaaggtttagtttactcaattgttaataatttagattatttacgcataaattaactgccataataatctaaaggttactgggcgaatggaatgaggccacttgtataactaaagtgtatggacttgaacagataaatgaggccaatatttcatctgtcgtgtccaaattaaacgaactagtggaagagtgtacttctcagccagacccctatgagaacagagtagaagataacgcggaacttaaccaaaagagcgccagtggtttgttgagagaagtgatagtgaacgatgagtataaggagagtttagaagtattgaagagtaaaatagaaagtgcacgattcacgaggattaatcagttgcagttaatggtaacttgatactgtttacaaatgtaatttaggttaatagaatcattggaaaatacgaagacttactgaataaagttgaaacatacaatgattcactggtatgtaattacttattcctacaattcacttggttaattacaacttatttataagtataaggcgtaaacaatgtaaaattctttataggtgaaattatctgcctgtatatccgaaaagatgttcagtcgaatgagtataaaagaatacgttaaacttatacaagtattattttacaaatttttacatattttcaaaagttaaatgtatataactagtgcaattgcttataggagatgcctcatatgggttagaatatataattttgaaatggtgaagaagttcactccggatgacataatatcgcagaatttaattaaaacttccgttcagaggaatatcaaactgaacgttaatttgttttatacactattcagctctatttatatatttttctcagtttaacccgtagaaaacactttttcttcttagaaaatttatgattctatgaattattaatttttactttagattgtgaaggaatatcctcttttaaaggacaccattgatgtgattttccctaaaaaaatgcagatttatttggcaaaatggtaaaaacattattcacttaattttttattattttgtttaaattttattttagccaggaacatgtaaacttattgctggttggaggtgaaataatgtttatccagcacagggatggtccttggataccatctcttcgtttggtacacaaatgtaattttcatatttatttttcaagttttgagttattctacttatacattatcgagtttagcagttttaattgagtttaacagtttaacgaggtcttaattgttgtttagaccctgatattcttcctaagatgcaggtggatagtggcgccattaagtttgttttgagaggatccaacataatgtgccctggactaacatctgagggtggtaaaatggatgacgttgaggctgatacagttgttgtactaattctactcacttatgcagtttatttacccctttctaccctccataattatataaatattaatttccttcagcaagtgactgcttctgggagatataacgcctgtgcagttggactaactacgatgtcaaccaaggaaatgtaatttttaacctttaaatcctcttagtttagaaaagaataaggacgtttgtattcagactgtccactatttgaacgatggatactggcaattcaacgctgataagtatggctactctccctaatgtaaatatattttcattcactataaacttaatatactatactaactatgtatatgtatataatcaatagtatatactgttcacgttgtatattactatgagtacaaactaagtatagtgtgtatactatatatattgtatgattgaaattagtgtttaaagaggttatgagaggacttttaggaaaatatcctttatgactccaatgtactcgaagctcataattgaatgaaagtttgagtcgacttgcaaatattggcagtgttccccttccagacgttcatacagttcattagagccctacattcattgttaataacaatcataaatatataattgaattgacatgtgataaagatacattgatatggcatgaaggatcgtggcttgagtgtagtatgagtgtcttgatttgcttaggataaaacctaacgttttcaaacacttctctacacgccttaataacttggtggcctttcaaatgagtcagcttcctgatataaaaatacgggtcctaaaatcaaattaatctcagttaattcaaatttataatactgatttaatttataactatataaattgaatatatatatctaataccggttaaataaatgtataactataggggttggctaaatgtaaatccaatagaaattaaataaatgtataagtatatgaattatgtaaatacatatgtgcatgtaatagggaaaaatacatggaagcgtttgtagagtctgaaggtggtggtgtaatcacggtatttgagtggaacagtgtcgtgagaagggataaacatggaagtgactctgaagaaaatcggaaatatcttcttaatagttttagttaagaggtccaagatgttatacattccagacacacttataaaaacatccaccaagttgttttcattcatacgggtgttttgccccaaaacttgttttttgggtgtacaagattggtcagtgtcatcgtcagcatcagttttgggtaaggaattataatgttcaattgcctgtaaacagatattagcgcccatagaatgcccaattagcacaaattgatccttttgtttactttcttttgataggggtgtattgatatggttccttaaagtatatcctgactcgttacttattgggctattgttcatactactgaagtactctgtgttactttcctggtcctcagtggagaattgggtgaattcatgaccaaaacgtaggtttggtgaacttgttggatattgagttagtgtgtaagagtcggagttgtcaaaaaacttacccgacctgacaatttcaacgaattgaagaagatcactgacgtaatcctggaagtctgtgacgtaacacctgatgctagtgaaactttcagataatccatgagcttgtaaatccattgcgtagacgttatatcccagtttattcagtaattccaccaaacttccagtgtaactacaagatttgaacacatcgagaatgttgtccatgtactgattagaggagttgaaaagctcataatatttcctactatgagagactgacgtattgagtttataggctgggtaaccaaaagacctatattcagacatattattcgtgtaccctatcctcgtattataggggtccctataatggttctttgtattttgtatattaaaatggcttagatgaggtcttcttctagtaatcgcagtgttaaaaccatacttatacctttttaagtttattagcttatgaaatctcagtctgtggagtggatttttacgaatcagcattatgttcatactttgtctttttttatacccatacagtacacccctgtgactcattatagagcctaacagtgttcttttatgaataaaacgcgagggtgaaggagcaattgagggagtaaagtaaggatttaaattgagataattgattttttgcaagagctttgtaaaatttgtggccatgaattggtccatgaagctggaggcaaccccatggaccaaaataacatttttcctgctagagaattcgtgaaatctgtttacttttttggggcatgtataattttctgaaggagaaaagtatgttctgatgtgtaaattcttgttatttttaaatgtgttggagaaaattttaccttggaacacctcatcttggatgtgtaaattcttccttaaaaggttcctcatgtgcactactcttgagaatctattcctgtgcataaaatttggtcttctactaattccaaagctattggatctacttgtacttctagtgctggccatactattggaaaattcgaaattaggcttgtaataagaaaagctggaaaacgttgacacgtaatctgaataacttaccaatgaccaggttgagtccctcttcttaaagtataaaatggtatttacactttcaggactgttctcattttgttcatacattcctgaattcagttgtgcggtatctaaaactaagtcggaagaacgagagtgggataatccatagagcccattagtagtaggacatgctgagggtggtgacaaggatccggataatttagaaggtaagttgagggtagataaaacaatgtagaagataacaagttcatcgttgtacaagtgtaaattcacatgtagaacgttttcaattttggaacattttagtaaaaatcgttccaggtaaatttcctttaaaaagaaacctggctttggtttaatggaaaggttggtaaccttttcacaaaatgttttagtcacaaagaacatatcctcatcaatgtcgtctattttaagaggtatattcttataatagtaacaataaagatcacgatccaggttacacacttctccattcactccagttttgccaaattccatttcaaagtggctaaaaaattcctcttttgacagctcagtccaacaatacatcgatcttttaaaatataaattcttccttcttccaactgcactagtgtgagagtccgggggataatcgaatgggttatcagagtcacattcgataacaagatgtagataagagtatttagttctgggataagcaaaggctgtaatacacttctcgttaggagaactcgaacgccaaatttcaaataggcctgatttaacctttgttagtttatagccaagtttcggcaaaaacacatcaattaaaagtctgtgagagttattaatgaaaaatagatggtggttcagctttgaacccagattaagttcaacatcgcagaaaaactgatgtagctcaacaacttcgttaagcttctcaaagaaatctgttgatttaactcggcaccaattcgcttttggatgatttcgatcgtctttattttgttttttctgatttaactgtgtgttcgcaggagtagaatcgttaacgggggaatataagtcagaatttacaaaatacagtgattttgaatctcctttattataaatattgatgtagaggaagaggaatgagttattatgttgagaaatcgtaacttttctgcaaaatgttaagccgtcagtctcccataaaatggcttttgaatttgtaacctttccaaacctatatcctggtttaggtgcataatttaaattcaaaaaattgtagacgttttccttccagtggttgattttattcaagtccacgttaattgagtcaaccgctaaatttacaagttcgcaagccatttcgttctttgggagataattccagtttcttcagctaaacagacatttgaagtagaaaattttaatagcatagattcaaattaaactttgtttcatcattttagtattatagggttaatggaacatcgactaattagtgtttaacaccattagccaactatctctagtcttttaaaatgctcttgtttgagttatcttattttgggtttaaatttgccatttttaaaatcttatgacgttttacccattttatttatgtcttttttaaaacttgatttacacatcttatacgcatatttataatgtattatccttccacatacagttacttatagaatatataaaatagacttttatagtacaaagaatattaaaaggtgttaattaatgaagtgaaccagtaatatgtattttcgagtgagtttcctgtaacaattatatatagagacaaatttaaaatacctgtgtttgtatttatatcaatccatgtaatctgtgaagacgttaattggttgagtacaatttgtgacctttcaatggtccaacccaagtggtttgacaaatccaagcaggtgattcctcttttgagttctgtggccactttaatgcattcacaatggacgtttgaaaggtcaggattagtaacaaagaagtatttgtcgtttacttcaagcactttgattgaatcaccaaaaactttaaactcttttgaggcctttagtaaatcgttctgagtgagtttgtagctttttggaaacatttcaaggacgtgactaagctcgcaaataccgccgttttcgttccttgtgtttatgcaaatttcaagtattaaagtacaaatttccggtaagaaccagcttactgatccaaaaactctagaaaagttaggccttattctcggacttaattccaggacgtcaatagataaaatatcacaaatttccagaaattttagcctaaaatgatggtctgaatttattttatcatgatggcgccttacaaaattctcaaaatttgttctgaagtcatttaaaatactcaagtacctctcgcgattctctgatgatacttgactagacaacaaccttagcctttcatcgtttctatctttatcaataatatctgaaccccccagtcccatcttcataatttatatattttaaggttatttcatactccaaatctccatataatatatagggtctgaaagtggaccctactgtttagaaaatctatacttaagtagttgttttgttctatgtaaatctgtattgagttttgcgtgttgtttatccaccagtgaatcaatgctaaagttatttaactgtgatcgaaatgcgcagggaacaggtaaatttgataatgcccttttaaaggctgtaaagatgggcaaattccctggaacaaaaggactaagctgtggtagtcttattattggaaatcctatacaattcattatacaatactatgtatatataataaaaaactaaataggtgatgttaatgtgtatggatacctgcaggaactcttgctacgtggtggtgtattttacctttaccttgtcccattttgacgccatctggctttttggttacgggataagttgcatgaacatctacaaacctttcagttttcttttttaaaactctcttaagggacatacgaaccttttccaaaacatccgccttaatccttctaggtgttagagtgattaaagactttccaagagttatttgtggctttgttaaaggaataattctaccctttgggaccttgtaattaacaggtaagggaggtttataaaaaatgggcggcatgattatggtcacacataatgtgtgaatctcatttaaaaaattaaggttaaaaaatgtgtaaatttattttaaaaattatggtacaagtaatttattaaattagtgtaaaaaacaataaaataacggaaatattgttaaataaaatacaatgtgggtattaaaatacaatttcttagaaccggataatattaggctatggtctataaataggttaattaaatcctgaattggtgctaaacaaattggtcaacagtatatagtcaacggcgacgggaatcgaacccgcaatcttcggttccgtagaccgacgccttatccattgggccacgccgtccctcaacatgggtcaaaattttaaattatatttatttatgagtaagagggggagataatagctgaaaataggaaatgtaaatgttaaatacataaagaaggaatgtaattggagttctataaataaaaatttttgtggaaggtgatctaataattaattgaatttaatgaaaaaggtactggtcaccaaaacgaagtcaattggtatataattgtaaatttaaaaatgtaaaatatatcaaatctaatattgggtattggaaaaaggcgatgtggcctaatggataaggcgtcggtcttcggaaccgaagattgcgggttcgagtcccgtcgtcgctgtatgcaacaaatttgaatatttaatttcatttagttcttgattaaattattcaacacgaggaatgggatggaaggttaatatctagttatagtaatagtatttttgacatttggtttaataccacacacattggagcaaaattaacccttttattaatccaaaattaaattaaaagaataaaacaatcccttgattttattttgggttgtcgagggtgttaaaaattggggttctaaaaagtagttaagactcgaaagaaacctaataaagaaaaaagcaatttcaaactacgtacattattcaatagaatcctgttgatttttaaatttaataggaaaaaatttaagtcatggggttttacaagtgtgtgcttatttctatttaaacaaactttctttacaggattctcattttacttaactctaattttctctatattctttgtaaaccatgttgtttttagtctatttggcacctttccataaaatattacctacacaattttacaatccataaaatcattatttataccgtattccagtataccagcttactgaaattacttttcatttttttagtattttttgctcacctcgttaatttgtaatatacttattttgataaggtctcgttctttcggaaatttttataattaatattctttcaagggttaatttaattttttcatttgtctatcaatcaccggcttctattccttttatattttaatgattcttttgaaaattcgttatcaggtctacttttaaggttatatttatttaaccaatttaataacgttttaattaaaatatgcccttaatttgaaagtaatgtgttgaaatttgaaaatggaatcaggaaaacagtcagaaaataaggaacatagtccaagggaaagaccgagaaggttctctctgagtaattataacaattttacagtgcgcacaattttgactatattcttgataatcgggttcctattcatatttagttgcggccacttctatattgcatcagtggttgttctagcaattattaaaatgtattatgaaatattggcccttcacgataaggcactttcctttgctgtgacgtcggatgatgaatttgttactgggactccctccactgtaaatagattctcaagctctcacagctccatattttcgaaatctcattcagtaagtcaaccgggcaaacatcgttctagccttaaatcttttagaagtagagaaaggaagactgtatatttcttttcaaaggcacctgatctcttgagctggatatcacttgaaacttacttcctttgcattgcactagtacttgtaagtgtcccttggttagttcccagactacagcattataataactggttctcaagatctcttttatacgttgctagttaccattatttaatttcctttatgctaacgatggctggaatgataaagtttgtgatttctatggaaagaggaagatataagcagcactttctaaagctcgcaatgattgttgtttccgtcctctacgtcgtttgtgaaggtttaatggttattactaacatttattacggtatggtgtggttcttatgccctcatgttatggttgccgtgaacgacgttttggcatatctgtttggaaggttcgttggaaaacgccctttgattgtaatttcaccaaagaaaacagttgaaggattcctttattctgcacttgcaaccacctttttaaccgttttaatcacaccctttctgctcaattacaagcccctactctgtcctactaaccacttcaatttgagaccttttgtttggcttcatagtacaaactgtaaattaccaggtgtataccagattaagaagtgggaactacctgagttggctgcgaagttactcaagaggactcatctcccatacagtgagtttgtgcttcatatgcttgttttgagcctttttgcaagtctttttgctcccttcggtggatttctggccagtggttttaagcgcgcgctcaaggttaaggacttcagtaacgttatacctggtcatggcggtatcactgacaggttcgactgtcatattttaatgggagggttcacttacttttaccttaaaacatttgtaagaaaacaacaactggttgaggtcgtatataaaatgtttttaaaactacccaaaaacgaacaactcgaacttttatccaaatttagacaaataccttgaattttttgctaaactctcctatatactatataatgcagtaatatatagtaggtgttgtgcgttttatatgttgtaaagaaggaagagtgaagtatgaaattacacatttcagacccaacacctatagaatcttaacttttgatgctaatttatattatgttattcttgattaagtaacttatgtttttgttttatatacatgtgtattacttagtattctcttcaagggctctttcaataacgtatcgcagattttcaacttcttttattaattctcctagaaatttcacttataattttaacaattctcatataaatacgttttcccagccatttaataacagaattgaacaggatttaattaaatcatcccaattctctaatggaaggattcctctatattacgcggttaaattagtccttcccgaaggttaattcccccttaaatactgcttaataatgctttattttagatttacttatacgttattagcagtagctttatagattagattatataagtggtaacttgagtgtaggtgagaaggtaattgaaagcggtgaggatgagtatatattggaatcagctgaaaatcagggagttgagcttccctatagttgtcgaggtggtagctgctctacttgtgcaggtaatacatcttagcactctcagaaatatccatgatctttatctttatactattattacaccatggtacaagagttaactaaattttttatagccacattggtgtctggagaaatagataacagtgaacagagttatttggatgatgagcaggtgaagaagggctactgtttgctctgtacgagctacgcaaagtcagactgtaccatagaaacacacaaagaagagaaactacataaagaagaagagactaatttaaagcaataatataatataaaaaatgtacgtattctttaaattaacgtataagtaaatcgtgaaaaaattatttaagaggaatgaacctggatgagtgagtggctccaattccaggcttaccatgtctaactggtttataagtaattgaaaattcgcccaaatagtatccaaccatttctggtttaatttcaacgtttatgtattgttttccgttgtgaaccccaacgatagatccaatcatttctggaatcacgaccatgtttctcaaatgggtcttcacaggttctggtttttgtccgtatggaagatctttctttgcagctctgagcttctttaatagtgttaatgattgtcttttgacccctaaacaaaatatatgttatatgcatttttattattaataaaaaattcaatatctaatttttatatatgaaattgaatacctctgctgaatcttctgcgttgtctagcaggaagtaattcagtcaacttatcaatgggcatttccaaaagcttttccaattcatacccacggtatttaaaggtcctgaaggtcctttttttaagaatctgaactccttgttcctcaacctaaaataaaaaaatgttagtcaatgaaagaaaggaataattaagttaataattaaaaaacgagagatatgaattttaggggtgtgaataaatatgtagacgcttgaaatcggtcttaccattttgaattaaagcagaataaaattcggtaatgttattctgttaagataaatgagtagatatgagaaaactaatgaaagtgaacaacgaacgtggatctgtcatccctatttgccccatccattttatcggttaggaatcacccagatgtcggaatattttatatacatcttgttttatttacttttaaattttatttattttccttttcggttttatattttatctaagctgttttatcttattatttaagctcataacttttcacatttgtaaattagcacatatccaagtttcagttcacacctcatttaaataaccttctattgtttaaattgagatctgttctataattattctgtaaattatattcaatttttttggatgatcttttttacttgtttccagtattttcttgattattattattaaaaaatttatgaaaacatgaagatctttccctttttatttatatttccatttttattaaaattatgtgaatgttctgatcttaatcctttagatccattagctcaacaaagtggtggtggttccaataataatgaaggcaataataatgattccactggttcttccgatgtaacacaagttgatactgaatctaatgatacttcatcgtcttctgaaacttcacaacaaggaaaacctcaacctgatcaaccacaagatcaaccagatcaacatcagcaaccaactcagggtgatacaagtggacaacaaggaccagatacacctcaaccaattcaggaaccatctggaccagttcaacctgatcaaactggacaaggacctgttgaacccgtagatcaacagcaacaaccaactcagggtgatacaagtggacaacaaggacaacaaccacaagatcaaccagttcaggaacaagatggtcaagattcacaaggaacacctgaacaaacaccagatcaaagtggacaacaaccaggaccagatacaccagatcaacctgtatatcagcaacaaccagttcagcaaccatctggacaacagcaacaacctcagcctcggcctcaaccacaaccagatcaacctgtagatcagcaacaggaaccaccgactcctgaggatcagccatctggaccagattcaccagatcaaccagatcaacatcaccaaccaactccagcagcacaaccacaaactcaacctcaacctgaacctcaacctgaacctcaacctgaacctcaacctgaacctcaacctgaaccagttcaggaaccacctgaacaaacaccagaacatacaccatctaaggatgatgcaagtggggaagtacctgttaaaccttctgaaggtcatatgactggtgcagctgctgatggttctggacaacctcctgataaaaaaactgatgatgattctaaaggaaaagatggttcaaaatctggttctggcacccccagtaaaggtaatttttatttaaattaatcatgatatttatattattgctaatttattattagataaaaaagattccaaacatacgccattccacggttgtgggcaattcttcacaaatacacataaagtcaccgttattttccattggtggttgtgtgaaaaggtaataattcgcaatatctatttattatttatttattataaagagtttcatgtatttttagccatggcaatacgctctaacattgttgactttgtttggttttgcacttttgagtccatgtttaaaggcctatagagaggttctcagagcaaaggcggtaagaagtttcattttcgactgtcttttgacacatctcttcctctttttgattgcactttgtgcctacgcattggactttttgctcatgcttgttgtaatgaccttcaatgttggtgtattcttcgccgttatcttgggctattccgtaggatacgtactatcctcgttagcctattcaacgttacgtactcaacccaatagaagcaactctttttctcgcattaacgaagattgttgttaatcttttactttcatgtttcaaattatttgaatcatattttttatctgtgttacactaatcatgtttaatattatcgtgtatattgtaccttgtataatagtgtatataccatacaagatttatattttattttttgtattataggtttaaaatgttttaaatggttctttatgatttgttaatatggatttgtatagagttgacgaagattgtgtcaaaccttccggtagaaggtttgatttaaattttgatgagaaaaaaataaataaaaaaatgttgaggattcaaatagaacgtgacatttcagatcaaataggaccaaaaggtttgatatttcttgaaatacattctggacttaatataaataaaatttaactagtacataactaattttctaatttttctaatttaatatttgatattttagaggttcttgattcactgaagagactcgatgaatttgctgaagagcaaaccgtggtaataaagggcagagaatacacaattgtcttcttaaaggacaaaaatgatgtttttttgctcggaaataagccaaatgaaagtcttaacataagtgataggtttttcggaacgattcacgtttcacaaaaattatcgtcgacaattgttaatttttaggtattactaagttattcgaactaaattacatatattttttaattaattattaaacatataataattaatttttgtttcagtgaatgaatcggagaaatgagcttaattcgtcggattctataggattctaataattaatggttgttacctaatttggacttctttgaattaattgtaaaatttaaagaattaaattataaatatttcgttgctggaaatggattttttgtaatatagtttcagcctgaagaagtcaatgtcccagtattctgatgatttatccagtttaaagatacacatcttagcctaatctaatcttctttaaattagactattttttatatatttttacatttttgtttccatttaaaatgctcgaattctgaaataacgttaactcgttatgcactccagtgcgttagacaaaaataggacaattccaggaattttcctatttagaaggttgattttaacaaaataaatgtattcatagctctaataaattatttaccaatatcgtaagtgattcaatactgatttagatgattataatttttaggcaaatgaaactgtaaccatgaatcaggacaaggtggctctcttgtccaaccaagaagatgaaagactaagaaatagagataagagcagattcggagttacatttatactatgttctatgcccctcatagatgccttgtttttgatattctgttttacaaggaaaagattcgggaattttttcactttcgtaaacacagttttcctggtttatgtcggcatactaatcgcaaccacgattttaggttattatgggatttacaagaaaaactacctcgctctcaggtcctcaattagtatgttcacagctcagaatctgattatcttggcaatttgtggaatatttttaatactgtttgtgactcgaccgggacttttgagtgatcatcatgccaaccctgttctgatatacttcgaaaagcatcgcatcttgggggtactttttatcgtgttcatcatcctcttgagaattgcaaacttgctcctgacttggtattctggcgaacttgagtcttcatttgaggttctaaaccgtttaaaatacgttaaagatggtctggattcatattcgaataatgatcaattccctatagatatcaaggacgaatttgggcatatttaactttacctatgattaaagtgtaagttagataatattatattaatttaatatgtttaaaataacttagtctttacattaaatttgtgtacatgacgtttaatgaatttaaaaagatgagttatcagtttaaaaattcactggttagtttcgttgtgttctgtaaaacggttctaaacggtttattacatgtgtttttacccttgaaaactttatttgaaggtgaatgtatgaaatccttaatgtttaaacctattttagaacttaaatctgtgaaaaatactccgacaattttggcagtgtcattgttgaagtgacgtagcaacagatacaattcgtgcaaaaataactctttagcattattttgttccaaattagtactattcacgttgtctttgttggttaaattctcggtggaatcatcttttgaatctttattatcaacactacttgtattaatggtggtgttaggaccaacaggtttgggtggtgcaggtaaggtagtttcaggagaatgaatcatgtacagtaggttgtgtcgatgcttctgtaacatgttaagagaaatgattacaaggcaattgcacttattagtttccagaaccgttgatgtttttagtaacttcttaataaaaaatgatactaaagtgttgggtagcatggaactgtttaacgccttctcaatcaatagtataagaacagtgcttgaactggttgagagatatttgaaatcaattaactcatataatttattgtaaaaccaatcaaattcttcattggaagatttactaagagatgtgactgaatccaagttcaaactgttaccatcagtaatgttatgaggtgtaggtgaaatttgaataagctgatctgttagattatagtacagtataagttcaaacaagcaatttaaagaattaataacaatgtcctcattgttgttattcaaattattgtacaagaaatttgccacacggagcgggttgtttatataagggaaggcaaattttggtaagcattccaaaattataaccaaacttttgttatccactgagcgaataaagtcgtttagtatatgttcccataattttacatagttatttccatatagttcgtaatccacgccgtcatcagacgtatcttcagcttcagcatcatcatcagttaaatcagagtcagtatccaaggaatcgtggttattttgagtagaattatgaaaagcagaatcaaaggtcttaagagccaactctttctttggaattttgagaattttatcctgtttatcagtactgccagaaagcttatcaggagtattaagcttagaaaggaatatcaaaaacctctcgttaaacaaactagaatcaaaggaatggttaccattaaggtatttgtttaaaagttttgacctttcagaattttttagagtgtttaataagtggtatggtaaatatgttacatacttgctgtttagtaagaaatgctgagttattcccagattataagtgtttccaaggaataaaattagcaaaaataggtccaaaaactcaagaatcttaattcctttgacctctactgccaaatgatattcagaatctagtaaatcaaccaggatatccaagcatatatccaggtgtttttcatcccgaagggttttaatcaagtgtagcagtgagaaatttaagagtttctttattgttttcttggtgttagaaccggattcagaaaagccgctaaaatcagtatccagatttaaaacttttggatcatctggtaaaattctagtaaaggattccaagtcaaaattaattttatacttatttttcaagttaatgaggtttttaaatagtttatcaagagatgaatggagttcagaatcacagttattcaaacttcctaaataaccaaaggaattctcaagtaaaactaaagaatccatttgtttaggttaaaaataaaaataaaattctattttatcctaaattaatcattttttaataaaatatacactaaaaatgaaaaacacattgctagtcaatagtcaatagtcaaatagtgttaaagaatacaataaaattaaattatcaattacaaaattaaaatacaaagaaatattatacactatataggtgaattagtcgatttccacaatttctataatttcaataggatttgatgagtgacaattttgattagtattagctactgagggcttaggtttgttggttttcttggttttttcagtatgcttgttctttcttgaagtaccagaagctttaaagtcttctttaggtgggaatttgatatctatttgcatattattctcgatgcatagttggggatcgcctgtaaacgggttaggaactatctaatgttaccgatttgaatattatggtcctgagggtctccgtctataattattttaatctttacaaaattttcttgatccagaccgtacatctcacctaatttcttagctatgttacccaaagtttcagacgttttgacgtaaacagtgtctaaccttgggtcattaattacctttttgttttggtcaaccacagcgaacttcaagcaaaacgtatcactaaacaaaggattaatcaaatgaatgataaataatgaaaatacgttaagttatcttgagctcgttgaaaactttggttatcaaatgggtcgggttcttcaggcgtaggaaagttatcaaacccaaacttgtcaaacctgtttaatatagaggagtcaggtttcttagatttagtaggtgtgttagattttttaggggattttttagttgtagaagtgttttttcggggttttttgaggtttaggccagaggggtcagttgggtcatactcttcatcattacctaaggcagactctgaactcgaggagctaaataaatcattgaggttgggatcattgtttaaattagtcccggtgcatgctctggtcctttttgttctggaggtaaatcttaaattttttgaatttgaattattggccccttccacttccttggtcggttccttggatccatgtaccaggctagattttattgtatttattatgtttataccctttgaaattaaattttcttgtttatcttctttggcaggttcattttcaggcttatcaacttgctcagattgatcaaatatcttgtttaactcgtcaattatgatttgtgcatcgtcacttatgtcggatctgagacttttatctagtctataatgtctatcaaacctctcttcaactgtttcgggtttattactgatagaaaagagcccttgagaatttctggatctagtgttttcaggagttttagagctaaagtcctcctcatcagaagagactatctgtaagtgagaggtgtccctcacatcgtgcccaaaaatatcatcataatcatccataaattaaaagatagtaaataataattttcatcagtatttaatctaaaaatattaagtatcattgtagtgatgccttatacatctgacattagatgttattttaatagatatttaaatcagaaaataatttattcttaagataatttaaaatttttaatatggttcaaaacagtaattagttaagttattgtgtttaaactttaagttgttggtactagaaggatgatcatttgtaagaaggggataacgaaaataaccaccaaacattgatctgatatatgatataacattgtttaaatggcactttggggatataattttaatagggaggtaaagtggcaaaaaaacaggaaaggatttggcattttttacatatccgcaatgtttatatttccttccctgatttactacgtattaggtaatccagccgttagtaatttctatttgaaaaatgttatgccggttgaatatccaaaagaaagcgatccctcaataatttcaaatatatactacggaaataccgacaaagaagattcggttatccataaaacaggatagaaattatttattgtttacacatactaatactaaagtaaaattaaaaatataggctactagtgcctatatttttatattacccaagattccgatacattttttaaaatatttctaggactcatatctctccagatttcactcgatcacaaagttttaaattttattataatttattataattcttttgcttatttatttcttatttttggtaaatcttctacacatgttatgtccccatagagacctatgtcgattattatttttctaatagactttttgactattggatcaagttcaatttattacatctaataaataagcgattatacaaagctgtctgtaaaagtggtttggttttgaaatatactaagaatgtgtattccctggtttacacatacgagactctagacaaattaaacatattttaattttttattcctatttaaacctttatttttatcattaattacttttcaacatcatttgtcctgattgagactttaaacaacttaatttttttgtgatgtcgttttgacttgaagaatttcaaattaggcttttatatttaagtatttaattaaattattgagaaatggattttacaccgagaagccgacaggtcctttctggccgtgttgattcactcaggcctgattctcaagtttttaaccctaataacaccagagatgtgagtaataatgaaacccagtacactatgtatggcaagactcctaacttggttagaagaatacgcaatgcccgtaacgatattggtgatctgggaagggaaaccttcatggatcagcgtgatgtagctcgtttgccatttttactagataacagacttgaagaactttccgaaagattcactaactttttgaagaattttacagagtttgacaccaattctgaagataaagataaacaacaaagtaaaccgtccaacacgtacgttaaattatacgattctagataaaattttgcacaatatatattattaattatctaattttaataatttttagtgaactatattacttaatgaaattaatgaactttatcaaagagaatttgcgcgatcactcaacaggttacagccgttatctcccctttgaagtggatttgatgcatgtttactcttatgatatggtcctttataagttgttggtaacgttcccagctgactgtattgcagaacttgataaggtccttgtgaagctttttaatgagttgctttccaagcattattccgacctttcacttgaaaacaactcttttttccccagagccagacttatgaacaagccagtttctgattgtgtgggaaacctagaacccagtatggccgattctttggttcaattctcaggaacagtagttcgtcagacatggatagttcctgagattaccatggcatgttttaggtgtagaggtcagaagaaagtgggattgaacgatatgcaaccgtgtacctgtgaacactacgaatatgttattcaaggtgaagtaaatgaacccttactgtgtaatgaatgcaacagtaaatatacattcgaactgaaccataacatgtctgtgtactccaccaaaaaaatagtaaagctacttcaatcaaacagttctccgaacaaccctgacaaagatggcttagacgattctgttgataatgctgatctaaatggagaaatatatatgaaggacaatgaagtagtgaatttgaacctatacgatgatcttattgattctgttgttactggggatagagttacagtggttggtattcttaaagtaacaccaataaggacaagtacaacgagaaggactttaaaaagtttgtacacctactttgtaaatgtcatccacgtcaaagtaatcaattcgacaaatgccaatcaaccaatgaagggattaaaggtattcccaagtttacatacttttataccattatggttgtatatagttctttattattaccactataattttttagtatttgggtaatgaaaacgatttttcggatttacaagtatacaagatattggaactcagtcgtaaccctatgatatacagaatattgttagactcatttgcaccttcaattaaagccagaaataacgttaagattggattattatgtcagttattttcatgtaatcccaattcatctgataacaataagactgtcgattcatcatacaaagtggataatttcagggggataataaacgtattgttgtgtggagatccggggactgctaagtcacaactactacattatacacacttgttatcaccccgttcaatttacacttcaggtaattttggataatttacaaaaatattttagggaaaagtagttccagcgtaggtcttacggccagcatcaagtttaatgaaagtgataatggtcgggcaatgatacaacccggagctgtggttttggcaaacggaggtgtttgttgcattgacgaattggacaagtgtcacaatgaatcaagactgagtttgtatgaagttatggaacaacaaactgttacaattgctaaagcgggtattgttgccactttgaaggctgagactgccatactggccagttgtaacccaattaacagtagatataacaagaacaaggccgttattgaaaatattaacatttcaccgagtttattcacgaggtttgacttgatttatttggtattagaccacattgatcaggacacagatcagttgattagtttaagcattgcgaaagatttcttattgccacatatgactggtgttaacagtgcttctgatacttatgaccgtagtaataccatgcatgtcgaacccgaaatcttgagatcagaaaaggattataatttaaatgatttggatatgctgagaatgtatataaaattctcaaaattacactgtttcccgaaattgagtgatgaagctaggaaggttataacaagggaatatgtcaagatgcgtcagggtaactttcaaacttcgaatctagatgaacttgaccaggcccaagaagacgaagacgatgatctttattaccaatcttccggaacaagtaattatttatattataataatttttaggaatgatttatgtcagtagccgtatgatcagttccataattagaattggagtttcattggcaaggatgagacttagtacttttgtaaccagggcggatgctttgcaagcagtacaaattgtcaaaagttctacattccagtcactggtagatccaaccacaggaaaaatagattttgaccaattacaccaaggaattaccacaaataaaatgcaacaactcaaccagatgtacgaacaggttctatcagttttgacacgttctagtaatcaggattcgaacaaatcattagatttgaatgaagttttaagtctaatgagtaaggagttcaaggatgctcatgaccataaggacggagaaatttataagttgatatccgaagttttgaacaaaatggtacaagaagggacagcagttagggaaaacaactcttataagttaaaaaaaatcttttcgtaaaatctttaatttcatcaactaacacacatacatagtatacaactagctcagtttatgaatatattagctgaaaatcaaattaaacaattaaaattaaaaaatgtgataaataaatgtaacctggtaatatataattgtgaaagctaaaaaaaaggttaaaataaaattgaaaaaaatcagaattaatcagaattaaaaactaatatatgaaaaattagaaattgattctaaaaataaaattttaatattatatataaaaaaatatataataaataataaatattttatgaaatataaattattgattaatatatataataaaaaaagttttttaaaatataagtatataaaattaaattaaaaaatataaataaaaattattatatattattatatattatataagtattaataattttgaattattatatattaaaataatacaaaaatattttataatcaaatttaaaaataaatattaaaatagaaaaattaataaatagataaaatagaattattattaaaaaattagtaaataaataatataagaataaattaaaaatataattataaatcaataactaaataattaaaataaataataaaaagtagtatatgaatataaagaatacgtatatcaatgtattaatatatatataatattaatatatatttaaaaaattataataaaattttattcagatgatattgaataagaagatattaattaaaatttgaaataaaaaatatatataataaataataaaagtaattattattaaaaaatatattaataaatataatattaagaaaaataagtatatatatatatatataataaaattaatatagataaaaaaaattaataaaatatatattataataattttatatttaattatttagaatatatgataattataaatttaaaaaatgttatgttatatacaaacatataaaaaatatttttttaaatatatatgtaattatcattaatttttttgttaaaaaaattagaaaatatgtatattaaaataaaaaaatttatatatgttataataagataaaattatataaaattcattttgaaatatataataataaaaaaataatataaatattataaaaaataaaaataatattattataaaataaatgacaaacatattaaacatatttaaataataaatataatttaataataataattaacacatatttttataattataaaaatataaatatatataaatgcttaaaataataattaatatttgataaaacaaaaaaataatattataaaataaatattaataatattttttaaattaaatatatatattagaaatgtaataatgtgtataagaaatctaaaaaaatttatgtatataaaataaaataaatatttatataaaataaaaatataaaattataaaataaatttgaatgaaaaaatgtataataaaatattataaataaatataaataatataaatatttatataataatataaataaaattataatttataatttattaatatatatattaattttttaataaaattattatatatataatttgtaaaaatattaaatgtaaaaattaaaaataaatacatattaattatcaataaatacaattatcaaaattataattaataactaaaagttcaataaaattaataattaatatatacagtaaattcataaatattaattaaaaaaaataatattatatataatatatattaattatttttaaaaaatataataaataaatattttattctatttattttaattattttatatataaataaacttttttaaaaaattttgaaatttacgttttttatatattattaatttaaattaatttatattaaatagtaaatatataataaatttatattattttaaatattatatttgtcatttattattattatatatttaaacatataacatatttattcaattaaataatttattatatattaataatttactcatatatataattattaaattattatttatattataatattttataaaacatatttaataaattaataatatatattatatattattatctgtttaatattctttatatatatatatatatcaatataatattcaacatgtaatttataacataaatattaatataatttcatattatgtattttgtattttttttaattttatatatatatattataataatttttaaatactttattatattttatatatataaatttaattatattattatttttcataatttattaataatatatatatataatcatttttaaaataattttttatatatatttattaacatataatttattttcaattattgtatttatgtatatataattaattaatatattttatttattttatttatatattaattaattaattattagaaattagtattattaaattatatgtattatccaaatttatttaatatattttttattcattttataataaaattattttttatacacataattaattatattataataaatattaaaataaatttatatatatattgtttttggaagcatatagtattattattctaatatacataattttttattttttagagaatatattaataataatatatatattgaaataatttttttattatatatattaattcatcttttaattatcattttattattattatatttacgaaatatttaaaaataaattttttattattatatatattatttatgtaaatataaaattattataatatatatttgaatatttgttttttaattttaatttaatttatttaatattcatttattaatttaatttttttgtttataatttcaatatttttgtttaaatatatataccaatatactacatataatactaaaattatatacattatcatatatataaatttcaaattttgatatatatttttttaattttattttttattttataacatatactttcattttaatatataataattttttgtttaacctttaaataatatttaatactatctatattaattattatattattttttattaattatatatctattacattcattattattattttctaattataattttttatatatatatatattataattattttttttaatttttaatatacattatttaataatttttaataccaaaataatatatatataaatatattttgtattttcaattataattttaattctttatatttatatatattttatttttatgttcatatatacaatctttactttcttttttagttattttataatatgtagatatatataattcattttattctcatttttatctatttatataaatatatttaatatatttttttatttttatttttttaatttttttatatacaaaattaaatttttattttcagatttaatttttaattttttacctattagtttttaattctgattatttttaaaaatttttattttttattttgacctttggtttataggtcaaaacaacccttataaattattattaaaattttcactaaatcttagtctaaaaatttaaataattagttatttagcattcttatacatttgtctttaatatatcaaaattttagaaaaagctttaatcgtttcaataaaaaaaatttttttacagatactcactctcaggtcctgacatttttatacttagttaagtaactctaaatttttatattttttactaaatattctatagaagtgattataagagggatagtgataattttaatggttatttacaattgaataatgtcaatttttatgtttttcaacaaattgtctatatctctcgaaatattcgaatataattagatgtaattttaattgtttaatttaattactataaaactttcttaattttacaattgttataaaaaaataattaagttaatgatttttattttacacactatgttggacaaattaataaggtgttgcttatctccacaaatggtatttttttgagtgaacaaattttaaatattagttatataattttaatattatatagtaattagaatagtattatttatacagtacattaaaattgttattgactgactctaatcaagtgctgataataaatctcttctaagatcacgactgaatatcaagagaaagtttttgaatccattttgaagtgctttatcgaaccaaaatccaaaggctctcctatttgacaatccagttgttggccaatatgctctatcatgctttttgaactcgtttatataaccctcagacaaaaatacgaaaataatcatggcaaaagttgcaaggaagcctgtaacagtagaacctgtggagttccaattcttttctacgcctggatatccaatagaaagaagtaccatatgacttacataaaacaaaatagccaaaaatccaaccacaccaggtttattcataatagctaaagatgctgctgaatagggatagtggagagccctgataaataaataaccacaaattatcataattggaataaatatgagtgttaaattccaatacgccttttcacctgaccattgattcttaggtgagtaatttgcgttgacagtggcatcaagaattgcaaaagtgattgatggaatgggagcaataataagaagagcctgatcgatcttagttacatgtctaaaatccacaagtagtccaggtgctatggctggataaaaaacgtaaacaacaccctgagcaaaaatacacattgtcaccggtgatattgcagcatacccagagccgttactttcgtcttgttttgaaccattttcaccgcatttttctttgtcaacaccacaattgtgataaacagaagtccaaagaccggcagttgcccctgtaattaatatagataaaataatttgccaggtaataatatgaaaatcggtgtcatacttcctcttattaccaaataacctcaaaaatagaaagtgataaacagatgaaaaaataccggaaacatgtaatgtggccaaataataaactgtacattcccctgccaatttacgaataaatgacaaatttaatccgtatacaaaagccgaaagtgctaatgtccaataaaagtcagttaaatggccttcttcaccaccagtgacatatacaaataataggactatattaatagcaaagaatagccaattaaccccgattgataccttttcacacttttgttcaccgcctccgttagtattatattttatagtataaatggtaccaacagtaactccagcaaacccacttagttctatagcattgtgaactctactaacgtaaagactaaataaatgttcaggtaacctaaatcgtttcatacaaaatatggatccattcataccaactctaagcgttagaagtaccgaaaatccaaccaacagatatgcggcaattttctttggatcatctttaccatttccacattttccattagtttcggaaggtgtcatttaaacagcttatatatctgttatatccaagttttacaatacccaatactaacgggtttacctatatcatttagcaaaatagagtattcattattcaaaattcgttatctattggtacaccgataacagtattccaccgtgttatggtataataatcgtattaagttcagtttatgccatttgtttataactttaaatatacttttattatcgatgtttactttgtgtgtgttatggatataactcatactatgtatggtaccatcattataccctatactactatactcttggttgttaaatagcatacatgctctttttgtaccaattacactaaaattttctttattaaatattatattttgttatatccaaaattctagtattatgcaacttatgctccaggaaaagtaagcctgacaactgtatttggcaatgaacatgtgtctttaaatttgatttataatacttatatattgcatttggacaaattgctcattaagaaatcagtcaataagcatttattatcaattttatatattttaaattcgctgatttcagtacatatcccttacaaacatcaacccgttatcttaatgtactattatatccttgataaaacattggcaattttcatcattatctatgtttatactagttttttgacattattatcaataattagaaaactgtttactctggattatggtttgagttgagttggtataacctgaagaaataagggttaataactattaagtaatgaatggtaaaaaaattagagtgattaaactttattggaataaattaaacatcagttttcaagacgtacgccgatttttctaccgtcgaggacgtagtcgttgtacattgtgattgcctttctagcgctatattcatttgcaaagactacttttcccactccttttgatcttccatcttcatgagttaatacatcagctctaaaattcaatttacactacggtcactaccatacttatatatactaaatatacagttagtatgaggataatagtgtaaaatacctaagaactagtccgcaacttttgaaaagatccttaagttctttccaacttgttttccattgtaaatttgtgacgataacactagttccactacgaccacttgatctaccagaataacccctaaacattcatcacactaatacatcgcatttttactaaatattgcttaatagtatgggtagtttataaaaaagtgtaaaaaatacgatggcgagtcaatgcgtggccttaatctgaaaaaacgcccatatccacgaaacgtattatagttctctctatcttcacgaacaaatatttgacgatctaatcataaacataagtattattgtattaattgtatatatctgtattaacgatgtattgagaagaatgtgtaagagaaaccgagaatcatggtatcatttaattcagcaatggctcttgaggcagagtcttcgtcagcaaattcaacaattccacatccctaattaattattaaagggtattaatgagattttaattagtttacagggtaacaaatagataaataaatgtatgtagaatgtgtagagtgatactttggattttccatcgtaatcttcgataatatcagctctgagaacatctccaacttgtttcatatggtctttaagatcctgccatctgactttccaggataaattaccaacatagactctgcgtttgttagactgaaaaaatgttagggttttaataattagtaaaaaattgtaaaatcttaacaaaccctattcatcttctatactatatcaaatgtgctaaaaattacatataacaaatcactaatctacagtttaaacttaatatttttacacaaattttcaacgggagaaatgatctggaatacaaaaaaagttttaaaaggtttataaatgggcagtttgtggcaaaatcagggtcgtttagcattcagatctaaattaagagtataaaagagatcaattaacaccccatccgataataagccatggggcagaaaaggtacaatattatctgatttttacccatacacatccaataattttagtttaaatacccacaacttccttcactatatcagattccaccttttaaccgaaaattcatacagtcatatacacaacacatatacacgttacactttaaaaaagtattttatcaataaataaaaactttaaaatagattcttaaaagatttaatactttttaaatatttcccaccagattccaaggggtttcaagtataatattcaaatttacataatgaattatgtgtaaaattcccaagtaatattaagagttaagaaatagtcctcagtgtcgataatacattcaataatttttcaacattattcagtatctttaaatcactgaaaaataaaatttctaaatatatagtaaaacttacgtatcaacatttatttcatcttccacattcacgttagataataaatttacatatctaaaaatacatccagtcaattcatataaaataaaattagtttatataaaatttacctcgaaagagatttatttatttgaatttcaagaagtcgaatttgtttcgtttggaaatcacaatcagatttctgcaactaaatgaaatataaactaaccaaaaactggaaaataactaaaaataaatggtataaattataacttaaatgtgatcaaataatcaatagttatattgtaaataaaaggaaatagtatgaaaatactgggtgttcaacgggtttagttaggggtaaagggagagatttatcatttccctcatgaattgagttaagttcttgaccatttaatggaatttgaccaaaagccttataggaatctattttacaggttgtcagagtttgtccattcgattcttctaaaccaataaattaaaccagaattataaataaataatttagtatataatataacatattataatggtgtataatatggtaaataaatgtagaatttgaagaaaagagtaccattttgtttggttggtttgggattagtaattgaagaacatttacagcataaggaagttccatcttttgaccgcataagtgggacttcggtacactaaaaatctatatataaaggaagataaggattaaataacctttgagcaagtttcagataacattgcccagcctttgaggagaagttgggacattttcctagtaataaagtcattctcagactgagaatcaaagtcaacttccatcattgtttaatgagaaaattttaaaggtaaaaaactaaaggaatggctttaaattcgaaattttagaaccaatatccccatggcaaacttttgagtacacattctgtcataaattttaactagttttaattttaaattaatttatgtatttttcataattatacaatttttaaaaccctctaatggtttcttttgtttaaacatttgcatattttaaataaactttgatattgtaatttatctttcacattgtgagtccatacttcactcaattattaatactactatacaaacaatagtacaacttgtaatatatgatataatgtgttgatatagtgtaaaatgatgggtaataaaaacggaccaagtttggctaagagagtggaagataatgttctgggtgttttgagggaaagggaacgtgagttagatgatcagatttacgactactctcttgtagagagtaagcttgccaaaaacagagatgatgaaactcttgaatctattcgtgaagctaggctccgtgagcttaaaaacttgtactataagaaacaggaatatgtttcaaaaggattcggatctttaaatgaagtttactcagataaagaattttttgacgcttgcagaaatgttgattctgtcgtatgttcttgacattattcagtctaacattattactatgtgttgattacaaaattttgtaggtggtgcatttttacaggcctacaacaactaggtgcgcatacctggattcacacctcataaaggtcgcagattcacactttgatactaagtttattaaagtaaatgtagagaaaacgccttacatttgtgaaaagtttaatatttggtgcattcccacggtatcccatgctatccatactttactatactacactattactatgcttatgtatcattaatgttaatattttagttgatgataataaaagaaggtaaaacgaatcattcgatcgttggtttcaatgagttgggaggtatacaactaaataatttatataattttcaggtgacgggttttcaactgaaacacttgtggcagttcttgataaacatggtgttaaacaaccctcaactaaataacttctcctcatatatacaattgtattacacagtataatattattatagtattagtataataatagtataacatattaagtatggattaatttacgtttaggtatagtatttttaagggctaattcccagtttctattttgataataattaagtaaaatttcaacgcagttgttaacagaaagaacatgtgaaccactgagtttaatgtgttcttttattggaagtcttttacaagctgatccgatgattcttgccttgttataggtaataccgttgagcctgttacggtcaacgataccgccaataacatagacttcgtcaggggataaatcctcaataacgtgctcagaatctgctgacaagtaaactattttttcaggctcataaatattctccaaagattcgtaagttagttgacaagtccaattttcagtacctgaaattctacccagagccaagtcaaggtcactttggggtttgattccacaaattaccaagttaaagggcttttcagctcttttattagctccgtaggactgcattatctggtttgcgaggctcttggattctttctccgaggcgtaactgtgaaattcacagtcaatgacaattgtaggatttaatttacaagaatttataaattcagaccttttaatttttttaatctcatttctcattaatatacttgcgatttattaaattatattttatatgcttaaaggtaatatagtgtgtattagtaattggtgagattgtatattataaaaattagtatggaatctgacaaaaaatgtactggatgtaagaaatcaacaaatagtacattatcttgtccaatatgtaaaaaagtgaataaaattagtatcttctgttcccaggattgttttcagcaatcctggaatctccatgatttaatacataaagtagtaaccgcactataatcacaatttatattccttttgtcatgttatttagatggaaattatgaaccttgactccaaagggtctcccgaggccgacttttacctcaagtaataaaattttaatttttatttaaattttaggaagtttagaaactttaaattcactggagacttacggccatggcctgttactgacatgaaaaaggtgcccaaacacattccaaggcctgactacgctgaggatggaattcctcactcagaaattaacgaaaaatactctaacgcaattaaggttcacgaccctcaaaccatcaaagtaacattttaccctcttttacacatcaccatatcacttttatatagttaattacgtcatgtcatgttaatgatgagttagaaaataagaagagcttgtttacttggtagaaaggctttagatttggctaacagtcttattaaacctggaattactactgatgaaattgacactaaagtccatgaatttatcgtttctcataatggttacccgtcaccacttaactactacaacttccccaaatccatttgcacgtaattattattcactttattataatttagttccgtaaatgaagtcgtttgtcatggaattcctgatcttaggtatttttacacaattattactatatctatcacaattactctaacactattcctaatgatgggattgttagtgttaagagttgcatgtaagtatgtttaatgtggattagaccattggaagagggtgatatagtaaatgttgacatttctgtgtatttaaacggtgctcatggtgacttgaatgagacattttatgttggagaagtggatgatgactcaaggaggctgactgagggtacctacgcttcactaatggaggcaattaaacagtgtaaaccaggaatgtattatcgtgaaattggtaacattatcaacgacgtagctgataaattcgggtatttctctaatttaaataatattcttccagattatctgtcattcgttcctattgtggtcatggtatcggtaccgagttccattgttctcctaatatacctcattacagaaaaaataaagccgtattttaccctatccattttatcatttatagttaattttactgtaatttagctataatttatggttaagatgtatttagattggagttttgaagcctaatcaagtgttcactattgagccaatgttaaatctgggtgtgtaattcaactattaatgtgaatttaggcacttttagggatgtaaaatggcctgataagtggactgtcgtaacaactgatggtaaaaggtccgctcaatttgaacatacactcctcgttaccaatacaggtgttacattatctacacactctgggacataaatttcagttattcgttccagtagtataataattattgaatttaggttattagtagtaaaatcaactatttataaaattttttaggagttgaggtattgactaagaggttggaatcttcgcctcctttgggttttgacacaacaatgttttagaatctcactaaatgtaacttttgtattatttttaaacgctttaactgtaatattattgtttaattgtttacgataatgctgttttatatattgtctaagtattttaattttccaacaccgttgatacacatctgattgtaaaatgcaaaaaaatggttcctctgatggaaattcgtcccataaagtagaggaaaataataaaagacttgataattatgaatttttggaaattttaaagaaggactggctgaaagggattgatatgtcccaaattaagtcccagttcaagtccttcaacttctaccaagttataaattgcatggatatttcaattccgaagcataaatatgaagattattcatttgacaatgaggactttgatgaagaggataattttaaacctaagaagaagaacttcaaaggcaaaagaacaagaatgctgaaagttactctttttgatggaaattccaatgttatagcctttgaatatgaaccgattggtgcttttgacatgttttacgattcagctaccaataaaatgtcaaggtgttgcgttaagattgctctgtataactcagtagtttccaaaagaaactctctttggctcactaattataatgttaaaatgttgtttgaaggttattcctgcaagcaccacccatccagtgccttaggtcattccatctccgataactctattgttgctaatactaacgctattaattctgtggtatctaacaccattaacagtattactaacactctcaacagtatcaccaatgacaccatcgcagttaataatgttaatcagaacggatttgagattgatcaagatgttattgatttggctactcagtaccttgatagtaacgttcagtttagtcaggactatagtacacagccttccagtacacaagtgactcaaaaagacagtcaaactcctaataaggctactcgtactccagctttaactgattattttcctaaagactcgggttatctagatcacagtttcctgtgtttcattaagaaacgtgatttaactttgaataatgagtcgtttataaagttttcaaaggagaggtttactgattttttcaaggataagccagtagagttatctgagttttgtaaactttttaaccattcttccaatgtaggatatgtgcctctctatactgaaagacataaaattgatcatttgtttggttttttgaaccattcttcagttgtggtttttgatgactctgatcctgtttgcaagttccttgcagttattgtcgaagctgtttatggaactcttcataaaaacgtctggctatcaatttttgatgattgtttcaattctcatttttgtatttttgatcttgaagtcttcccattcatctcaccgtattctcaacaagtctccacctcacttgaactaaattcacttgaaggtttctttcttttcgaagattgtaaagttcaagttcctatttatcattttttacctatttaacactattttatacttttttatcattaattcacattttttaggattacaatgttagggttttgagggattttacaaggaacttaccacgtgaacaggctaatctaatggtcgacacactaaattctgaatttgccagagctaaacaagaataccaatattaatgtctttactactattataatatttgctacattattatattacattagtatgcttaactatatttgttttgttgttacgagttaacacttttaccacataatatgattccatactattctcgttaatacttccattgaacatattattgctctaaactatagtaatactatttagaatgagttaaatgatgtgaaaacatgtgaaatgtgtgtgtaaactatatactatagcgccatagtaatactactatacatactactgaatatacactataatatatacactatgtatgttagtaagtatattaaaaattgctgagtagattggagagtgaaattccgcttttaagtgcgtgataagcttttctgaattcgttggttattttagttctctgatggatggcaatattggcaacatcaactccaacttcaaacgggttatccacatgtaaaaaaggttcattaattaaaccattttcaggcttaaattctgataaatcgacacttctaatgaggattggtttattttgtgcatataaattataccatccaaagtatttaaaaaattgacataacagggttttgttgtcacagttgtttcgtttagactttgttataaagttaagttctgacttaattttattcacatcagttgagaatctgcagtcaacccctgagatataatttggttcttcatttgttgaaaatgctaaatcctgtaatgagggtaaaattggtggattacagttttgtaaaaagtggatcagcattagagaaatagcaaatgagcttaaagttccttcagacctgttatttatattcctattcctagcccaaagtttaagatacagcactaaatccctaactctaggctcaaaagagacgtaacttcctactaaaatgctgttcactattgccaaatcattgttcactgatatgtcaattgatggtatatcatcacactcaaaatacattttatctacaacaatattaactctattattatagtatataactatataaacattatagtattaccctgagagattgtattgatgagtttgtttggtgctttgatgcagtctcgtttccagtgtagaattggtattttggctgtgaatctgttttgaaatattctactgggtgacaaaggcgtaagaacgcttgaaattcgtcttaaattccttataattgcatttcgtgaggtaacatttgggatttgaacacagacgtccaaatcactgccatcagtccaaagaccatttattgcacttccaaaaaacgatactgaacactttctattcaccttttcccttaaaatcttctccaaaaattcggtaatcctgtcactcctcatcttcaaatcagactcacttaaactaactttaaccacgtcttcatcggttttaatatttacatcaggttcaactagaattttatcaatttgtttacgaagtttgggtaattttaagttatttatttgcgatttatagtcaaattcgtcagattgagaattaagtgcatttctgaatgaaattaacttgtttaatgaaatattttgtaattcatcgaatggttctggataaaaagcttcatcttcgtcgtaaaaaccatcactaaaatcgggatcagagaccttttcataggttaaatttaaagttttagagtcattggaattctcagaaccagaaatatcactagaaaattgccttaaaaataacgcaaaatgtgaattatgtgaggaattaagtaatttgagattatagttaaaaaatgagccaattttataatttaattttacacaccttttacacaaagttattgacatttaatttaaaggcaagatgagagtagaatcccatcccctgtgtagtagttaaatattgtacaaatttagaataaatttgggagaattaaggaaattaacgcagattctttaaaatataacaaattcaaatttatgttcatattatataaagaatttcctcaattatcagtaaatatacttgaaatgtgtaatgttacaaataaaggtaaaattcactggaataaaattttggatttcataatttttgaaaatttaaaccataaaaaagcttatactgcaaattaaatcgtgtaaaatagttttaaaacccttggttaatggatgaattggttaaaattcgatgttaatccccactaatagtgatttttactatttatttatttaaagcagctcaattattattttgttaatttatctgttgtaaaatttcatgtgtaaaattattgtgaatatattttccatgttgaaaaatataatttaatgcagaacatttttgtgtaattaattacttttttgagaaaatgattctttcaactttacgctgtaaaaactttattaaatccacctccagttccttaaatcttgctcaattttccaaaaaccagcgccggtttgtgagtaaggagttgaggcatgggactgagtgcagacaaggtctcctggctggttgtaatcagctggtcgacgctgtgagtgtaactcttggtccaaagggtagaaatgtcataatatcttcctcttttggtccaccgaagataacaaaggacggagttacagttgccaagtcagttgaactacctgataaacttgcaaacatgggcgcacagcttattaaacaggtttcatcaaacactaatgacaaggctggtgacggaactaccactgccgcagttcttgccagagctattttcaaaagaggctgtaaacttgttgattccggtctcaatcccatggatcttctcagaggtattcccacactattccatagttatataatattctagtacataaatggttttagggataaatgtggcaattgagaaggtaactggatttttggatggattaaagagagaagtaacaactgatgaagatattatgaacgtcgctaccatctcagccaacggcgacaaagttgtcggcaaactcatcaccgacgccatgaacaaagtattacaacactattgatactattgttatactattatactattgaccatataattatattattagctatataattatattattagctatataaataatgtatgaataggttggaaaggatggtacgataacagtggttgagggtaagacgttgagtcatgagttggaggttgtggagggtattaagtgggacaagggttacatttcaccgcactttgtaactaatgttaaggacatgaaagtggaatttgaccgtccctacgttctcctctgtaatgaaaaggtctccaacatcaagaccattttacccatccttgaacatgttttacaacaacaagcacccctacttatcgtttctgaagatgtcgacggcgacgcactggccatgctaattgtcaataaattaagactcggcattaaagtctgcgctgtcaaagctccaggtacttactactttatatattattttacaatagtataataatttaaatagtttaaatattttacaatagtataataatttaaatagtttaaatattttacaatagtataataattttaatagtttaaatattttacaatagtataattttacaggttttggagagcatagaaaatcaacgttactggacatagctgagatgactggcgctacggcattgggtgacgataacaattacgtgtcatctgaggaagatttcgtgtcatatttaggccgtgctaagagtgccacagtgactaaggaccacacgattatcgtcgagggtatgggggataaggaaagaattgaacaacgttgtgaggggatcaggtcacttattagtaccactgactccgaatatgaaaaggataaacttaaagaaagattagcaagactcactggcggggttgccattattaaggtattccgttacggggcttgcacattactacacagttactcttacttacacagttactaaccacttagttccttaactccctacccgacacttgtatacttgcatattaattaatggttaggttggaggagcgagtgaagttgaggtaaatgaagttaaagaccgcgttgaagacgcactctgcgccaccaaagccgccgtcgaagtaccccaactataccatatggaattagttatataataatatttgtggatttctattatttgttttagggtggaatagtgcctggaggcggtacggcgttattttatgctactaaagtcttggatgagcttaagactgagaactatgaccagaaaatgggcgtcgatattatcagacagtcgattcaggaacctctgaaacaaatcgcctcaaacgctggcttcgaaggctccgtaatcgccgatactctactcaaaaataacgaccactcccacggattcaacgcacaaaccggacaattctgcaatatgttcactgaaggtacgatactattatgagttaacacattttacaaatttactctgttctatggtaataactttgtaaaatatttgtaggaattttggatcctacgaaagtggtaaagacggcgcttacagatgcggcgtcagtggcttcactgatgacaacttctgaagtggcgattttcgactcaaaacaagaaaaacctgaagaaactccctcaagtccaatgtattaaaccttaaatacggttaacctgggttaagaattttccaattctagaacgcagttttaccagaggattccaaaattaaatgcagttaatttgttttcacattaccaattatgagtaatattaatttattttatctagtcctattttaatgtgttgaattggaaatatttttaatgctgagattgtacgtttattgcacgttgtgtggttcatgtgtcaaaattctctaatttacgtaaatttattataaattgtaattatgacatcgttaaataaaagggccaaaaagcaaaggccttttttaaaaaaattaaaatgtaatttgtacccatgatttaagatttgtgtattttaaagattccttcaaaatgaggagattttctgttaaaacacttaaaaagttgccttatcaaatggcaactctgtactttatactatttgtaatctccatcaccgcctctgtcattaccgttaactgcggagatgaaggtatttccaattctcatcaatatctacacagttatacactcatttacccagttttacccttaattacgtacaattttgggttcattttacccataattaggtcataatttggtaatatttagtcatatttactgttacttgtagttaacatcactattaatatgttaatatgaatattattagtgtttaagaggtatacgtcatgtcacgggactaaagtgtataatataaactggataggagcagtggtgtttcttcagatactactttgtttcgtctcaattgagcctgaacagaagaacactggtaaaaaccaaccagtagtggagataacagctccagattccaaccgtttaatgaattttaatctgaatgaaaccctttcaatgtactctagagggaattctaatactgactacaaagttgtcatcggaaataatcccaaaaaaccaaacaaacgcaataaacacaaaactaataattccaatacttccaaacgtaatttccaaccaatatccagttacatcaccagataacactaataaacccagttatatttagttataccccgaatataaacttggtaacaattgtttagtggaaggatcgaagaatggtagtacatttttaaatttatcggagagttcgttatcgtataaatttgtaaaggcgagtgaggagataaggaaaagagtgagaatatgttggagctctatatggatggtatcgtataattttgtcatatttatgggtgttcacgggtcagttttagcttccagaatccactcgggcattagtttaaacagatatgccattgagacttgtcctcatctggcatactttccttttaatttaagttctccagtgcttccagcaccgattctaagcgagtctgtactgctggtgacttacatttcatttacaattcacgaaattgtgattcgtaaaactgaaagttgttacctaataaagaactttttcgggaaacattactttaaggaatcgttaattttaggctccgcgaggcttataattcaagtggttttattctcacttgacattgcgattattgtcatgtgtattttaactgggttcggaacaccttttcacgtgctagttggattctcaatctcaatgctttcactctggattaattcgttattatcacagttgctagatctcacacattacggtgaaatgaaggcgcccacactcgattacagttacatttggtcaattttaagcgcatttgtcctttggttttgcgggttcttttactacgtttcagtctacggatttccctacaagagaccctatgtgtaccttaatccgatttcctggattctgctactctcactcacccatttcaaacgacatgaaatcttcaattcatcacaatacctacaaggattcgttccaacatttacctaaactaatttttcaattttttctattttttcattttttccaatttttccactaatttttactaattttcttcatttatttattttttcaccaatttttactagttattttcttcactaatttatcttctcaattcattgttgttttattatgatttttatttaatgtgtattgggagtaatttggtattgattaggagaatacattctggatatgtaaaaagagtgttagattctaagaaggcgcctttccataaaaagtatgagaaaatcttcgcggaccagagagaacgaataaattacaacttaaaggatttaagatatgagaaagatacactcactagagaattattaatagcaaaaaatgaactttttggtatttttaaccttcaagaagccaaacttatcaaagattccacaccttccaagttaacaccaattcctactcctatccatttatttactcctagaattaactatagtattagtattgatagtggtaataacttgttagtgatggaaaggtggagaagaagtgtgtaaatgaagcgcgtaggatttatcgcattttacggccagattctccttccttcttcgaagtaacttttaaaaattaataatttatacttaatttcatttttaggaacaaacgtcaatttatctcaaatcacgacttaacgattttttatccattgatcgaacaaatactactgcgctcattccctacccaaccaatgtaattatacacttagtctagtcttaatttaactatatttggcgttaattaattggtttagagtgatttacttgatgaaaatcccgtttttacatcatcttcctacactttatcagtagtttcacgttagtttttattacacatttggattttttagtcttggaatctctgactgaagatgtttattcattttgtgagtatttgggaatttcagatttaggtgaaaaatccactgaatctctcaataatctccttgaaaaacttgttcgttctctaccctttaacacagtttaggagcacttttttaagcttaaaattgatggttcaaattctgatctttgggttgataaagtctggtctaaactaaacgatttactcattgatgatttaaaaaatatcccagccaacgtaactttcaatcttaaccacaccaattatctaaactaaatactaatgatggtgtgtagtacatgaaagattggctgagaagtcatttaaaccgtgtttcaaacaatttaaaaactcttggacactgtgatgaatggtacaataaattctaatagtaataaaaattttaggtataacttttctgatcacattctctacgattgtttgtttaattgttttaacttaactttagccattccaatccctgagcaaattatcattgagaataaaatcggattcccagtagaaaaagcacaacattatctatcatctctcctgtcattacaggtgaatttaacacagtttactgatttatacactcatttgcttagttataataactcaactccgtgtgtaaaatgtattagaaatttgaagtctcgagtattgacgagttgataaaaaatttggagtgtctgggtttatcgaaatggtttaaaatgttaccaaatgagatagaaacgagtttatttggaactacaggcgcagttgaggctatagaaaatttaaagtggactcaagaagattttgacttatcttatttacttattgaaaccatggctagaaatttagaccacttgctcaatattgaaacttattctcccaactccatactctcaaatattactctcaacgtaatatttactcagataaccatataacatagttaatatatagtaaataataatattagttgaagaacaacttgtttgaaagagaggaaaataaatggttaagttctgaggatataaaggagatggtccggaaagtatatactaagaaatctgatttaacagagtttaaagactttattgacactccacttaaacaaatggtttgtacacataatttacacctgttgtagctggttgatgaggagaattattccaatcaaatcggtgcaattgtactcaattctcagcccaataattccaaagataatgataaagataatgctaaagataatgataaagatggtaaggaaagggattggaaatgggtaatgcctagtgttgattgtatatttgacaagaatcgcaatatgtacataagaaacaaaagtaacttggaccccttaatcagacttgagaatcttaaatctttcattctatccagaaaaagaatgagaagcatgaccaaagaaggacgtgtctacttcatacgagttattgtagccattggtatccacagagttatccctactcagttatttcctactcagttatctagttccgagttattctctagagttaattatatactcagttatattcttaactatatagttggaccctatcgtattacataactgtcctaataatattttaggagatgggaatgggtattttggaattggtataggatatggtaatgatgtaaactctgcaaaaaatgctgggattgagaatggtttaaagaatatgtattttctagattatgacccgtttgagagtttaaccacacccgtactgggtacggaatacggttccagatgtctaattcagagcagacctacgggtaaaggtatccgttgtaacaggaagtttttaccacttgtataccttattggacttaataatgtgagatttaagttaaaaggtaccagttcctgggttacccgaataaggtccattagaaaagccctagagtcaataatgtccagaagaaccatttgtaacatgcttggccggagatatgtagaagttggcgcacctggagatcacacaattcattggcctgacgaatggtttaatccgttacttaaagagtatttgaatcggatcaacaggcttcgggctatgaggtttaagtttagtaagagaaaccgtatcaaatttaaccttttattaccaacagatattaaaaacactgtcccaaattataataaatcccttctcaaatcacaaatcattaataattaatatactaaccacataatgctaactcgtgacaacaaattttctatctactatttccataattacgggataattaacagtaggataacattatttaagactaatgtgtaaataattgataaaaatggcttgaatattagctaaacaactgtttattatactgtaatatatacgctatagtatactaatactatacccataccactatacatatacttatataatagtatatatagtatataataaatagtatagaatattagttaagtttagttttggtttgttgtggagttaggagtgatgagggagttttaacgtttaatgagaatgaaagaccaaagaataaaataacaatgaaaaagaacatgactaaaagctgctggaaaatgaccggtgttgtttttaactcttcctttccttcctcttttgtatctttaggtacgtcttcaattgctttgggtttcctcagttgtttcgtatccaacaaatcacaatgcgttatcaatagcgttacattcctctcactcttgttcttctcaaccaacttcacaaattcctccactaaacatcactcaattatatccaaatatataaatagatatattaattcacaacaacattattaactgggtaagtatggtaataagttggatacgtgaagtattatctagtagtggtatgtagaaccatagtccagattgaacttgttcgagtgctttgttattatcaataaagtcaaagccaattctctcaaatgtttcatttattaatttacgtagcgcgtcacaactctcacgaaattctgtaaaattaccaaggcccaaaggcgcaaacgtctccttcctcaattccaatccataattaccctcaactacgaatttacatagtaattatatagtaattatatagtaattatatagcaataatatagcaataatataacaataatatggtaaaataaaggtatgactgggtgaattataccgttaacggatgcgataatggaaatatcaggatcatatttccgaagtggagttaaaagttgtgaagagtttaaattttgaacattttttgtagacaaaataacagttttatcttcgtcatcacattttataaagttatttaaggtaaaaattagaaataaaagtacttttattccctttatcattttttcactaaattgttaaaaaaataatttaatatcagaaaaaccaagtcatttatttaaaataaattttattttaaaatacatcaactaaatcatagtttaattagtgtcacagtgaggatcttctcaacacactataccctaaggaaattaatacttgaataaaaataaattattaaaataatactctcaaattattattaaaaattaagttaataatgttaaaaaatattaattcggttgaaatttgagataatggcttaaaatatgagaaatcggaatcatataatttcattgttgactatggtatgattctttgagagtaactagtgctcttttgactagagcttcgcctaagaagtcgaaattatgcctcggtgtgtaaagtgtgtactcgtcgtcttttgagattttacccctggttttaagctcaaaatcaaactcatttgggttacaaatgtgaacctcatcaatcccaggctttctaatatactcctcatgaccagactccactaaacaaacaacacaatcaacataattaacataatcaacataattaacataatcaacataattaacataattaacataattaacataattaacataattaatatggatgaagagtggattacgtaatttttcgtctagaaatgtgatgatgcggaatgcagtttcagtgtcaataagtctcaaatcaatcattccagtgtttacatacggtttctacaattaaattattaattatattattttaccacgagtttgcccattttcctaacccactcgttagcatccgtttcactaaatttaagaatttttaccagttgtttctgacactccagtctctaaaataatcaatatacttattgaataaattaaactaggtaagtattaccagatgatctttaatgtatagaaatgaggttagtattctgactctgagtggagctgagagttgtctgaatctgggagcgatgtatctgataagtttattatttaacacctttgaagcgtgacaggaggaccaattatccttaataagcttcaaatactcaacgtactggtcacttatcttcttcaaatcagcctcacttatggtcttgaaccagtcgttatcactgtccgcatatatattatcatccgtatccataaacggatcttcacactgctccaactccattataccattaactatgtgataattatgggattagtgctaggaatgatcaaatttggggaaacggggtgaaaaattggaatcctggaattaattaattttaaaatttcagctaaaatttcccaaatttatttttttacaatatttcaaatccacacaattaatgtataaaccgtttactctttcaatttgtatacaatggtgtagaataaaatgtgtagaaaatattaataaatgtgtaattatatgttaaatatttttattaaaaaatttaatcttgattctggaaaatttgggtttatttacagttttgagcgttttataaattcaactccttggcgactctggaacaggaatcctgggtgtcgatatcccagtaaagtattactccacacaataacatttatttatcatttttacacacagttacactatttaatatataatttagccttaattagggttattttaggtatattattcgtaaataatatattatttgtatgatattttaggcgaataagggagcaagacctgattgtcgttcacttcggaaaatacgtaaaagactcaggactgggaaataacacttcacacttttaaccacaaatttaatattttttacccattttataccatttttatccataataactgacatattgtgacattaaatattaatattataatagtataaattagtaaaaatttggaagataattagggtaaatttaactagtaaatatgggccagatttgggtataaaaatgtatatgacagcggcggagtaggatgttgtgatgtggatgagttctgacgaggtgtgtgaaggtactaaaaaagtcaaagggcagtaatgagaagagagttgtggatagagtggtgtagcgtctttttacacaccgtagagtagtggcgtgtaagctagccccatgaagtgtaagatgtgatttgaaagttatataattcagaaatatttttttactgatccgcctctaatcttctttttttatctgtttagtaattatcagcaaattaattacccgcgcacgtacttttagatctcgaatatcattgttagtttctagaaattttaaaatcattttcatctccaactttctcagttaaatttattaattaaaatattaattattattttatcgtgtgaattaattattgatgctgtagatgtctggaaaagtaccctcatcaaaatcccacgcggctaagaaaaccgctggaaaaacccttggagtaagataccgcaggaagaagcgtgttgagtctttttcactttacatatacaaggtgttgaagcaggtgcacccggaaactggtgtgagtaagaagagcatgagcatcatgaactccttcatcaacgacgtcttcgaccgtctcgctctcgaggccaccaggctcatcaggtacaacaagaagagcactctcagctctcgcgaagtccaaactgccgtcagactcctcctacccggcgaactctcaaaacacgccgtctccgaaggcaccaaagccgtcactaaatacaccacctccggagtctaatttaatctttaatattgattaatactctcctccactactcattatccatccatatttatttactccccctaacactgcccccggactccccttcctacttcccttcctacttccctgcggcttacttccctacgtattacttccttacggcctacttccctgcgtacttggtactatacttatggaatattaactattatgcatattggatagtgtggagttacaaaattagcagagatatttgacagtgtttccgttaatgtaaggttcggatttatcagtttggctgggatttagtatattcgtactcaaactcgaagaatttccatactcctcatttatcgtcttatacctatacacaaacgatgtatacttcttatcttccacattaccaacactattaacactattgttcccactactaacagtgttactagtgttcctactgtttacactactaacagtgttcctgtttgtggtgttcttggaattattgaatttgttggtagtattggttgtgttattcatcctgttgacgctactgttcatggtattattcctcagagtattaaaactgttataaccactcttattgtagttagatttcttattatagctagatgtgttattatagctagaagtcttattatagttcgatgtgttattgtagttagaattcttattatagttcgatgtgttattgtagttagaattcttattatagttcgatgtgttattgtggttagaagtgttacgaggatttggatcaagtctgttggggttaaaggggttatttcttggaataaacggattcatcccaatactactcaactgacttccactaataaaactaccagtacaagtgttaacagtgttgtgagtgttccgggaattggaattggtaggcgtattgttaatgttggtaatgagataattatcaatagtgtcaatagactctaatattaattcatctatccccttattatttatcccatgatacaccttttccactccatccacactattaagtctgtccccagcgttaacagtgttttcctcactattaccaaccgtactaacattactaacactattcacactattaacactattaacactattaacagtgttaggagtgttattatgggttgtagatttgtttgatttttttctacctcttttgctagaactgttagtatcttgggttaaggggttggtatttttaggttttgcggatttctttttagttttagttttattcaagtttctatacacttgtgagattaaacttaatctcatttccatattctcctcctcctcagaattcacactcacactgttccgcctacttctcctactcgcaacactatccacatcaacccgatcactattgtcaactgtatttacagtgttatttacactatttactatgtgatcagattccagagaattctgtgtgtgaacagagttctgcgttgcaacagagttctgtgtgttgatggaattggcgagatcgggtctggaggtgaggcagtgttggcagtaccaattactttcaggaattctggtgagtggcgggtttaggcaatatgtatgaaaccctttatcgcaattatcgcataataattgctgattccagttatcgtcatttccgcaaatttgacacccgtcgtcatcttcttctgatttcagtttcctcttttgcactcttattatattcgacgggattaagtcatgccagttcctattcacatttattatcttcttcaatctagatatcttattcttcctgttacatattaattttttacccgtacccattgtgcccactgtacccacagagttcactgagttagtatttacagagttagcagaattccccgttgttaccgagtgggttgaagaatttgagggaacatcgtatctaaataattcaaacaaatctatctcaccattaccactgccaacactatttacagtgtcaccacgggtaaaggtgttcccagagttaggattgggggacagaaagggattagtagtgacattggtagtgttattagatttattgtggtcaataaggtattgtatgtagtagagattaattttccggatgtgcgtgaattctcttctgcaaatgggacacaggttggtccggtcagcccaagttttaatacatttaaaacaaaaaatgtgataacactcgtctaaaattccaatttcattctttaactcgttcctcatcgattcactacatattatacactcctcaaaataatcatcatcctcatcatcactctcctccacaatattcaccgtgctcacaccattactcacaccatcagtagtattaacactatttacagtattattagtaatattacgagtgttattaacagtgttagcacgggcactgttgttattgttgaactcattatctgagtcaatttccttactaattttcctggtatgcgaaagcttaaactcgatattctcagccttttcatcaggtgtcaacgttattttattctttttacggtctggtgttacagttagtccattagttttttccttaggcgttattattttattaaccttatccttaggtgttagagtaattttgaggtctatttcaggtgttttgagcgtatttttacctctggagtccaaagttttattaatttccacgtcattttcatcgataaaaatagtttttgatcctttccttattatatcatcttcaaaatcatcacaattattgtttaacgagctaatattatttactgagttaattccatttactttgttattgctgttgactgagttattgttgatattatttggcgtgagtgttggtgtgttgagtgtattaaaattggcgctatcgatggagttgttagtattatataagtattgatctatggaatcgatgagttgagggtccaggatgttaaaatcttcgaaattatcattgcattgttggagtttgctatcgagtgtgacattttttggtgttttgggttcctgggttaaatctgtgacgttgacattacggacaaaattttcggcgtcttttggccctccaaaagaacgatcagggcttgacattgcctgaagattcgacatgggtcagcgcctaccacaaacgcgagataacaatcaattctcacgcacaaaatattaaatataaacaacaaataataataaacacatgtaaataatatattacaattgcgatgttttctattttttacccattcgaatcttgggtccaccacctactccctcatactccaaactccaacaaactccaccaaatcctccccttactcccagtttaacattaattaaaaccacacaaataataatttacgttgatttgggtgaaaaatttaagtttcaagcacaatttaaaacttaagttacacatcatttatcccggatttatccctgaatttgagataaaaattttatcaccagttcaaataatacatcttacattacatgtgtatcacctttgaagtgatcttgatctgggataaaagggtcttctgataatctgcacaggtcttaaacagggataatttaccggaaccactggccaaaccactccatttccgccatatcctttcaaatattgcacactactcattccatacacatttatccttgggttcacactgttaactgagtttacagagttcacactggtaacggggttcacacagtttacacagttcccagggttaacagtgttgagaggattgactgagggtatattactactatttaccctcttaaaacttaccaagggattactgatgttcgtaatgttagagttaactgagttgttatagcagttgtatgagggattgagggagaatttgggtgttagaatagttttttcatcttttagtgaatttttggcgtgtttcgagttaatatattcgtgtgctaaggttaagtcaagttcaggcacttggacctggaactcctgactcctaaatgttatctcctcatccatgtcaattgtgtccaccgtctcatccgtttcctcctccaaatcatttgtcacagtatttacactatctttcacattcatatttacagtcccagagtttacattatttacagtgttattcacattgtttacagtattatttagggtgttgggagtcgtattttgtgtgttgtggatgtgtttggtgagtacagagcacttaggtttctccacagtagtattaattttatccacagtattattaggtttatccacagtattaaaagtgtgagaatgggattgagagtggttaggctgtggacttttaaaattacaattttgattacataattttgtatttcttcttgtattcttatttagagaattttcttttagagaattttcttttagagaattttcttttagagaattttctttcagaaaattatcctttagtgaattggatttatgtaatttattttcaggtttaagattattttgtgtcagtttattggtattttgggggtttggtatgttatgtttaattttcatggcctggtacgtatttttgagtaatttgaccagatcatcctttggtaactttaacaaagccttctgtagcttttctatacacaactccttttcactcatttttatttacttaattcccgtcacctacaccataacacttttctacacattcatccacctctaaattattatttacataaaactgtcatagatgagtatattatgtacagtagtatagtacaatattatattatggttatggtataggggggtatcagatcatgtcagaaattaataatttcggtccgtgtttactttttcgccatattctctcaaaattttcattcacaaaattgttattgttatttttaccaattattggagaatttaacaccttttccaaaattttcaaattctcagcattctcccctttacccaaatttccagaattctcccctttacccaaatttccagaattctcccctttacccaaatttccagaattctcccctttacccaaatttccagaattctcccctttatttacgacttctgtgtgaatgtgtttgtgtatatgatttgtgagtgttatgaagttttcaggtgttaaattttgaggtctcagttccagcacattttcaggcaattttacgttatatttactcaacaaacttcccaaactgctcctcaactttttcctctttttattaaacgatactctcaatatttccctcaacaacatcatattactcactctaatccccgggtcatcccctactgtagtattatcaccagtatccctaacgttgactgtattagtatttgtgaactccagcttaatgcatgccgattgtactttgggtttggggtagaagacgtgatttgagagtttgaagagtattttcggcctagtgaacatttgtatcaatactgagagcattgagtagtgttttgaaccgacaggcgctactaatctttccgctacctccagctgtgcagttatcacagccctgtcaatatactttcgataatccagcaaacacattaatatctgacttgttatgtaatacggcaaattcccaattatccacagctttctacccactctattactcaactccttatagtccatctacaaccattagagtaaataattgtaaactcgtgatatatatgtagttggaacctgtagaacatcgttgttgatgatgttgagacttggtaatgtacgactcaactgactaacagctcttgaatctatttctatacctatgataatattaactagtaatagtatattaggagccccgcaggggctaaataactaaataattagttaactagggaactagttaaatgagtaattaggtagtaaatgagtaactggagaacatgtggttagtacaagcaccgtaacggacctgtcatatttttatattttttgtagagaatttgcgttagtgatccgattccgcagcctaattcaatgacttggctaccatcgccagggtcctctaaacataatttaacactaaattctcaccagaatagtgttgcaaagagtcacacatcttattcattaaattcaaatcagttataaaattctgacccaaactctttctaggcctatagatctcattagtactattggataacaaagtacaagtatgtaaactaagtataagtatgtaaactaagtatataaatataaatagctaaggaaataagtgtaaggagaggggtaaatagggtcctctaggggatgaataaaaggataaataattgaataactaagtgttcagggggtaaataactaaaagtaagctgaatgagcggcagcaagctccgtaacgcagtacttaaattctcctggaggtaattttgggacttttgagcttaattttgtattttccaggggataaacatcgatattatctccatactttacactcttcaaaactcctccctcctctacacattcccctaatttatccaatttatcctcaatatttccctcgactatattaacattgttaatgttatttgagatattaagggggagattagtgtgatttccgtttatggaatccttctaaaacggattaaagtgtaaaacttacgataataaaggcttctgcataaataattaaacatgtataaatgagcataaaattaatagtgtttaatggcgttggtgtatttaatgttggactggtacttgagtgggagttgtttaacccgttttaaaacgtactggtaaatattgcaatcgtatttattattcaaggtgctaaacatctcctttaaaatttccatcactgaatttatcagcaattctgatttagactttagctgtaccactattaaactgttgttcttgattatcacatttcccagtataatttcattgccatatccgctcagtaaaattaccccgttgacaaatttgatgctaaagtagacctggaggatattaataatctcattcacgttaacgtaaagcttggatagaaatattctaattttattattatttattaaattccagagattattgaatttctggattgtatactccagcgggagcacacactggaaaattcctataggcaacttcaactctaaactgttaatgttcccgtcattctccacacactttaacatcaatctcgggaactcacacaaatccatcagttctatattcatgtttctctccacactcttattcacacagttgtcctcactcaatattactacagagtttcccactacagtatcattcccaggggtgttatccctcacagagttatctctcggggaattatccctatgggtattatttcctatggagttatccccagttccagtatgatacaccagttgtatggacgaaatgttaatgtaaatctgtagtatgattctcaggttgagtgtaaaagtctccatattcagctggttagtattaaattctagcgagaacttgttagttttaataatattcttcccatttctagcgtagtcgcccaggtaattactcagtcctccatcattttctacacgccacagcggctctatgtcatttccaatcattaactctgtcaacaaatccatcacattctgtttataccccaccataaggccactgtgcgggtgtaccaactctgtagagtcactctgcgtagtgtgactgggactgcagtgtgaatgtccagcagtaagttccaagggtttatgttctctgtttgactgtaattgacattttaactttagctgctgtagtttcagttgctctcgctcgatttccagttctatcaattttttatcggataaaactgatttatcggatttttcagattcaacggatttaacggatttaggcgatttttcaggtttagacgatttttcaggcttaattctctcagatttgggagttttttcaactttctctaatttttcacgtttctgtgttacaatctgtttaacagtttccctgggttcatcaggaacagaatcaattttctgtgctatagaatcaattttcctaggaatagaatcaagtttaacggggatagaatcaagtttaagggttttagatttaagtttggtgaattggctggataaggattcagatttagaaaggcttttggagtctttatacttcaaattgggataattatctttatgtacgtcgttaacatgatttgtgggcgtaaaattatcaaaattagcccagttttcaaagtctgaagcgtcctctaaactattcctgacacttccattcagactattaccaactctgttgaaagtgtcaacagtattactaactctgttgagagtgtcaacagtattaccaactctgttgagagtgtcaacggtgtttggtgtgtctacggaactactcccaaagggattaaaatcatcagtgacctgttcattattaaattcgtcaaaattatccatgtacgtaactctgtcatcaattgtaacactgctccccctgttaacagtgctgttgtatccgactgacggcggcagtgtgatggcgttattgtaattttgattaatggactcaaagtttgagaggattttactggacgtatgggaaatatcagcgattttactaaagagtttcgagtttccagagtcaagcaaactaggcgccaaatcctccagctgcgatctcagtaaacaacatttattataaatctccacaaacttcgaggatttcaagtctaaacacaattttaacagttgaatgagatgaacaacgtctgcggtatttagctgtatagcaagcctctacagaggtattaactgagtaactagtaaaaggaggcggaatagaatttttgtaccttttttacgtagaattgcattatttagttttttacataaatcgttgaggttatcagcgattttggctgcatttggcggtttttttgacttgttaaaggccatttcagtctacgtttaaaaattaaattcaacttcagaattccgtcagtttcattttaaattctttaaaatccaaattaatatttatgaaccactcacaaacccacaattactctttcactaataaattattactcacatctccaaccacttataacttaattagtcaaattaattattcattttttcatttaaataatttaaatggtattcaatcttattttttcgcattctagccagatatccatttcaagggatttatctactaccaatagtattactactaatacaatagtaaaatcatttgtatgtaatatatgtattttatacatgattttataatgctacagatatctgtagttattagtttggatgtgttttggggtgagaacttgtagattttttgagattcctgagcgatttaaaattataaactcgtaaaaatattaaatttcatttttaaaattattttaaacaatgatttccgcgtgttttatgtgtgattttggaatgatagtagtaatctccagtttaaacctgtaaactctggtgttataaacttaaatattgtttaatagtaagaaatgatgatttgcggatgatttaaagtaatgtttgatattgcacttgaaatttccctagtgtagataatttaatttaaatttccggaacattattttttcctcctattcaccgattttaacactggataataattattttacgggtgaatgttgtttagtttgtgtttgggcgggtacggttttgggtgtggaatcaaggaaggtgtgtgatgatgcatgttagtgggcacttgcgtcagttcaaataaacttattttacactgaacatttttacttttaccccttaattgtatttttttaatcttataatttattccatttgttacaaatttcggttttaccatttttttccactctgaacgcaatggcagatctcaccaaacgcaaacctcactcaacttctttcgtcgatctcacacgattcctagatagttcgtttccctcactaaacccacaattatccattattcacacaattactcattattcacacaattatccattattcacacaattactcattattcacacaattactcattattcacacattttatcattttatctaatttgttaatattttatttaatgaacaattattttaattttatcctgagtgataattttatgctggagattgataatttgtatgctgagggttgataatttgtaggtggtgtgttgacattatttacggtgttgttgtcttgcacttttctatttatgtttggggagcttttgagactcatgaataacctcgaattcctcaaccacgaactcgtcaaaaaaggactcaatcgcctcttcccattccgggtaatttttactcaattctactactcaattctactactcagttctactactcagttccttaactactcatttactagttactaagttactagttactgagttatataattacggtatagtaatactttaaacgtgattaataatggattagagaaactttgagttcaatttgacgcattctctactattttcagtatgcgttttacttcacagtttcaggtaactaaatcctaatcccccaatcatccctttaggagatcaaactaatccataatctcataccacacataccactacccattacacactattaactatgtgttacactaactacgtattacactacgtattgtactattaactgtgtgttacactattaaagtatggtagattagtattgtgagattatagagttgagattccgagtgagagtagtacgttttcaggcgtgtaggcgttatggaccaggttcatgtcattaaatttgtaagcctttaataagttctttttcaatttgaccggctccaaatcctcttcctcactcacttgataattcaatatgtacttgttcatatctacacatgataacagggttaagtattaaaatgccccggagggataaggaactacgtaaggatataaataaatcctatttaaatgagtaagagggcccggaggggctaaaaagagtcccatagggtctaacaagggataaataagggtaaataactgagtaactgggtaaaaagcccggaggggctaaaaagagtcctatagaaactaaataagagtaaataagggtaaataactgaggaggtagataactaagtagatgcaagcaccgtaacggagatactattaaaggcccagaatgacatgttattttgatcaataactgagataatatttgtagagtaggaaaaatcaaagtctaagatgtgagaattgtgcacaatcttctcgagcaatttcccgttcctcacgtcgtacaatagaatcacattctccttacttatcccatatatcattccgttcttactccagtttatcctacccctgccatccacactaccacacacattctttcccctcttcttattctttcccagattactcttaacattactcagattactcttactattagtattactattagtatttccattgaggatggtgcggaactcgtcaaagttgagggtgttgtagcaaaactgtagcgctagtttattagtcttgaggtcataaattgtgaaaatatcattgtacgaaaggagtgtaatgagagaagagttggggtgaaacctgttgtagtaaaatgagttattcacaggtttataattccttaacgggaaactgcgatctgtacaccagagcttacaatacccattcacatcacaactgctaaagtaatacccataatttccataatccaatctcaacacactattcacccctccaaccacagtgctattactattgggagtattggcggtattgtagtaaatggctttgcaggagttattattggtggtgtagagtttaattagcccgtcattccctgcggaaagcaggacttggccgttttcgccaaatttaacgcagtttaccacgccgtcgtggccgtaaatgatgttactattctcctcatcctcgtcacgggctgagtaattgtaatcctgttgctcctcagcgtagttattcgaagtcgagttgtaattcgaattcgagttggaatttgacttcgtaaacgccgggttcaaagtactcacagatttatacgctataccacttccaattatacatgatatgtcattgtacacattgttacactataatattattaaaagagtaataaggtaaattagtaactagttaactgagtaaataggtagtaaatgagtaactagttaactgagtaaataggtagtaaatgagtaactagttaaatgagtaaataggtagtaaatgagtaactagttaaatgagtaaataggtagtaaatgagtaactagttaaatgagtaaataggtagtaaatgagtaactagttaaatgagtaaataggtagtaaatgagtaactagttaaatgagtaaataggtagtaaatgagtaactagttaactgagtaaataggtagtaaatgagtaactagttaactgagtaaataggtagtaaatgagtaactagttaactgagtaaataggtagtaaatgagtaactagttaactgagtaaataggtagtaaatgagtaactagttaactgagtaaataggtagtaaatgagtaactagttaactgagtaaataggtagtaaatgagtaactagttaaatgagtaaataggtagtaaatgagtaactagttaactgagtaactagttaaatgagtaactgaagagaaaagtggttattgcaagccccgtaacggaatacctccgaggttaacaaatcgtataggagaataattccattattttgtccgattgcgatgtatttcccgtcaaaagacgataaagtgcagcagttcatctggttattattacttattccataggataatatatacactacgtcactctctatcctattctcatcatccacagcatttcctacaacatactattgtatggtaatatatattgaatgccaaagttaaggggaattggcaggatagttcacggtcggggtacccactaactccagctacctacactaaaaactatataacaacctgtattattagttagatcagattgtgtatcattttgttcgttgaatgtgacattacttaggttggaggcatttccgttatcaccatcggctactgagttccccgtttccgccgtgttattcgcactactcacactgttcacgcggttaactttcttattaaaattggacgggacgatacggttacaattttgtatataatataaagacctcagcgaatcgttcatcagtgtgccgatcttcggcagtgggatgagtttattatattcctccagtttacacagctcattagtgattgagtaggtgtactcattagtcacaaattcacggcctgtactgaataataactcgtgtggtagtccgtatgttatttcttctttcttattctggtcactatacacatactcaccatcacccagtaagtaattcgtgtccttcactatcaaccctatacacattatagtactaatattcctagttatagcattaactatatactattggtaatacctaggaaaggttggttgtagtatttattgatgttgtcggggttaatgttatatttgaggatgaagtagcgtttaaagaggttaaaagagttgtggttgaacatttcactgtctataaactccaccttctccagcagtatcacatttattatattattataatatatactcaaccagttcaataacaccctcttactatttctacaacattatcaactgtcaaggtattttaccataacacagtttatataatcacacaatttagatatataattaagtatatagttaaataactgagtagtgtgaaatgttacttggtgatgacgatgatgtatttgttggatttattgtatccgatgttgatgaggaacaattcgtctaactggtcgaggaatttatactgcaataacttttgtatgtaattgtcaaacttcttatcaaacacattcttaaactccaataaatagtttttccctataaccacttaactcactaattaacaaaggactaatttaataattataactaaatattagtgaattaattaaatgggtgaaaattgtttgagaggaggtaccgtgagatttggagagtttgaagagtttggcgtataattcgaggtagatgacgaatccgatatcgatgagttcatttttatacttgtttaaattacttaaagcccagttcaagtatgatctcaagtcctccgcgtaactctcatacaatttattcacatccttctacaaattttatcaccgtaaagttgttataaataaatattaatattaaattacattagtcatcttttccactaatttatttagtcttttccgttaatttatttatttatatttccagttaatttatttatttatattttcagttaatttatttattaatatttccagttaatttatttatttatattttcagttaatttatttattaatcttttccattaatttatttattaatcttttccattaatttatttattaatcttttccattaatttatttagtaatcttaaagattccatacaccccagactcaaccctaaattaaatattcctaacactatttaccgagtatatatattttctgatattactggaatgaaaaattactggaacgaaaaattactggaatgagaatttactaattaggtcattgagaaattcacagtttatatcaaatccttcctcctcctccactttatacttcaaatagtcctccaacatatccacactatttacactcacagtattctctacagtgttagaattatctcctgtgttactggtgttaacagtacccattgtgttaccagtgttaacagagttgtcagtgtgattattgtagagtgatagaaagaactgtgagatgtgatgtgagatgtttaactcatttgataataatattacattgtcacttttatacttacatttatatattctcatgtcatcacccctcaactcctcatattccacaatacctccaacacccgtaacactaccaatatctgtgacaccagtagtatcattaacactagtatcaatagtagtggtagtgttagagcagggagaaaagatgtgtatggtattgtgggtgttgaaagtgttgtaggtggtgtatagaatagtgtttaagtcatttcccaatcttacatataactccatcatctcttctactaaagcattcacaactatctcactaccgtcactagtcttagtgatgaagtagattaggtatttatcatccggagtattacacgtttctttacacacctgtaatatatacactaccttattatccaacttttctgtaccatacgtgtcatctgtattcatagtattatccgtattcatagtgttaccagtgtcatctatattatcagtggtggtagtattaccggtgtaggaattggatttgggcatgacaatgcatagattgaaatcgtttagtagttttttattacttattatgtagactattatcactctctcatctgaactatctgctgtactgtcattctctacacagttgggaatgtcatactctgaaattatatatctcgtatatatcctatactcatccaatatcaactccaatcttctgttaaccacgtcaactctatccactgtatctgtagtattatccacagtgtctgtgttagtagtttcttcatcagttacactaccactagctgtactattgtcctcagaatctttcttcttattctccacactctctacagtatctacagtatttacactatccgtagtatcaacagtgttaacactattaagggtgttaaggtgtttgatggtatgattgagcatgaagtggcagttgtatagagaggacagccgtgagatattctgtattaggttcccaattccgtatagaaaataaatcacaaagttcttattctcattaaatacttttaaatattctttaactccactaataccctcatgaacattaacagaacgatccagcaatatgcaataattaaccaaattcaccaatttatcattcaaattattacttctcatataggcaatccagtccacaccatctacactatcctcattattcttagtattatcctcagtattcttcacagtatcagtagtattatccttagtattatccacagtattcttagtatcttttacagtattatccttagtattcttagtatcttcagtgtgagagttgatgatagtgaagaacttgtatagtaatcttttttctattaaacttagatatttactacgaaatatactattcttatcatataccaactcattccaccgttccctcgtatcctcccccgtatcctcccctgtatcctctttatccttagtattatctttatcccccgtattccccgtatcctcagtattatctccattagtactatttaaagtactattaagagtattaacagtggtgaagagtatgttttgtgtgtgattggtgcagaattgtagatttctgtgtagattagtttgaatgaggaatttgcaaaatagtgaattctttataaacaacttcgggtacacatcaatattatacttgttactctcatttctcatctcttcccatactcttatacggtcctcttcattttctacatacggtaggattgattttaggttttccgttacggtgtcaggtccaacagcactattatctgtactctccactttatccacattctcaccatcttccacattctccacatcatctacagtatcttctacactactatcaactgtatcagtagtagtataaatagtatgagtggtatgagagggatgggaaagtttgaggaattgagtgagattgagtgatctgaagtgattcccgtaatctgaaaacttatctacatgtaacactttaatattattcttggttaatatggaaccaattaaacaattcaccagccccgttccatatattaccacatcatactcatactcttccatattcacacaattgtattaacaataattatactaactttattaataattataatatagtaattagtgagtaatggctgggaatgtgtagtttgtcgggataatgagatattatcctccaaatccaacaatttactccacttaccattctattttattccatttattattccatttattattccattattatttataatttttttgccatatcattttctaattattatttaatattgtgtaagaatgtgtaaatatctgtggaaatgtgtaaattactataaaaatccgtaataatgtataaatatctgtaaaactatatagaaatgtgtaaaactgtgtaaataatgtagaaatgtgtaaagtaatgtgatagcaatggacttgctggatttgaggtatgagtttataaaatctaaagaattggaattagagcagttatttaccaggaataggcatttccattttactcagtgggacttacacctcttactcctaggcgttacctcatccctactactcctcagcttcatcatcaagaatctattcttctctcttcaacactatttcattctactactactcatacaattcagactcctaccagatctctccactctatacaatattattatcaacatcttcatcagtttactcaccaccatcacacatgtcagtattaactactgtaaattctctacctctaccaagcgggttaccatactaactgtgttactattgctgagtacaactacaaacctattggtttggatggtattgagtgttaaactggttagtgacgtggatagaattttggaactgcatgtaattaccttgattgagttcttctcactactgctgggcactctgttactcctctccgccgtcttcttcatcatcaaactatactccatctcctacatactcattattattatcacattctcattattatccaggtggaagtttctcattccccttgtcaataatatcagtagtaagagtaataggaatagtgttaatagtaagagtagtagggataatagtaatagtgttaagagtggtaatagattgggaggagtgagagtgtgttatttcccggtggtccaaagtttggtaacgtggatattaataataatcctaatagtaatactatttgtaatattattcaccaacaataggatctccctgctgaatcaaaagccactactccaatttattaatcacaactatagtaataaagtaattgtcaggataaagatattattgtttcttacggttttggtgttatttctgttatttgcagtgttttcactgtttatatattacttcttctcgtcccacgagttactgggtagagtattgtacaacaaggtaatatttctgttgatgacagatttgggacctagaatagaccatatgctgagtaaaaacccactcccactcagcactcagaccgggactttgcagcaaagaattttcttccccactcacaactcaggtaacacaagtgtggatattcgtaatactatggagaatatggataaagaggatatagtggataatatggaggatagagtggtaaattgggtactaagaatgtataatatgaatgtgtatgattatgtgtataagatagagaggatatatacgaagaaaatgttaatggataggaatatgaatttcaatgggatactaaaaaaactatccctaaaaagtaacaagctactaaagaaactctcagacaaatccaaactattcagcaaactcaacactgataccacggatagtgtagtcactgtgtaccctgtatatacagtggacacagtacccagtaacatgtatgatagtctggatgtgggtagaatatatttacatgtccaggagcgactgttgaggaataggaagtcgttatactgtttattaagaagttggtatcccctggacctgatcaagtcacaacaccagtccacaatactcaagtacaaactactacaatatatacaacaattttaccatatccgtaatctattccaatctctccatagtgataagagtaataagagtaataaggttgaccatagagacactagtgagatggttaatgagatagtaaatgagttagtaaatgagttagaaccagttagggttacggataaatctccagtggatagatcaccaatgtatagatcaccaatggatatatcaggggtgttggataaagcggtggaggtccctatgagtgatgaagaagttgatatcatcgacacctttacaatcaccatagcatctgatactcaatctcccacacaacacactaacacttctcttatagagaatactgtgaacactgtggataatatggagaatgtggatagtatggagaatgtggatagtatggagaaagtggagaatacagtggacacagtggagaatagggagaatatggagaaagggtatggtaaggaactgaggaggaagaagaagagaaatgtgaagtatttaacgagtttattctccaggaagttctccaatcttaattccacagactctcaacacttcaccgacacataccacacaattaacattactgatcatagtcacactgttaacaatagtcacactgttaacaatagtcacacagttaacactgtagatcctgttactgtagacaatagtcacacagttaacactgtagatcatgttaacactgtagaatttgttactgtggaccctgaccccgttacggaagaccccgtaacagtagacccagactatgagtacgaatatgtaataataaatgctacggaaaatggcatgaagctgttctcccaacacccaatcactactactaacactagtaacagtgtgaacagtgtgaaacgtaagctgaaattcctaaactatgcaaatggttataagagatttatgaagtttactccaaagtctaatctcacacacgattccgtaggcggtattcacaccacagatccaaccaacaacaccacacactccacacactccatacacaatgtagacaatggtaatactgtagacaatgacaactcagttgacaatgacacagtggagttagaagaagacgtaacgtctgatgaggagatgacggaggagaatgtaaataacatcatgaacgaactaataaaagatttaaacttacaactctaacataattaatataattaatataattaattgttataagagattgacaatttgattaatgaatttgggcgagatgaagtcgtacttgttagttagaattgcagttttaaacttctcaaagtcggcctcactgccgtcacacaacctaccactcatcaaattctcatacatctcatcaactcccaaacactctccaaacttcacttcccacgtatctattgtgttctcagtgttctcagtgttctctactgtgtcccctgtgtcccctgtatcaacagtatcaacagtatccatagtgtctacagtgtcaatagtgtctgtggtattaatattgagatgtgagaagtgttgggagagtgagtgtgtatcgaggaggctgaagagcgagtcatcgagtgcgagtgtgtagtgtgagaaatcctcagaattgtaactttcaaggtaaattttcctgtgtaatttatagtttgacaggtttgaaatgacgttttggataagtagtccgagcaaattgttcagcgtaaaattgaccgaaaaatcgtcactcagcttaaataatctcagtatctgcctcttgttcatgataccaatccttaatatcccattaaacacattcaatactcccaattctctctccaataccaattctctctccattgtgtccacagaatcagtagtttcctcagtattactccttagattcccctctgtgagtagtgttagaggtttagaattgtgtatgcataggagaatactgggaaagggcagagtgggtatgaatatctcattcacatccttcctccccctcacaactttgttactcccctttacaactttattactcaatttattaataaatttattatttactttaataaatttattcttggattttttacagtttagtttaacattttttttaagcattatttttaaaattgttaaaattggaaaagctaatttaacaatgtggtgtggctgaaaattagtttgaataaacttggcgttaatttatccaaatgggaaataattacaacagccgtgagagagcgaatagacacaattctcacagtagtcgcagtgacaaccactccggcaagtctgagaaatcactggaggaaggcgattactggttcaatgacccgaaatataaccaaatcaagtcaaaacactcgagaaacagagagaaattagaacacaattctaggcatagaagagataattacgaccacaatcccaggcatagaagtgataaacacgattacaaaagtgaaaaatatgatcataaaagggataaacacgattacaaaagtgataaatcggactatagaagtgaaaaatatgatcacaggagtgataaatcagactatagaagtgaaaaatacagccgtggaaccgaaaaatatgaccccaaaagagaaaatttagatcacagaagtgagagatatgacagtagaaatgacaaatatcgccgtgaaacggctgaatatcgcaggaacaaacgtgaaaaacacaccaagaggagtagaaccaggagtaaaagtaggagtaaaagtagtagaagtagttcgataagtattggaaacaatgacataaatgtgatggatatggtgagtggtaatgtgtcgtgtgatgaggaggagttgatgaggaagttgattggcgtatccaaatttgacactaccaagaacaagaaacatgaaactattaaccttaaaaccgttaaaaagaaaaccaaacgcaagtacagacaatacatgaaccgaagaggcggattcaatcatcccctctctcccattcaataatatcatactcaccatactatatatactatactactatactataaccttaactagtatattactcttaactactttactatatcttaactactttactatatcttaactactttactatactcttaactactttactatatcttaactactttactatatcttaactactttactatactcttaactactgttctatagtatatatttagtactactacagtactatactcttaaacccagacacataatatactatacctataatactatactatactatatattatatatatattatgtatatgtatagtggtaagagtatagtaggtacaacactatagttaggtgtatactaagataacagttattccagtactatttaacacttactactccttaataaagtcactaaacaatgtaaatagtataatagagttattttaccctgtgttatatggacttaatttaccaccctaaacccagacacataataatatacatactatatatactatactatatacactatagtatatataatatactatatataatatgtatatagtgtatatggtatattgagtgattagattaagggttggtaagagtccattgaccattttcgagattataatgtagagaaggtttataggggtaacgtacagaaattctaattatttttttaaagtagtaaatgaacgatacgggttggggtccatctgtgtatctccaaactactgttccattatgtctaagttcagtgcaactaacatcgttactaggtgtgtatttcaacccagtggtattacgtatctgaattatgtactctggagcattgagttttaccgcttctccctgatcatttctcttgtacagggttagctcaggaggaattatgaaagtcttcacaatataattgggacttcttgaattggtaaatagaattttgtcctcgaaaacgatttcaattcttccactatctatggtgtaaaaaacatggagtggcttctcaccgggattaccgttatatattactctctcaccgtatttaacaagggtacacactccattcttgagagtataaacaaatttaggatgtttaaatgaacaaaattgtatactataatcttcggaactaagttctctactgttcccctcttcttcattaagtagtctgattggtggaattggatagtgttcctccgttgatctattccctatcattatgtaacggataaatttatcctcaaattggaaagtgagcttgtttctaccatcttttgaatactgtgtcaaattctttggaaaaggttgacctggttcacgtttccaaatgattttttcacggtacttgataatgtcaatcctttcccaagagtttggctcattttgatagtcaattctgtaaatatttcttgatttctctgttattttcactctgtccatgtaaactggtattaatcctcccatacccgcagcataatgccttaaataccaaggcttttgagtcttactaatccatccattattaacttttgtacacttaatcagtaggttggtctccaccaacatattatcatctgtcaaactgtacaccaaagtcttgataaagttttttcttctaatatcaaaattgaccaaggtctcaaatcggaactttaccatcatacattctacaccctcaattactctgtatacaaagaagagtatacctgcaattataactaagtggacagtatactgatcactggttaatttaacaaaattgcgaaacccgtccctgcgaaggagttttatcggtggaataacatagtgttcctcagtccaattgccattttccagtttatacacagtgaacttagtctcagttccgaagactataatcttctgttccttgtagaagtcaattgattcaattagttctctggcacaattccttctaaacttcttactcaacagctttttctcaagcttgtaacgataattgttaccattagaagtcgaattgtatccattacataagataattttgtgccagttttcctggaaaagctttagtatagtcctttgtctctttcccagtacttcaattctcaccctttcattcggtaaattagaactttctaatgtcttttcttgaggtattgaacaattttcagatatttcttctgtattctcaagcctaagtagttcagtttgcctgggcatattgaggcttgtagagccaccgtccaccatttctatactgggctcaatagaagttttaggtgtaattaactttctattacacacttttttagccttgttaactgttcccttatcattttgagctcttctctttacagacactggacgctctaccacagcactgacgtgaggattctccaaatccagtctctccatcctcaatttagagaacataagatacatttgattatatctcaggtgaaatgctaaatatttaggaaattccttggcattcgaaggcatggtccaacacaatctgccgtcaaaccagaccttcctacacttaaacccaaatgtaaatacaacaattaattcatacaattccacgtcacactggaggtaattataatctctgtcatcaagatctgtgaaaagtaatttggcaatgtcatatctgagatgagtgacactgtaccactgctcgtgtaaaccattttttcttatgacaaatggtttaccatttctcataatggcgagaaattgcggatatccaaactgaatcacttgctgatacatttttaacaatatttttaataaactcagttagtgtcatcaagacacgttcttatagctagccaattgtaaacagggtttagtaaagttactcttcatactattaattaagtattttaaggcattaatttaagttatttaagccttaattaatgtataaataagcttaatttggtgttatattagtaaatatattacatatatattatatactatactgtatatacatatagtaatatatatatataatatatatagtatagtatattaagtatactaatcccatttatagtcaatttacagcttaattaacacattaaaccaataatttataagtattggtaagaatgtactggccctaccaactccctatgcacctgtttgccaacttgtgctaacacataatcactccatattaactgtaaactttgtaaataaccatgacaaaggacaaatcaaagtacaaagctgaattaatcaatggtaaaccctttatataccgtagaagtacacctcaaggtacttgggaagacattacacacacgagacataacgttgaccaattggaattctacgactatgatctcaatttaaccacagtctcccagtgtgaaacaaagttatctggtctaattttcaggatattgctgaatatcatttgtctgcacattaagctgggagacaagttgatatggaactactacgcctcaaaagtacaagccagcccgttagaactcctatttaacctcaagaaaaacactatgagtttacaattgaggggagaaggtgttgtcaagttaaatatgaatgggtatttgaatgactgggtaaaacctgggagaccactggagaaattcaaaactaaacgaacaataagagatggaccaagggtaatacatctaattgacgacgatgaaaaatgtgatgaaattgtggccagtggacatactcttgataataaaccaaacactcctcacaaagttgcttacgttgtaaaccttcaaactgcagaaaagagggacttcatcaaattttaaccacttaatctcatattacttatacactttctactcttaatcccatttatagttgatttacagtataattaaaccctaaattacagattttgtatgttttggtaagaatgtactggccctaccaactccctactggaccctcccaatcactcaaaataatactaatattgttaattatggctacagaagtacagtataaagctgatcttatcaatggtaaacctgttctctattgtagatatgactttgaacatgcttgggaggacgtaactcataccagacatcagctggatcacctggaactctacgacttgaatctcaatttaaccggtgtatcacagtgttcaacagagttatgtgatacaacttttaagatctcaattgatttcaaatgttaccacgtgaaactgggtgacaaattgttatggagttactatgagtttcctcaatgtggattaccaaaaaaattactatttaacttgaaattgaatactatggcgctgcaatttgaagaaaccattgagaagttaaatttggacgggtatgaatttaatgactgggtggagcctgggagaccgttacagccaatcattactaggaaaaaaataatcaacggtcatattaaggtggatttattctctccctggaacccctgcgtccaagtgaattttgacgaaactcacttctggagacataaacaaggaaatccactcccaatctcactcatccacgaactcgaagattattatcttctcgtattccccgatgcctttttagaatttgatttttatcctcaccgtaaacccttacagatctttgaattctaatctcccaatactatattatatattatataatagtagaaatgttcaagtgtaatctctagatagcaaaaggctaaacatataattactgagtatatttaagggtttggattatactgtgtgatgtattgtgtgatatattgtgtgatggcagtgggtaaattatctactggtatgtcaactttatccagtgttacaacgtcgagttgtgctaagttagcgagagtaacttgattatccacgagtaaatctgaatctttgactgcttcgtaaaggtaatttatcacgctgttgagttgtaatttgaacttaaattccagcgccgtattcactcggaacttcccagcactaaacttcatatgcgtctgacttatcaacctcatcatcttctcatacgataaatgtaaaaataacctcgattgcacttgtgattctattatccttcccactaagagttttactctttttgttacacggggttccgttacggtgttaggtccagcagcagcattttccacatcatttcctacagtattattattatctatagtattaagattgcttgagttatgattacctgagagattggagtagaactctgtgattctctgtagtatggaattggagaggtgtaggtacatttgtgagagattaatcatcatgaatgcgatgtttagattttcagtgacaagttgtaaaacctgtccgtgtggctgattttttagcatttccagcgtggtaaatgctactgctatctcctccttcactctcatctcattctcataaattaactcataaaacttgttcaacaccctgagatttattattattttactctccctaaatttgacatcgtttagcctcagttttttcattaactttttaacgttctttggcttgtccagttttatcgaatttaactcattctccctcacacacaatcgtgatatctccacactgcccacactatttacactatcaactgtgttatccggagtataatgttctgagttgggagtataatgatctgatgtattgaatgggtaattgttggtgttaatttctgggtagtttctattaccgatacactgtgtgaacaaggacttgatattaaaatttccagatgaaaactgccttagaatagcattactttgtgtaatctggttcattattgcttaatattatttataattaatagatctaagtatttattagatctattatatatcccactactatacctattatactaccatacatatacactacagtatattatatatactatagtatagtggtaatagtagtgtagtattacgtgtctgggtttaagagtatagtacagtatttatgtagtattaaagttatacagtaaagtaactctctctccccttatactattagctccctcttgggtatatagtaaagtagctccctttaggggtattagtaagatagctccctctaggggtattatagttatataattaagtagctccctctcggggtatataatataagtatagtaaaatagctccctctccctctcacttatgtagttaattagctccctctcggggtatatttagtatatagctaaattatagggtataacaaagaaatacaatagtgtgagtatattaatgattgaagagtgagttgagatgtaatttattatgtgacttaacgatgatatattcttcaatagtatccttgacgaatagtttataaatgttgacaattttttgttgtcctattctgtgacatctgtcctccgcctgtatgtcattgtacgggttccagctctggtccatcagtatcacattgttagccactgataggttcaatcccacattccccaccttcacacttattaataggattgacacggcgtcagtgttgaacgtgttaatgatggtgtcccggtcagtgagcgacactgtcccgtccagacgcagtaccggcgtaatttcccttaacctcagaacgtgttgaattatgtcaagatagttcgtaaactgtgagaatattaataccttctcatttctttccattatgttactcaggatttccagcatcttctggacttttgtactctcaaaatataattcctcaggtactctggagattagcacatccaactttgtccgtacactcagatccaacgtggtggtacattgtgtaagaagttggtgaattgtgaaatcggagagtgtggtgagatattctgtgatctttgtggtgttgtattcactgaagtctggatgtaactttttgatgaggtgggctatagctgggattaagttatcttcatatattatccttactaataacggatgattacatattcttctcagtttatatattttgttcatctccgttacggtgacaggtcccacggcatcttcattctccacactctccacattctctacagtattctttacatcttccacactctctacagtgtttacatcttctacagtattactattgtctacggtatccgccgaactgtctttaatttcatcctcagtaccatcacccataccctccataatatctacaccagtaccattaataccattagtactattcatagtattattagtactattcatagtattattagtactattcatactattaagagtggttacggatgagtgatagatgtgagattgaaaagtgttcatttggcagggtatgtaattggagtgtttgacgggtaattcgttgatgacatctttctttagccttctcaggatgaacggcgttgtcagcttttgtaacactctcaactctttgcttattatatactttttgttattcttttctattatattgtttatactcgtttttatttcctccgttacggtgaaaggtccagctgcaccagttgtatcctcagacacatcctcaccatctacatcttccacattttctacagtattctccacattctcaccatcttccacattctccacaatattactattatttacagaattactattatgttgattgaggtgttgaatgaaatgtgtgtgttgtgtgaatgatttgacgagagattggttgtggatgatgttgtagattgcgttgttaatgtcgtaggagttgaacacgtcactcattgaaaactgtaacaagttacacaactcgtccatactattctgtatcggcgttcctaacacattgtgaacacttactaatttcagtttactcataattagacttaatttacccttaattagacttaattagacttaatttagtcatattttagtgattacagtatttggtactgtaatacagtactcttaactatataactatatacccctagagggagctaatttactatagttaattttataccccaagagggagctaataatataagggagagggagctaagtaatgaataactatgtgagcgtttgcaagctccgtaacggagaaaggtccgctaaaagggttaaataactgtaaaactagagctcccggagggataactaagaacccccgaggggaactaagtagttagggggataactaagaaacccctggggagtacaagccccgtaacgtaccagtgagaagaagtttatgattgaattggcagttgtaaagctttttataagtgttagagttggagtttttgatcaagtgcgcctcgtcaattatcaaatactcaaaaggctgcaaacgcctcatcaatcttatatcatcattcatcattccaaacgtcgttatcattactataaacccatccactctattccctgagtttacagtgttcccagagttcccacggttagtagattgttgatggtgcagattgagaaggtattggatggtgttgagtcgttgagattgcgatccgtggtagatgaggatgttcttaatattggtccagaccctaaactcgttataccaattatacattatgttcaaaggcactattattatatacatccgtaatcccaccgtatcatcatcatcaggtgtgtctgtactgtcaggtgagttagtatcagtgtgattggtatccttaggtgagtcagcggtggtgatagtgttgttgtattggttgtagaggtattgtaggaatacgcacacttgtactgtcttaccctatacacattattaccaactatacaatatataagtgaatagtatatagttaagtaaatagtatatagttaattagctccctctaggggtatatattaattagctccctctaggggtatataataaagtagtaagatagctccctctcggggtatataataaagtagtaagatagctccctctcggggtatataaggtagctccctctaggggtatataattgagtaatgaataagtagtgaatgaagatgagtgatagcaagcaccgtaacgtactaatcccatttcatctgcgagtatggctgaggagagattggatttatgaatgattgatagccagtgtacgccacactgttgataattttttaacttgtggaattggtcgatttttttaaactccgccaagtcaccaaacgtacgcgttatcttcacacaacccacgtcacacatcaacttctcattacacatctcacacagtaatctacccagcaaattctacaccattattacacacgtttacgtagttaactaaatttatcaaatttttcataaaataattgttaaatttgggtaaaaaaaataaattgcaaaagttgatcgggttgggaaaataaattttctcaccctccatttctgctgcttcaaccacttatttacgaaaaaataattgtaaataataaataaataccaaaaggttgcaaaaactgaataaagtggggataactgtaaactagtgtaaaaacgtgtaaaaggtacttgtgagatttgatagaaagagtgtagcgattctagtgatagtaaaacttgttttttaatacgtatttcatctttactctcggtcctctcatcatccgattctaaaaacaattaacattaataaataattaattaattaaataattaattaaataattattaactgagtaaaaggtacctgagaattgtctttgtttgagttttcgtttcttttttgttggtgttacgggttcgttttttccctcttccattatgtaatgatttgttttatcattttacgacaattttttaaaaataaaatcattttaaactgattttccgacaattattttacacatttttacatattaatagagtttagattaattaattttcacaatttcatcatttaaaaatttaaaactgaatttaaaaaagaaaatattttacaaatgatattaaactaatcaattagatcacaaaactgataaattaattaatatttacaaattaattaatatttacaaattgaattaaaatttacaaaatgggataaaatttacaaattgagctaacattttaaaacaagactaaatagaacaaattaaggtaacaattctagtttaaaaaataaatttgtagaatttataaaatttggccttgtagtacacccccatccaagctaaatacgattaataattattatatttattttcatacctcgagtttttttaaacaattttttatttttattttattatttgtagaatctccaagaattttattttatcccctcgaaacaccacagaattccgtaacaaactttactcaactaataatcaaattaataattaaattaattaataaataataataatttagttaataatttgatagtgtgaaaatttgtagaaaaatggacaagggaatgtatttggtgtttaagccgagtttgaagaaggagtctgaccgtaaagctcagttggcgacaattcaggcttctaaggccttatctgacattgtacgcactactctaggccctcggtcaatgctcaaaatgctcctcgatcccatgggcgggatcgttatcaccaatgacggcaattccatactacgcgaagtatctacacatttttacctatccccattatttactaatttgcaacctttttggtatttattttacttttgttaattattttttggtaaataagtggttgaagcagcagaaatggaggaaaatttcctcggtaaaagctagcccgatcaacttttgattttatttttttaaaccctaatttcgaattatttttcaataaaaatgataaataataatgttaattggtgttgtagatagatgtgaataatccgggagcgaagtcgttgatagagttgagtcgtagtttggatgaggaggttggtgacggtacgacgagttgtgtgattttatgtggcgaattactctccaattgcgcgtctctcattaaaaaggaaatccatcccactgaaatcattcaaggcctcatggaagcccttgacgatgctctcaaagcccttgataacatttccatcccagtcaacatcaatgatcataacaaattattacaaatcatacaatcaagtacgttacggagcttgcatccacattagttatttattacttagttattatcccaatgggactctttttgtccccttggttattatttacttagttatttacgcatccccactatttctcattttgcaacctttttgtattttattttattttgttaattattttttggtaaatgtgtagttactgcagcaagattgattaggtgagaaaatttatttctcctaacccgatcaacttttgcattttatttttttagcccctaatttgtaattatttttcccttaaaatgacataattatattactttaataattgttgataggtctgagtacgaagtttagtaatcgttggggtgacttaatttccaaattagctctcgactccatcttcaaactacacaaatccacacacaaccgtaccaatggtacaaattgtacaaatggtttgaatggtgttagtgatggcttacctgacgccgtaaagccgttggacataaaaagattaataaaggtagagaagataattggtgggtatattgaagattctaaggtgttagacggcgtggtagtgaacaaagacgttgtccacgccaacatgagcagacgtattgagaaccccaggattctcattttggactgtactttggagtataaaaaaggtgaaagtcagactatggtcgacatctacgacgaatctgtctggaataaattacttctacaggaagaaactgaaattaaacaaatgtgccaatacatcatcaattccaattgtaatctcgttgttaccgagaaaggtgcgtaacggtgcttgtactaacagagtttagttatttttctacagatagccaccccaatgggactcttactaacccagttacctatttacctatccccactaattactattttgcaacctttttggtatttatttattttttgcaattattttttacgaaataagtggttgaagcagcagaaattgcgggagtggaaaatttatttctcctaacccgatcaatttctgactttatttttaaaatcatgaaatttacaattaaattttacataattatgataaatgtgatgtataggagtcagtgacttagctcagcattatttggtgaaggctggaataagttgtctgcgtcgtgtgagaaagagtgacacgaaccgcatatccaaggcttgcggtgctacgattgtgaatcgtcctgaggaaattactgaatccgacattggccaccgctgtaaactattccacgttgataaaatcggcgacgaatactattccttctttgatctgtgcactgatcccaaggcatgttccattctactcagaggatcttctaaagatgttttaaacgagattgaacggtaccgctttacggggcttgtactctactcagttattcccccaggactcttactcctagaactcttactccttaccatatttactcccttcttacacatttacacatatttacacactactgtgtcttatttcgacactatcgtgtcttatttacacatttcttgcacacttacacacacatttcttacacactaatttacacacttacacacacatttcttacacactaatttacacacttacacacacatttcttacacattttactcatttacacattcttacacattttacccatttacacatttcttacacacttacacacttcttgacgatatttactctttccttataatatttactgagttatttagtgtccacttgattgatttgtagaaacttgtatgatgctttgagtatttgtcgtaatataatttacaattgtaaactattacccggcggcggtgccaccgaagtctacatctccaacttcctcaatcaacaaatctccagtacccacactattacactaatttactcagttacacactaattcagttacacattgtgtataattatgtataattgttaatgatgttgtagggaaggtgggattgaggcggttgagttacgagtgtgcgagtaaggcttttcaggttattcccaagactcttgcacagaactgcggagttaatccaagtactgcgttgcgtgcaggcaattcctgccgttccccactgcaatcttagttactcatttactccctagggaactctatttactccctactgggacttcttacttaactatatactacttacctaattatatacccctagagggagctattttattatatacccctagagggagctattttactatatacccctagagggagctaattaactatataactatataagggagagggagctacttaactattagtaataacaattctgtagtaaagttgatgagtgatttgttgttgatgcatggtaacggtgaagtccacatgggaataaacggtgaaactggccaaatcatcaacgtagttaaccacaacctctacgatatcttcctcgtcaaatcacaaatctacaaatcctcttttgaatctgtatcacactgtctactgtgttactcagctatataattaatagtataatacaatatgattgatataggcttgtatgttattgaggatagatataatagtgagtgggatagggaagcgtgaagaaactgtggacgataaaattagattaaacgaacaagctctagagaattaatcttttacttcattttccacattatcctctatatctgtaggtttatacttcattttatagtgtttggtgaataattcgaggtatttgagacatgtaatgtttaacctggtctcgtcaccaaatggtaatttcactcccaatttctctatcacaatattaatactatagtaagttatgatagtacagtgaatagtacggatcccgggtgaactccaaagtcaagcggagattggcccggatagtagtagggtgggggactgccaaggggagctaattacctaactaatactataataactaaataactaagtagttaataagcaactgagttagtgggattcctggggacaaaaagagtcccatcggggtggctatctgtagctacataactaagtaataaataggtaagtgagtacaagccccgtaacggacctaaaaacttccttagtaatttcatggagatgtttaattcattggcgatttgatgtagtgagaggttggtgtaaaagagttcaatttcagtagggtcacaaatgttaagaaattgtaataaatcccaaatcgcagagtaacttattattcccctcaactccctagtcatgtctatcggcacatacgctcccaatctacaacacgcatctcctaatcatatttccatctttccacaatgtgtaaattgttaataatttatgtatacagtaaagttaactgtgtaaatatgtaaatagtgtagaaatgtggagatggaatgggtggagggagctcagtgcagtgtgaccaagcaccgtaacggaaacctagaaaatcaattgaaacattaaagcgttcactaatttcctaaataatataaaacaaggtaaaatatttaccggaagcgtttgttgatgtattccgccctcaattgtcagatactccctcttcaacgcatccaactcattaggctaaacattattatagtactgtaaaagttatagagtaaataatagtaacagtgtgatacggaggtgacagaagtgatggggaattttttaacgtaatcgtcttgtaaattaaatgtccgcggtatcaaatcaggcaactttattactacaacattatcacacagtaattgtttataagataaatttagtaaaaaataattgtaaatttcacgattttaaaaataaatgccaaagttgatcgggttacgatttaccgaggaaaatttcctccatttctgctgcttcaaccacttatttaccaaaaaataattgtaaatagtaaaataaaataccaataggttgcaaattgtagaattggtggggctgggtaactgggtaaagagttacttggttttgacatttcattgaagaagtcggtatcgtaaatgactggcgcttttttaatttcttccaactcttgcttgtccacctcttcctcatacaaatccaagtccaagtatcccacctaacacacagtttacacactatttaactaagcatatagggaactaaggagtaagtaaatagagtaaggggagtaaatagagtaagagtgagtaagagggagggagctggtgccccgcagtgacgccgtaacggagtaccggatcggtatagaactgaatgagatcgaagataatttctaatcttttaattcgaacactaatgtcatcactctcctgggtcccattcaatacctcaatctaaaatgaatttactcaatgtgtttctaccatttcgtaaatgtccttgagtttatttctggtaatttgtgagaggtttgtattttccggtgttaattgctgcttcactattctctcataacgccaaccctcctcattctcattcacatatctcagtctatcacaccatcaactttgtttactgggttatagataactaagattaactaagtaactcagttgatacgtttcgacgagagtttgtttatcgtatgagcagcggtatccacgattccttaactcttcttgtaactcctcatactcaaatctatcaacaattactatagtattagttatctactgtagttatatagttatatataattagctccctatggcagtcccccacctcactactatccgggccaattgtcgcttaactttggagttcacccggattatacacataccaattgctctattctagctatttactgagtaaattctataagtgtgtaactgagtagagagtagctccctatggcagtcccccgcctcactactatccgggccaattgccgcttgactttggcatttatatgggatgtgtactattcactgtactattctaactatttactgagtaaattctataagtgtgtaactgagtagagagtagctccccgtggcagtcccccgcctcactactatccgggccaattgccgcttgactttggcatttatatgggatgtgtactattcactgtactattctaactatttagtaagtaaattctatgagtgtgaagtgagatacttttcaatatcgtcggagttgaagattttgtatcctttggtattggttggaagtgagcggtagaaagtgttttttttcttctccttcagctgtcgcaagtgtctcaggaactttctgtacttcatcgccttttccaactttagcttccgcaactccttcacaaactttttattcctattcaatctctcatatcgctcccacctagacaactccacactgtccacactttcaactgagttactattgtcaactttatcaactgtgttatcgttgtcaacagtattgacagtgtcatcgttgtcgacacggatcttatgtttgagacgttgattgatttgtggaaggtagaactcattttcatgtcgttcctctcccttactgtagtcgccaacactaaacaactttccaacctctatctcatctcctatacaccatcataatattatatagttaatattatatagttaagtagctccctctcggggtatacactaaattagctccctctaggggtatataataagatagctccctctaggggtatatagttaagtatagttagatagctccctctaggggtattagttaattagctccctctcgggtatagtaagatagctccctctaggggtatagttaggtatggttaggagatacggttttcaaggggtataacaggtttctgtacaattgcggggattaactctagagtacttttactcttatattccggtctcacaggctcatactcactttcaaacaactgtgtaaccacgtcctcagtgttattatccgagtcaacagtgttagcagtagtgttatcagtgggaggatagactgactggaaggtgatgtcatttttgggtaattcgtactctttactttttcttatcagtctttgcacattattgtacaacttcttatcctcgtccagtttctccaactaccacaattcaattaatataataatttaattaataatttaattaataaaattagataattggttgggaacctgtagttctggcggtagattcttgtaatcttcctcatttatgaagttttctacaactttaattagcactaaaattaactataggataggtaaaattaatggtaaagttgtgagtacctatggaatctgagtgatttggtagtggtgtaagattttgaaaattttggttaaatttaacacttgtgagaaaagtaataaaagtaaatcttgtcccaaatttcattaaaaaattaatgtgtaaattctatcgacaccattttcttgggtctcattcttccaacaactttttaatcttacaattgttcattttacaattgcgtagtttggggaaaaaatgtatttgacgagaaaactattaaagaacataccaattccaaaatttacacaaaatcggctcaaccgaagggtaattccctaattaacataattttataaattatacaatattaatgttgtagaataatatggcggaacaggacagggcaattttttattatactaatttaatttccattctcattaccactctacccatcgcttatcttctcaaggtaccgtaaacccagtcttcctcccatatacttaattatacacttaattatatagttaattatatagttaattatatagttaattatatagttaatagtatagttaattatatagttaatagtatagttaatagtatagttaatagtatagttaatagtataagggtataataatgtattagaagaactattggagtagtgaggaccagatgaagatggaccatgtattaagtcacttatcacctgaattaaccgaattctcaaacaaacaactaaaattttaaccacaccaatttaattatttttaatcttttcacatccatatctgttaaatgttatttttcgtactaacagatttgggtctcgatcccacgaccaacaggtattcaatagttactaaatatattacaccagtataattaagagtattatatacacaatattatggatagttatgagtatgtaatgatgatgataataggattgcgagtgtgtatgataggcaacgtgcccgagtggttaaggggatggcctgctaagtcattaggttctgcctgcgcaggttcgaatcctgccgttgtcgtttttatcccacgaaattctaaccaattccaaacaattccgtaaacaaattaaagaaaataaataaatttaaaattgaaaaataacttaatttattaatattctccataatatttatggaattccctgaatacactggaactaatggaaataaatagtaaagtccagttagtatataataaagaaaagtgacaataatagtaaattgttgaagatgtagtgaaagatgagaaattatgaatattaattccccatgacaccataagggtgtgtgacgtttcttcctctccttttaaatacttttcaattatcatttttttaaattaaattattaaattgtaaatattttattataattttatcttaaatttgtacaataaatttgttatcttaatttgtacgataaatttgtaattttgtaatcttgagtttgtacaataaatttgtaattttataattgtgtggagaatttgtataattgtataaaaagtgtatagtagcgaatgtgaggatgagggaggtgattagtattcatgttggacaggccgggattcaagtcggaaacgcttgctggtattctctactgagctttctaccactattcatttagttcctcagttattcactccctgagatcttatttactcagttataattattatatttattattgtaatgtgttggtgcagggagttattttgtctggagcacgggattcaaccggatggtaacatgcctgaagataaattatactccaatgatgatgcatttaccaccttcttctccgaaacctattccggaaaacatgtaatcttactcaccctcactagttactcagttatttagttatatatccccatttattattaatttgcaaccttttgatattttatttacaatttgtatttattttttggtaaatgtgtagttactgcagcaatgtggaaaatttccccggtaatcctatgaacaggtgccccgatgtatatttgtggatttggagccgagtgtgattgatgaggtgcggaatggcgcgtataggcatttatttcacccggagcagctgattactgggaaggaagatgctgctaacaacttcgctagaggacactacaccattggcaaagacattattgaaattattctcgatcggatcagaaaattagccgataattgtacaggtcctcctttacggtgcttgcacttagttatttattagttatttctacagagttagccaccccaatggctctctctttgtccccccggaaactcagttatctattacttagttataccttagttaccttaccccaccaattacagtatttgcaacctttttggtatttatttttattttacaattaaaatttggtaaatgtgtagttactgcagcagaaattgatttacggagaaaatttatttctcctaacccgatcaactttgacgtttatttttaaaacacatttttaacaattaaactttaaaattttgataaaacaattgatttgtaggattgcagggatttttaatgtttaatgctgtgggtggtggtacgggtagtggtttgggctgtttaatattggagcggctttcaattgattttggcaagaaaagtaaacttaatttctgctgctggccttctcctcaggtctccactgccgttgttgagccttacaactccgtactctccacccactcattactcgaacacaccgacgtcgccgtcatgctcgataacgaagccatttatgacatttgcaaacgcaatctcgatatcgaatgccccacatacaccaatcttaacaggtttgcgttgcggtgcttgtactcactcacttatttattacttagttatttactacttacctctcccagtactacttatttattccctaggacttattatcccttacataattaagactatttatacagtattaatatattctaaatagtctagctgatagtatactattgctattagcctaggatgtgggttcgaaaccccttcctgaaacatactataacaccagactaatcctatttacagattgatagcccaggtaataagttcgttgactgcgagtttgagatttgacggcgctttgaacgtggacgtgacggagttccagactaacttagtgccctatcccaggatccactttatgctctcatcttacgcgcctgtgatctcctcttttaaagcctatcatgaacaactcaccgttgcggaaattaccaactctgcatttgaacccaataacatgatggccaaatgcgatcccagacatgggaaatacatggcgtcatgtattttgtataggtaccgctttacggggcttgctcccaactatttacttacttattttccacagagttagccaccccgatggctctctttttgtccccaggagtacttagttatccctcctgggttcctaattatctagttatttacgtatccccattatttcagaatttgcaacctttttggtattttatttttatttacaattgttttttggtaaataagtagttgaagcagcagaaattgcgggagaggaaaatttatttctcctaacccgatcaacttttgcattttattttttttaacccaaatttatcaatatttttcaataaaaatgatacaatagttaaataaccttgtaatctgtgtgatagaggagacgttgtgccgaaggatgtgaatgctgcggtggcgaatataaagacgaagaagactatccaatttgtggattggtgtccgacggggtttaaggtgggaataaattatcagccgccgacggtagtgcccggcggcgacttggcaaaagttgctcgcgccgtttgtatgattagtaactccacagctatcgccgaagtgtttgcacgcatgaattataaatttgatcttatgtacgcgaaacgagcgttcgttcactggtacgtcggggaaggcatggaagaaggcgaattctccgaagccagagaagacctcgccgcactcgaaaaagactacgaagaagtcggcatcgacaccttacaatcttaatttcaacttctcaatttactcttatttacacatccccattatttactaatttgcaacctattggtattttattttaatttgctaattaaatttgataaataagtggttgaagcagcagaattggatgggtgagaaaatttatttctcgtaacccgatcaacttttaactttatttttaaaatcaattattttgaattattttatgaaaaattatgataaaataataattaataatatttatgggagtgatgtgtataatttgtgactgggtaaaaaagttgttggactattagctgaaaaatcaaattaagaatatttgtaagattaattaattaataatatcgttgttgtattgtggaatgtgataaaactgcgtaaaaagttgtatatggggtgtattattgattatttattaatttatttaaaaaaagatgtctgtcaagaaggttggtaatttagttcataaacgaactaaaaaattcagaagattccactccgatcgattcaaacgcctcagagtaaattcaatttattttcatcaattaaattattttattcaaattattttaatttattaatttacttattttaatttaaattattttaatttaattatattaatttgattgagtaaaaaatttgtagacgacatggcgtaagccgaagggtatagataaccgtgtgaggcgtcgttttaagagtacagttttaatgcctaagatcggttatggcacctgtaagcgtacgaggcatcagttaccgggcggagtttacaaagttgtagtctcaactccagctgaagttgacgccttgctgatgcataataagactcacgtggccgaggtggcacatagcgtctcggccaagaagaggagagtgttactcgacagagctgataaattaggcgtcaaagtactcaacaagaaagctaaactcagattacaagaaaaagaataatctcgtcaacacactttgtactatttagtattccatagtattacaattattgaacacagtgttatggtagagtatagtactattacagtatagtaaatatgtataatttgtgatatacatttgggtagcggaaacccagacacacccctcaagttgtaacttatcacaatattaaccgattaaacggtttaaaatatgttattcaagtgttaagggttaaatagtgatttatatgccataggtatacaaagtagtgtaggcatatgtgtatattatattgagggtatgtttacaaattttaaaacctcaaacaactacatttagttgaattttactatagtacagctaaacttaatttaagtttttaaatgcgattcaactcattgtaacccaatgagtttgacaaatatttaatgaattctaagaactcaagtgtacaaggagatttcttaggtgtcagtctttgaccttttaacattatcaacgtctagttgaatcctctggaggccttctagcagatgaatcctctgccggccttctaccagatggatcagttgtaggccttctatcagacgaatgtactgaaagatttataccatgtgaaacacctgtagaacttgcattagatggatcaactgtagcactaccatcattggcattggggttctcaccatttctcttactggtgatgtcgatccagggcttctttctgccttcctttttaagaattatcactttatcaccaagggaaatactaagttccttttttttatcacccagatccttgagaaacaccccggtggcgtaatcatctttagccgtccaaacagccttgttcctcttcacaatcttagaaaatccatgaccaggtttaggattaaatgttgcataattaccatagtcagagtataggcaatcattagtgctcctggtcttcgtaatatcaagagtaactggttttaaattagttccactagatttggcggaaggtgtagttgttccactactgggagtactagcctgagttcccggagaagctcgaagagagtttgctccacttgattgggatttatcaacaccatcagcaccatgtgctgatttgtagggacataacaacactaccaacagaattaatttaacaattttcatctatattatctaatagttatttatgttgttatgataagattattagaattgcagattctcattgctattcctagctagagaactgcacctcgttcttccccatccatattctgcactcatcttattttcataattttctacagtatttacgagttcatacctcttataccatccagcatactcataccatactatacacaataacaatagtatacataatagtacagtattctaagtgtataatatataatagtatagcattctaattctgtagataaggtgtagtatagtattctgtgtataatttgggtggagataagtccccggaattagactataccaacaccaacaacgccactaactatagtattatagtagtattagtacagtataggaatgagtattaagtattaagttatgttatattacattgagtgtacacttacaaatttaataactcaactacatttggtgagatttactatagtacagaagaatttagtaagatatggtacaacagcatttagttaaaatttatgaataattctaagaaatcaagtgttcatgtagatttcttaaaaggttaagtttatggactggatcaaccctgacctgttgcaggagtagttgtagaagctccggttgctggttgtgaagctccagtaccagtatgacctcctgaagtagttattcctgatccaggagtagttccagatccagctctagcagttgtagcagtagttgcagttccagtaccactctgtcctccttcagtagcaccagaaccgggagtagtagctccaggagtagtagatcctgtagtagttgacttgttaaaatctagtttcttagtttccttcttactattaattaccgagaattcgtttgaaataagcccaagagcaagtgactttatctctttaaactcgtcaccctcagtacttttccaaatctctttatctccaaacattatctttctacatttaactctatcattaaatgtgactctatagggaaagaatgcgatagtaacctcgtagtcagttttctttagctcggcatcattttcgccatagaacttcaaccttgatatgtcatgtctcttactggtgatgtcattcaagttgttaccttgcttgtgaataagtacaaatttaccactcttaaggagaatggcaatatgcttttttttcttacgtgcaccattgactaccaccttgaccgcgttatcgttaccaccaccagtccaaatatctttatttttgctcactatcttagagaactcacggccatctttggcggtatatgacctaaaatcaccagtcttgtagaactcacaatcattagtgctctgtttcttctttatgtcaagcgtaacagcagtaacattagtcgctccagcgccataggccgatttgtaggggcatgatataaggattgcgatcaaagctaatttaacagatttcatctcacttactattaactaattcatatttatcttgttaagattatcatcgttacaatcccaaattatcattcctattgctaattaggaaacaacaacttcttcttccccattccttaatctgcattcacagtcctattctctttttctgttaccaataagtccatatcggttatgttacataattttatatattatataacatacaaaatgcgtactatagtaaattcttacattaactatactatactttattaagggtcctttcaataatttagaactcacgaactactcccctaattatacttattctagtattacagtatggtatacactgtaaatattatatattatatagttaatattataaattaaagcgttagaaatcttctttaaaaggtctcttaggagtgaaagtatattgatatttgattaaaatttactatagtacattaaaatttacgaataatataagcaaatcaagtgttcatggagatttcttatgctaagtggatggacttgatccagtctgaccacctggagtagtagttccagatccttgagtagttccagatccgttagaagtcccagtcccagtctgaacaggagtagctccaagttctagtttcttgcttatattatattctttcctcacgtagaattcgtttgatccaagacctaatgaaaaagcctttatctctttaaaattttcatcgtcagtgtgtttccaaatgtctttaccctgatacgtgatctttttacagttaactccatcattgaattttactatataagaaaatataaatccaatgtcaattttgtaatctgacacactgagctccttgtcaccctcaccaaagaacttgactttagaaacatcgtgcttggtggaggtgatgtcattccagggcttattcttaccatccttataaagaattgtcaacttaccactcttaaggaacaaggcaagatgttttttactactacctttgccctggactaacactttgacggcgtcgtcattatccttagaagtccaaacttcagagtttttgctcactatcttagaaaacacacgattatctttggcagtgaataatttagacgtatcaagatcggcgtagtcgaactcatccgtgcccttagtcttctttatgtcaagagtaacagtggtaccagttgctgcaccagattcagcagcaggtccagttccactagtgggagtagcagcctgagttcccggagtagtaccagctgtggcaccaggtgacgtcgtttgagtactaggagtggtagccctacttgttggagtagtttggccggttgtggttcccgttggttgcgatgacccactggtatcagcgccacgggctgatttgtaggggcatgataccagaactgccaagagagcaaatttaacaaacttcatttttattcttattaactagtagatatttaagctgttaatttgagctctattctaacttcaaggtaccattcctatccctaattagcaaacaacatctcattcttccccattcgccagcaatagttcttattcctatcctcttcttagcttatttataaatttagattactcgtattaaacctgtacataatatataatatacccggagtatattatcatacatgcgtatgatggagattgtatagtgtattaacgtctcatttgatgattttagaacatataatcaactctcctgattattcttattctactattacaatgtgttaaacactgtaaatacattatatagttaatattacaaattaaagtgttagaaatattttttaaaactttcatctttcagaacttgctccagtatttagttaaaatttactatagtacattaaaatttattaattctgatttggaacaaaaaataaatcacagagtacgagaaccgctagtatattcatagtttacagttataaatgggaaaacaactttgctcgactgtatttacagtgtttatgataatatggtaatccatttagagttacttcattagtttggtgaatcttttatatcgtccttttcttttctgaaataaaagataacagttacgaaagtaaactgtaatttccctcttaaggttaataaaaattcctttaggataatcgtcactgggctttctttgccaaattaaatctttatcaatcataattttaatgcacttaacacctggcatgaatttatatttaaaagagccttcataggtgagattaagataataatccttatcagttatctcaacttctttaccttttgagtcttttctgcacattttaacgtagtctggaaatttgcgtggatttactctccacgtgtttttatcctttctaatgaataaaaatccatcctgacgttcgaagattaggacatttctaagtttataataggtcaagtatttacaataatttttcccaggtatatgtttgtaagctgttataccgtcacaaattaactcttcaagttttcccctgaatttatacttgaccactttcggaccacaccatatcattttataatcatctgacgccatttccactaacttaccttcgggatttttcccatataattttattgcttcacttgttttaactcgtttatccacttcagatggaagtacatcatctgattcttcaggttctggtggaaattgtacagtggtttcagttacctcaaagttgtcatcttcatcagtatcactagtgatatcacgttgttcaggtttgtcagcacagctgacagattggataagtatgagtataattccacatgtataagtaaaataaatttccattatataatttatttatattaatgaatgggggatctggaaatctcattttaaacttctaaatatgtaaaatattaattataaattaaccagacatgctaagtataatatagtaaaagtttgtatattatcttttttttcttggttttctgactgataatttgtaccggtggcttttaaaaaatatgagataatgattatcaaaataaagcacaatatcttttgacaaattaatactaacttcagatgggcaaggtttgttaatctcctttttccaaagtaatttacccctatgcataactctatgacactttacattcttcttaaattcatatttcaagaaccctttcggaccaaaagttatataataatcaccttcgtttagttcaaaatctttacctttatgttttgtgtaaaatttaagataacccgagcgattccgtaggtatactctccacttcccctcttcgcagcaaataaagataaatccaccgacatcttgcattgtaaacacgttatgaggtttataataagttaatgttaaggtataatgctttccaggtacatgctcaaaaataacttcataattataaagtatcatctccaaacttgcctgaaacatataaactattctatacgaatcttcagacgtaactttatagtctccctcttccattggtaccactattccattttcatcttttttcataaaaattatttggatagattttttaatcacttccacatgctcaggactcccggatggactttttggcggagaaccctttgctgaagtctcgggtggacttttgggtggagaaccctttggttcagaagtctcaggttgttcagtagattctgtaacatcaaaattatcttcttcttcactatcactgtatgataccaggctctggtcgttatttccaggtttatcggcacatctcacaaattcaatcgttactaatattattagataaaattttatgctgcacatggattcattataggataaaagtgtattttcggtgggggatctggaaatttaaaacttcacacacatcaacgttgagattattcggttattattcagtaaattacgttacaaaagttaaaatatcaaaattttacattatatagtacaatagttgttagtcttaaataatagtaaatatgtataaaatagtcaacttaacggagattatcacataccaagtatacgtaaattaaaaattaacgtgtgtttatataagttaaagcgatagtttatgttatttggtgattattaaaacacttcaaatattcccaaaattaagctctaatggaacatgttacagtagtattacaatagtatagatattattattcagaaatatcagacatttagcacattttctttggatttacaaatacttggcacgggtaactttagaattctttattaatctacctcgatttcaggttgagatttttgattaatagtattagcagacttgagattcagatttttaaccgtattatcatggttaatagttgttaaattgttacttttgagatcaagttccttaaccacatcttcatggttaatgattgttaacttgttatttttgaggtccagtttgagtgacttgatgggtccaaatttggggtctccactgggattccagacgatcacaccatcatatttaatcttgtgacactcggaaccaggattaaacctgatttcatgggattgatcgcccgggatatatttgaatttaaaaaacgtgagttggttgtcattggcagtgaggaacttaattttgaagatgttagggctagtaatatcagtccaatctccattggacttaatgaacattctgaacttgtcggtaaggagaatgattaaaaagtcaccgttggtaccgaccatagttccaaacacattcccatcagattcccagacaagtttcttgtcctccatgaccttgttgaacacgttgccagatttagcattgaatttatggaattcagcatccttcctatagtcatattcagctgtgcttgccttcctatcaatgttaagagttaccttgttagcagcagattgggcagtagtacttgctgctgctgtggtagttgcggttgctggtgtggtagttgtggttgcagttggaccagatctggtcccagttaaattcggtacgtcactactataaacaccacggcctgatttgtaggggcatgacaataccaagaagagaactaattcaataattttcatcttcaccaatattaactagaagatttttatgtcaattctattattataattacaacagcagattatcattcgtatttctatccagagaactgcattacacattcttccccattcatccatctgcattcacatttttatcgtagttttttcttaacatttagttctcatagattgtatttcatagttgtacatattatataacatataatatgcgcaatgtgtagtatgatacaggcgtatacagatggtagtgtgttaggggtcgtttagtcaaattttaaacgcataaattgattaattatactttatttagggttatacgatactttacgctgtaaataatgtatataatatagttaacatgtatgaatgtgttagaaattagcttaactacatttgagattttctatggtacattaaaatttatgttagttttgaaatgagttaaatcgttgaatgacaagtattgagcgaataattctgagaaatcaagagttcatgacgatttcttgggctaaattgattgatcagatccagtctgatctcaggcattagtagtaatagcaggagtagatttagtctgacctcttgaaggagttgtagtagcaggagtagtagttgttgtagctccagtagtagttgtagtagcagcagaaccagctctaggagtagtagcaggagtagatttagcaccagttgtaacagtagtagcattagttgtggtatttccagaaccagttctagcagttgtagcagtagtagttgcactctgtcctccggaagtgggagttgcagattttgtggttgactttttcacatcaagtttcttgtgttcggtttcacttttgagtacgtaaaaacagtccgattcaagatcaagagtaagtgcccttatggactcaaaattcttatcatcggtacttttccaaatatcttcacctcccaattttatcttcctacagctgaccgaatctctgaatttgatactgtagtagtgctccaggatcgtaacttcgtaatctgacgaagtcatctctttatcattctcggcatagaacttcaactttgatgtgtcatgtctcttgctggtgatgtcattccaaggtttattcttagcttccttgtacaaaagtacaaacttattactcttgagaagaatgacgagatgtttctttttatcaccagagcctttgagtacgacttttacagcttcatccttatccttagattcccagatatcatttttattcttcactatcttagagaatgacttgttatctttagctgtgtatgtcctatagtctccttccttagagtactctgagtcgttggtagtgttacttttattgatgtcaagagtaacagagttaccagttgctgcaccagattcagcagccggtgtggttccagtagctggagtagctgcctgagttgtatgaccatttcgaccagttgtagttgtttggacactaggagtagatccaccagtaccctgggttccaggagtagtttggccggttgtggtttcagttggttgggatgtaccagtggtgtcactggcacgggttaatttataggggcatgatcccaagactgcgataaaagtaaatataacaaacttcatctctactaatacaaactagcagatatttatgttgttaagattatcattgttataatccttaattctaattcctattcctaattaccgaattactacttcttcttccccattcattcgtctgcattcatcttcttttcctgggtttcctcgaggaattagttcatattgactatactacatacttggatatattatatgatttacaaaatgcatattaaaatacattcttacattaactgtactatactttattaggggtcctttcaatctttttaaaacatataagttactcccctaattacacttattctagtattatacgatactttacggtgtaaataatgtataaaatatacttaatattataaattaaagtgttcgaaatcagttcaatcaactacatttattaacatatgttacagcaacatttagtgcgatttatgaataatctaagcaaataaggtgttcatgtagatttcttgggttaagttggactagctccagtctgccccgaaggagtagtagtagttggcttagtaaattctattctcttgtgttcgccgtaattgttcataaggaataaatcgtttgagtcaaaatctactgaaaaaaacttgagatttctaaaccttgcgtcggaatcatatttccaaatttccttatctcccaactttatattcctacactttactccatcattgaattttactatgtaagaaaacataaatccaatgtcagccttgtaatttgacgaatcaagttccttgtctttgtcgtcatagaacttgaattttgttacatcatccttggaagaagtaatatcggtccatgactttcctttaccatccctgtagagaactagaaacttaccactcttgagaaacaaggcaagatgtttcttcttattacctttacccttgagtaaaacttttacggcgtcatcattatctttagatgaccagattgcagacccatttttaccaacgatcttagagaataacttgtcccctttgggcttgaataatctacaattaccacgctcggagcgttcaaagtcattggtgctattattcttcttgatatcaagggtaagtccagtaccagaagtggtggattgatctgttggcgaagtttggtcagaactggactcagttgtctggccagacttaccaccacaacaggcgctatgagctgagtcatagtggcatgacatgaatagtgcgataaaagttaatataccaattttcatagtattaacaaattcatatttatcctattattattatcattgttacaattggaaattatcattcctattgctaattggcaaacgaggtaatttattcttccccattcgttggttagaattcttattcttatcctcttcctagcttaataataaatttatattacctgtattacagctgtatataatatattatatactcagtgtatattattatacatgcgtatcgtatagtgtatcaacagccaagttaagaatttaaaactcatcaaataatcacataatcatactttatttagtattatacgatactatagagtataaatattataatatattatacagttaatatactaatagtatacgagtgtgttccaaatgttcttttaacgtttcatttttcggagcttgtaatcttatttatttgagaaataatacctcaattaacgactacatttgttaaaatctactatagtgcattaaaatttattgataaatctatttttaaatgtgattcaacccattggaactcaataagtttgacaaatattcagagaatatctctaagaaatcaagtgttcatgtagatttcttaggctaatttgatggactggatccaccctgacctgttgcaggagttccagtacaatcctgacctggagtagttgtagttccagatccaggagtagttgagagattaagttctagtttcttaaattcgttctcgctcttacgtacgaaaaaatcgtttgaaacaagacccagagaaaacttttttattgttgaatatttacgatcatctgtacttttccaaatatcttcatctccaaatttgattttcttacagttagctccagtgaactcgtaaacaaaggcaaaggttttatcacgcccgagaaggtcaattttataatctgttaccttgagctcagcatcgtcaccatagaactttagttttgttatgtcatatctctcaccggtgacatctttccagggctttttcttaccttccttttgaagaagtataaatttactactcttgagaagaatggcaatatgttttttacagctaccagaacccttccgtgccacctttacggcgtggtcattatcagtagcggtccagatatcattgttacccttcactatcttagaaattgtatgacctgactttggggtgtatgttttaaactcaccatccttagagtactcgaactcagtggtactactcgtcttctttatgtcaagggttagaccagtattatcagttgttgcaccagttttagcagcaggtgtagttccactagctggagtagtggattgaggtgttacagaagtttgaccagttgtagcaccagttgattgagatgaagcattcccatcaactccatagactgatttgtagggacacgatcccaagactgcgataaaaattaatatctcaaacttcatctctattagtatgaactaacagatatttatcactttaagattaccattgttacaattggaaattatcattgctattcctgaatatcaatctacttcttcttcttccccattccttagtctgcattcacagtcctatactcgttttctcttaccatttagttcctattgactatactacatatctgtatatattatataatatacaaaatgcatactataaaacatgcttctggtaactatactatactttattaagggtcccttcaatagttttagaactcacaaactacgcccctaattatacttattctagtattatattatggtatacaccgtaaatattgtatattgtatggttaacaacatattaatattatacattaaagagctccaaatcagctcaatcaactacattaagaaagattattgtacaactacacttagtaatacttcttacagtacatcaaatttagtaagatatggcacaccaaatttagtgagatatgttgttaattctgagaaatcaagtgtccacagatttctcaccaaccagtcccaggcgtattgaactttaatttccacgtaaacgagcctggcctgtagaattttgactatactgagcagcatttacaccgtcattgagcttaagtatctttctatttaccactaatatcattccacggcttattcttaccttccttgtggagttttaccaacttaccactcttgagggtaatttcaagatcttttttaccgctgtatttaccctttactaatacttcacgggcgtaatcactatccttagatgaccaaacttcagagtttttgctcactatcttagagaacaacttgttcccttttggcctaaatgttaccgtatctttatcccaatggtagttgtagtcattgttttcttgagtcttcttaatatcaagcgttactgtgacttccttaggttcaacagatttaccaccatcagcagcatggactgagttgtcggggtataatataacaattgggatcaaagctaatataacaattttcataattaactaatacaaactaacagtttttaaagttatttcgattaccaaatacaattcctaattgtcattcccattcttgaataggaaacatttaagttattcttccccattcatccgtctgcatttacacttttatacccagttttccaaagcattaacactgttaaatagtatataatgtatagtatattatatataatagtatattagtagtaccgcgggcatgtatttagaggtctaaatgtacaccagttaaccacttttctaccacatttccatagtaaattaactatttaacaagttagttaagtaaatattgtgtaaaatattgtgtaaaaagtgtgtagtgtttagaatattattcctcgtcactaaatactatctcgtcctcctcatactccaacatctataccatactttaatatactattaagtatatacccccagagggagataactatataagggagagggagctaattaactattaactctatacccctagagggagctattttactatataacttattatataccccgagagggagctaataatataagggtggagggagaaggagatagttaactatatacttagaactatatacccaagagggagctattttactacataaggggagagggagatacttaactatttaactatatacccctagagggagctaaattagctatataacccaagagggagctactttagtatatacccctagagggagctaaattaactataccctagttatatacccctagagggagctatcttactttaccctagttatatacccctagagggagctatcttactttaccctagttatatacccctagagggagctatcttactttaccctagttatatacccctagagggagctatcttactttaccctagttatatacccctagagggagctatcttactttaccctaattatatacccgtagagggagctacttaactatataactatactgtataatcttggatatataccccgagagggagctaataatataagggtagagggagagggagctacttaactatatagcgagagggagctaactatataggggagggagctaaataactaagtcctaagggtaaaaagagtcccattggggtggctatctgtagctacataactaagtaataaataactggtcccgttggacctcacaccgtaacgtactttctccctgagtaatctaatttcttcctcttgtttcatatctttttctactttttctcttagttggtttacttccggttctgtgacatcttgttcaaacgcgcccattagaatgtcgtagtatattttactcctctcgtggtcatcttttggtatcacctcgtcatccagccgcagcaactttaacacatacgagacgtcaggcctactcataatctccttcgcaaagttctcaaaaaatgataaacccaatttaaacaaaaatatctgaccctacacaattatctcatgtgtaattttcattcgtgtaactgtgtagaatactaattaagtgtgtgtaagtgtgtaaattagtgtgtaagtgtgtagaaatgtgtaaaaaagacacgatattctgtaaataagacacggtgatgtgtaagaaatgtgtaagtgtgtaaaaatgtgtagatgtgtagaaatgtgtaaaaaagacacgttagtgccgaaataagacacgttagtgtgtaagtgtgtaagaaatgtgtaaatatgtgtaaaaagtgtgtaactgtgtaactcagtagattacttgttcgaaaagataattgagaagagtggatatggcttcgaaatcgaagatgtgtatgccaagacctatgaaccatttggagacaaatgcttccgggacaattaactccgttatcacatcgtagagtttatgatttctccgttccagaaggagcatgaggactttggagtctcgtacgtatggtttgggtttggcggagaagtagcctgggaggtaatgtctgctcatgacagtcatgacattgaccacttccacggcgtttaaatatatcgacagcaacgctatcacaaaaccctctccctggtgatagtcgcccaatctctcgtatacaacgcacaagttgttgtaaaattggtccctgtactgtggagtcttaaatgtacgctcagaatctaatcggaatagtctgcttagttctggagggacggggtgttccgttacggtgtaaggtccaaagggagccactgctgtattccccgcaggggtacccacactatccacaatatccttagtattctcagtagtatccttagtattatctacagtactatttactgtgttaccagaattagctccctctagggtatctccctttagggtatctccctttagggtatctccctctaggggtatagttaaattagctccctctaggggtacccttatattagctccctctaggggtacccttatattagctccctctagggtagcagcagaattggtactagtattttcctccctatctacattagtatccttggtatccctagtatccctagtatccctagtatccttagtatccttggtatttggggagagggagctatttacggtgttaccagatttagctccctctcgggtatctccctctccctctcccttagatagtaaagtatctccctctcccttagatagtaaagtagctccctctcccttagatagtaaagtagctccctctaggggtatagttaaagtatctccctctaggggtatagttagggtagcagcactttttacacttttttcttcgccagtagtattatctgagggagagtttacagtattctgggaattatctattttggaatcagattccccagtatttcccttattattactattattattattattagtagtattattatttgtgagaagatggtggttggatttgttgagaattgacttggagattctgtggatatttctgaattttggcaggagcatcttgaggttcgattccgacgctaatccgctcctgctaaacagcggagaatcccgctcacactcccaaaaatcctcctccttaaacatctcaaaatattatctacccacaccacaccaatattataatattgtgttaaaaattattattatattattattatttttattattattattatattattgtgttaaaaatttttatagtgttggattgatattttcgaatatctttttcgccaactcctcctccctcttactatttgatcccacactatttacagtattcacactatccacagggtttacagtagttacggtagttacggtgttaccagagtttacagtattcacagtgttaacactattaacagtgttaatgtatcctttaggtccccaggatttgttttttatgtcaattattaatctttcctccctctccatcttctccattgtgttcccattttctacagtaacacttcttacactatccacttctatagtattattttcagtattttctatggtattggagataagttggtagggtttaaagtttagtttttgctcttggatcggttcaggctctggatcatatcttttcctctcatatcttctcacatcttttctcacccagtcctatacattattccactatagtatactatattatagtattgtgatcagcaaattaggagaggaaaatttatttctcctaacccgatcaacttttacattttatttttttttcactatttcaaataattatttaatctaaactaagaatataattagttagtggatgatggagatacgtttaggaatgaaagtttgatgtcgtaggatttattatttgtcatttcgaatttgtgctttttcatatttttcatttccaacattacctgcctcaattccacacttttacacatttttacactatttaccacattttccacattttccacagtgtttacagtattttccatactatttacggtggaaaaatggcgtagattattgtaaatccaatagagctccagtttatcccatctgtcacttaatatcttcgttaccacgtctgcggtatagagttggggaaaatgtgtaacaagatgtatgagcagaagtttgatgttacggtttggtaacagttgcaggcacttggtgtggagccattggaccaccgaattgttcaacaacttgacaatgttattcagtatgaaaaacacattactactctttaacagcaattctatcattatcttcaaacgccacttttccaatttggctatctctccccttataatattagctccctctcgatcacccagttcctctacagtagctccctctcggggtatattattagctccctctcggggtatattattagctccctctaggggtatattattagctccctctgggtctcctatgttaatagtattaatatagttaatagtgttaagttcgatgaaggatttatgggtgagtgagtggtagtgggtaaaaatagtgttgaagatgagtttgaagttattatcgttgataagtttgaaaagcagttttaaaatgtgaatttgcacaatttcatcctcgcaagagagtaattttagtaatttcaactggtcatccgtcgtgatcaccaacctcctgtccatcaacatgtttatacacttcacactcacataacacattatcattcctccattcaatagtctatacaaccccaaagggttaattattatcaatcatataaataattagaaaaaataggattttggaaataaatgccaaagttgatcgggctaggaaataccgaggaaattttcctccatttctgctgctgtaactacacatttaccaaaaaataattgtaaataataaataaaatacaaaaaggttgcaaattagtaataagtggggatgtgtaaactatgtagaaggtactttgagatgtagagcgacgcgatagagagtaagatgtggttaatgtgaatactcgacaataacttcacaaactcataaatcatcatcaccgtcacattgttccccatactaacactgttcaccccagtcacactattccccgagttaaaataattagtgtgtgactcgagtgattgtgtgaatttgtagagaatgttgtagattaaattgcttagttcgatgttatgacacagtagagataacaacttcataatgttaagttgtatgaacggggctgcgattctgttgtagtaaaaagttctattgagtttattgtccaaaatttgcttccatatgttcatcaacacgtttatccacaaatcttcattcacactattaccaccggtgatgtaaatcctcagcagcgtcaacgttacattcattacactagggtttatgtcatacattcccctcctacaaattcattattctatcaaatttttcataaaataattgttaaatttggtaattttggaaataaagttaaaagttgatcgggctagcttttaccgaggaaaatatctatcaatattgctgctgtaactacttatttatgaaaaaataattaccaattgtaaataaatgacaaaaaggttgcaaaatgataataaatggggtatagtatagaatactcgatgatgtgtgtgatgttggtgtgtaggagtgtcgggtagagttggtagatgtgagtgagtagaatgatagtttttttgcgtacaagttcgttttcgtgtgttaagcagtttagtatcagcggtaacacaatctccagcatctcctcattcatcaaataactcaaattactcaacaccaacaacttattcatcacgttaccactacttaaatcctatacacactgttatccactaattattttgttaactcgtggttataaaattgtaaatttggtgactagttagttggagagaaaataatgatctaatttgctgcggttaccttttgtatagtattgattaagagaataaccaagtcattattctgcaacatcaaagtacaacataaatatcctacaaacacacaattatcacaatttatttatgataattaatttatgataattgtgtgaattgattagatgagtaaaattgtgtaagttattgcctagagatttgaatttgaggtctttatcctgtgctaagttgacggcgtggatgtacgcaaatttggtactaaagcccagcatctctatgtgcatacacttcatcaaattcttatatatctcactctacccacaaattactcaatcacaattaaataataaataatataaataatatgaataataaataacattttaaatactttggtgatgtttttattttgaaaggatatttttaactttgaaatttcgcgatagattaccctctcctcgccctaaacattttccgattttacatattaaatttaattattgtataggtaaaataattaattagttaactatataaaatgagaaaaaatgtgtttacgtgtttggaattggtttcgttgagggattttataaatttgtgaaaatcattcgatatctccaaatttaacattttttaaaattattttttaatttttaattttaatattggaatttatttcatttccaaacgacatcgccccctcacacattaataattatttattatgttaatattttattatattattttaaattttttatttaataaatttattatttgtaataaattaataaatgatattccaatctgcggtgaaggtactaattactttaattaccaagttattaagttaattggttactaagttttgtggattattgtatgatttgtaggatattctggattattggagtataaatttaataacgacgatgactctttaattaccatcgcttcatatctttccaaaaatactctcaacctctacacaggaaatgttaatactcatttacacatccccattattttaccattttgcaacctattggcatttattttacaattgttaattattttttggtaaatgtgtagttacagcagcagaaattgaggaaaatttcctcggtatttcgtaacccgatcaatttttgcattttattttttttaacgaaatttaacgaataaatttaattaaattatgattaaataacacaataataatgttgtgtgtaggtggtatataagaggatagatttgagttcgtgtgtgttaccggtggaaactgtcaataacaagtgtttctccatacggtcacacaataacttacccaatactctttgtacaacgtactaacactactataatatttattactatacattactatactatttgttatgtagtaatctgatggatcggaacaggtggatcaacgccataaactcaaacatcctatgccaactaacctccacagtacccctcacacatttttacccttactttagtattttacacattcctacacattcttacccattcttacacacttttacacacactaatagtagtttacacatcttacacatttttacacacttacacactaacgtgtcttatttcgacactatcgtgtcttatttacacatttttacacactttcagtactattttacacaccttacacattcttacacattcttacacatcttacacatcttacacacacttacacattaaattaatttgttagagatcccgcttaccgctgcttggtgggaatgaattattcgagtcctcagatgaacaagaacacggaatcaatctcttcatgtaattacttatttactcagttatttacttatctacttagttatttggttatttactatattagtagtattggtttggagcagcaaaaactgacagatattttcctctctaattcgtaacccgatcaactttcgcatttatttttttactcttaaattaacaaatatttcaccataaaaataactttatacaattattaaagtgataattgagtaaaatatgtttagccatgatggaatgaatggccggcctgagatttacataaatggcaaaaccaccaaagagttacaagaacttcgtgaagttaacttacacaatctcatttgtgtttagaaggaatctgtcaaccttacgtctaatcccatccaaggtaacatctcaccagcaaattattaacattttcctcaacaactttaatcacattcacaaattattattaaataaataaataattaaattattgattgtgtagatttgagtaatttgtttgtgaatgtggaaaacgaggatacggcggactcaccaaacctaagtaagtcaaactgcaacaattatcatcagttgataacgatgctatgaatgaggctagaattgaatctggtcttaacgcttcaataccacatcacggctactatcattaccaacacatctaatcaccccattatttcattatttgcaacctttttggtatttatttttattttacaattattttttacgaaatgtgttgttgaagcagcagattagataattattttcctcggtaaaagctagcccgatcaacttttgcaattatttccaaaatcacaaaatttacaaataaatttcaataaaaatgattaactgggataaaaagttaggattgagaatattgagggggtagtgtgaaggtgtggtgtgagagttgaaactgtttgatgaaccctccgattggcacaatttcataaaaaaacttgagtgagacttgtctgttcctcagtgatcttccgaaatcgtatagaaaatactttgcaaacacatttgtactaggctggtacgcctcagacttgtttattatcttgtcaaatatcacaacttcacttctctcgtgacggtttgtcacgtagttcgccgtcacgtacagaaataccacatgagtactccagtcaaacacaccacgcaagtcatatcccatactcaactccaacaacgccctgtcaacctaataacactatttacacactatttatagtattttacacattttacacactatttatagtatcttacacattacggtgtcttatttatagaatatcgtgtcttatttacagaatggtaataattatattaagtgtttagttgtgtagatttgggagcagcaagaattggaagggagaggaaaatttatttatcccagcccgatcaacttttgcattttattttttttacccattttttacaaataattttaattaaaaattagataactaagttgacagtgtaaagatacgttaattatataattatgaaaattgtataataattacataactttgatagttgatttgggaaattactttatatttatcgagtgtgagttcgtgagttttgacgtgtttgacgtctccggtgacgtgtttgtgcgtacgaaggttgacgcctgtgtagtaattcaacgccagcgccatcaacgctatcatcgcgcccgtatgtaccaccgcataactcctagataaaaatttcaacattctcaatatattttacaaatttttttctaattaatttatttacttaaattttatattaattgttgtgtggtgtgaaattttaattttattttatatttttaaccttccaaacctatttacgagtttacactgtttaatacaattgttagagtaaatagtatgagtaatggactatgaagtgagtgaggaggaccacaggaagataattgagtttagtcttttgcatcacaagaagctggggctggaacagaggttaaaactccttaaacatgagcgaaacttactcacagacgctcaagacgaggctacaatctcactagaaactcctctttaccatcttggtacgctttacggagcttgctaccctcacacttcttatttatttacctaattatatacataattatatacacaattttactccgactccccggaattagtagttatcacctcttactcaacttatataaagtgtttgactccccggaattagtagttatcatcatttactcaactattaccatagttaatttttacccagactccccggaattagtagttatgaaagtttacctaactttatctatattacagtaaaaatagggggaccccccggaattagtagttatgagtatttacctaatataattgtataggagagtgttttatgagagtgggcgaggaagagttggagttggagttgcgggagcggagtgagcgattggactctgagatagaaaagttaacgttaagtttggaggaaaatgtgaaggagtcttcacagctaaagtcacaactgtacaacaaatttggcaatcgcattaatcttgattcttaatattactactatactatatactatgcatattatatatagtattaagtatataattatggtagctccctctcggggtatataaagtagctccctctaggggtattaattaactagctccctttaggggtatattaagtataatatagtatatagtagtaggtgtggtgttaggtgtctgggtttaggtagtaaatagggtctataaatactatagtacagcactgtttacagggtttaatatactatttacagtgttaaatagtgttaatttgtatttagtgctgtaataattgtataaatagtgtataatatactaatactgttagtactatagtatactatagtatattatggtatataatatatagtatagtattatatgtgtctgggtttagggtagttaattaagtgtatattacacagcatataacaactctattatacatatttaagcttataataactgtattaaacagtattaagtgttaaatagtactgtaatgagtgttatcttagtgtatagcaaagtgtatactataccctggtatactcttaatactatacatatacatatatactatatatactatacataatataatatatagtatagtatagtagtagtaggtgtctgggtttagggctactaaattaagtgtatataacatggtataatactgtttacggggttctaacatactatttacagtgttttaagatggtattaaagagtttaaagtggttaaaagtgtttgttaaggtgttaatttagtaccatacatactactatactatactactatacacatacatagtatattatatatagtatatatactatagtatatataatatagtatagtattataggtattatgtgtctgggtttaagggtaatagtattaggagtatagttaagagtatagtaaagtagttaagtatatagtacgtggtttaggtatacaatactccagttattagccatagtattctagggttatgtattaggttagacaatactaatagtctatagttaagtaatagtaagggtatatctgggctgtctacccattttaaagctattaatttaccattctaacactcaatttaatcattctaacacacaatttaatcattctaacactcaatttagccctaatttaagcttaattagcagttaattagcattttttaacgctggtttggtcataaattagacattatttagctctaaactactcttaaaatgggattaatttagccttatttaggcttttttagtcatattaagaggtaattttagaggttatttaagttatttaagagcttatttaaggctcatttcgggcttttttcgggctatcttaccgctattttagccctaaattagtcatattttactctattttgggttaattttacccttattttggtcatattttggtcatattttactctattttggccttatttaccactattttaccccttaattacgccttaatttactaattaaaaccctaaattatacccctaacaatacataattaaccccttaaaacacttaattattactataaatcacctaattaacccctaattaacaccttaaaacacttaattattacaataaattacaataaattgtagttatgagattaataattgtatgaagagtagttgcgtttatctttggttttgagtttatggttgagttcggctttgaatgtgtcgtagaacctcagcgtgggcacgtgcactggcttcgctgtgaagatttcgccagtctgcaagttcctcatcctccgctccccacgcatgctgttcttgaacacgccgaacctcggcaaactcacctccgcgtcgtttgacaagtgacgctttatcgatgataaaaactcatccaccacctgacccacctccttctgagtcttattcaaacgctctcccacctcactcacaatgtccctcttactatatacctacacaaattttacacataattttgctatctcgtgataatagtaattgaataaatttcattaactcgtaacaatagataactgagtaattgtgttatctcgtaacaacaactggacgagtgaaaaaataaactcgtaacaacagtaactaaataaatttgattaactcgtaacaatggataactgagtgaaaaaataaactcgtaacaatgggtgtggatacgtttcgtttatttttggcgtagagtttggagtttgttttatgtgttgtgttgtgtgtgatgaatgtgagtttgtgtgttgttgtgtgtgtagcggggttggattcgagtaatttaagtgcgttggtggcaacggtgagtgttgtcacgagtagaagtgatttaattgctggggtaaacattgcagaaattgaaaccctcaaaacatcatcaaatttcgtataattttaacaatagaatctgaaatttacacttttatcttctaacttactcatacacatttctgtggggactcagattccatccatcacactcgtcttcacaacaacactacttcacactccattctctccattccaccattcacacacttaattttattattattattattttatcattattttgttcatttggattggtaatgatttacacattttttaccaaatagaactgatcctacagtaatcatatattacccccattatttcaacttttgcaacctttttggtatttatttattttttacaattattttttggtaaatgtgttgttacagcagcagaaatgactagggaggaaaatttatttatcccagcccgatcaacttttgcatttatttccaaatttctattttttacaaatatttttcaataaaaatgatgaattattattattaataataaaatacaccggtgtgaaaaaaatattactcgaggaggaacgagattgccgagctaaaaatctgcaagttctcagtccaaacatttaaattattattattatttgtgattgaggcgatgtagagatgtatgagagtggcgtgtgtgatgatgtgtttgaggctacctacgacaatggcgaggattaagtaggaaacgctttcctctgaggatttactcttattcaactccacagcttcacataaacttctcaacttactccacacctccacactcttctccatctacaattattatttactattgtataattaagttggtatgagtagtgaggaaaatctctatctacattgctgcagtaactacttatttatgaaaaaataattacaaaagtaaaataaaaatcaaaaaggttgcaaaatagtaaatagtggggatattagataactgggtagtaggtagatgagggtatgattagggaactgtagtaaataactaaacactgtagagtacaagctccgtaacgcacctgatgtaacttctcaacgatgggaatgatgttgatgtcgttcatgtccctgcgactattaaatatcaacaacgacaagttcaaattcaactccatcctcaacttcattattctactctacacattccaatttactataccaatttactatactaatttactataccaatttactatactaatttactatacttaactgtgtaataattgtgtgaatacctgaatgacatcttcgagtgggagataagagttggagagagcgttgaataaattattaaagagatgagagaaggaatggtttagtaatatttcatatattcgactgtcgtacacacgcaagtactccctcctctcattcaacaacagcatctaaattgataattattttaattttatcatttttattgaaaaataattgtaaatttcacggttttggaaataaagttaaaagttgatcgggctacgagaaataaattttcctctccccgaattattgctgcttcaacaacacatttggtaaaaaataattgtaaattgtaaaataaatgtcaaaaaggttgcaaaaactgaatagaatggggtggattaccgatttttcgataatgtttgtgatggtattggcggtttcagtttcgtatcctgggacctaaaatggataatttggggtaaaaagttacaatgacaaatgtgttgttaaattcgtttagcttgttgaagtaatactcgccaaactcctcattctcctcagaccacctggaaataagttgtaagtgtcttaactattgataattagttgttaccgcttaacaattgtttcaggattgtcattgaagcacttgaggtagtcaatttctacaattattaactcattaaattgttaaattgttacccgagtttgtcctcgatagtaaatgcgaatctatccaatacactacataatattatttttctaaattttgtgttttaaaaataaattgcaaaattgatcgggctagcttttggcgaggaaaatctctatcataattgctgcttcaacaacacatttaccaaaaaataattgtaaattgtaaaataaatgacaaaaaggttgcaaaagtttaaataatggggatacgtaagtaaataactaggtaggtgggagtgagcaggtgacccgcagtgacaccgtaccgcaacatacattgtatataattgttgaatttatgtttgtgtgtgacattgcagatgttaaagttgttaaacccgaagcttgtaatgaaggaatcgttgaccatttccaccacctgaccacacctgttcacataactaccctccactcccgtctccaccaatacgtgactttctaatacattattatactatactattaagtatataattaactatactattaagtatgagtgagaatgagtatactgatgaaagtgaggttgatgtgtgagttgatgagggtttgtgagtttggaatgagaataataaatttattattgttggaaaaaattgacttgtgtaaatttgggtagtttttctccaaaatactcaaaaacggattaccctcaatctccaccataataccattctatataccattatatatataatagtatgattatattaacattgtggaggggtaaatttgtatataaaaatgaaaaataataaaaatgtaaaataataaaaatgtaaaatagtgtaaatagtgttaaaaatgaaaattatcctccatgacaccaaattatccaaattactacatcatcttatcaaatctaacgaaaataattttaatgtaaataattctaatgaagataattctaatgaagataattttaatgtaaataatttcaattggggctgtgtaaccagtaggcctgggccgggggacagatgcgggaaatgtatattatgtgtattggaggagaatataagatcaatttcaaggctgatttgtaacattttacagtacgttaaggatttattaatttatctcaaactcgatcaacacaatttcttacagtctaccatcactctcaactatatcaaagctctatactcctcaatcctcactcactatctcgccatcttcaacgtaaccattagttatcctaccccactatttacacattttgcaacctctttgatattttatttatttttttaattattttttaccaaatgtgttgttacagcagcaaaaatggaggaaattttcctcggtaaatcgtagcccgatcaactttcgtatttattttttttaaccattttttacaattatttttgataaataatgatgaataatgtagagaatggacataatgaacaatgagcagttggatgtgataataattccaatttacaaaatcccaaaccaacctgtgacaataatacaattgaatgatttaaccgaggatccagacgctaacacctttttgtactttaataatccctttctctatcatcccttctactctcaacattcaaacacatcacactactctcgcacatctgacactacttacacatccgatgacacagatgacacaactaaattgagtgatttgagtgaaatatgtcatggagttggtaataatagtagtttatggattaggaagtatgataacattatgttctgcggtatttcttttagctaccccattatttaccattttgcaacctttctgacatttattttactttttacaattattttttcataaataagtggttgaagcagcaataattagaattattttcctcggtaaaagctaacccgatcaacttttgcatttatttttttttaaccctaattaacacaaattagataataaattatgaaataatctgtaggtacatttgattatttgcatttcggtcacaagttgttgttactggctgcgtatttgtcttgtggtaaaaaattatcaatcggagtctccaccggcgcactactcaaaaataaaccaaaccacaacaaaatccaacacatctccaaacgcatccaataccttcaccactatctacacactctcacacatattcacagtgttaatgttaatacagttgacatggtaaatattacgtccggagaaataataaattatgatgtggaatttaacgtcttgtgtgatcaaattgaagataatattggtggaaattgtttagacccaaatgtagaaaaaataattacaaataatacaaatttggaaataaagtcaaaagttgatcgggctagcggaaataaaaattcccacctcaaccatttctgctgctctcaaaatactatcaacactattactattaatactactgataataatacttctaatagtaatagtaataataatagtagtaatgggattgagatgatgacatttgagttggaggacgtgattggaccatcgagtgagataagagagggttacggtttactggtgacgtctgagatactgagcaatggcgtaagggtaaataagcaacggaaagagttgggactagtccagtgggacctcatcaacatcggactcgtatgctaccaacacaaccacaaacacatcaaactctcctccacaaccatacgcaacttaatcccctaatctcttacacatttttattaaataaatatttattaatttttatgtaaaaataattaataaatttagtagaaaaaaataaatgtcaaagttgatcgggttaggggaaataaattttctccgtaaatcaatttctgctgcttcaataacacatttggcaaattttaattgtaaataataaataaataccaaaaaggttgcaaattagtaaataatggggatgggcaaaattgctaagatggtacctctatatatccataacttaatactggtttaagaattgtaaaataagtttgggtagaaaatttcaattttgagattagtgttgaaagtacacttgtgatttcacatccagctgaaaaatttattttaccaattttaacaccaattaaaataattaataaattattaataaattattaatataaataattaattttattgataagggtaattgattttatgtgggattgagaggttttggattgagatttgttgttagtacttgttgggtggacgtagagttgcattgtgagagaaattacagaatcgattttccgtaaatttcaaaagcttaaaattttcccatttccaaactcaaactttttaaacacttcacatcaaactattttacctttcatgcaactatcgcataatctttactatcctaaccatccttattaacctttttattgacttgtttatcaaccaagtaatctgagtaatctgagtaatcaactgactaatcagcgactcacaaattaatcaaataacaaattaatcagctgaaaataattttgataatattttttcaatttttaaaatttatcaaatcattcaatccattcaatcaattcaatcaatttaatcaatttaataatttgagtgttaaattgttggcaagttgtgaaagattggtagaggaaaattaggcttggacaggttcaatttttcggttttcaagatgaataacgatcgtgatcaacatacggtatctccacctacctacctcttatttacccttccccattttattcagtttttgcaacctctctacaattattttacaattgttaattattttttggtaaatgtgtagttacagcagcagaaatgactgggtgagaaaatttatttctcctaacccgatcaacttttgcattttattttttttcaccttatttaacacatattttagtaaaatatttataaaataatattaatattgtaaaaatgattatagagtcccccggtgatgtgtaagaacaattgcggattttgcggtagtcctgcgaatgaaaactactgctccaaatgctatcgcgaacacctcaaacgcaaatcgctactcatcaacacgaacacttctaattctaatactaataccaatactaacactgacactacggatactgtggacaccgttgacactgtggacaaagtggtaaatggtacagataatgttgaatttgagactactgtggaaactgcaacaccggaaactaataaattagagaataaactggagaacaaagaggaggaggagaacaaggaggaggagagttacagttgtagtgtgtgtgggaagatggttggtttattgggattttcgtgtcgttgtggtaatgtgttttgtagcctacaccgccaggccaatgtccacaactgccaatttgattataaaagttataatcgattacaactacaacgcaaatccgtcaaagtcgttgctgacaaattagaacgcatttaaccctttaatattctcaccttatttattttatttatttaatcattatttatttaattttattgaaaaataattaaattttatcaattttaaaaataattgcaaaagttgatcgggctgggagaaataaattttctcacctaaccacttttgctgcttcaaccacttatttaccaaattttaattctaaaaaataaataaaatacaaaaaggttgcaaattgtaaatagtggggatgggtaaagagatgtgtaaaaaagtgttaggaatcccaagtaactataacttcccctaattccacataacaattaaaggtaatatattatgaatactggttaagtatataataaagttggttattgtgtagatagtggaagaagtgtaaatggtggaaggaagagttaatgctatttggtgcgtgtggtaggattccatagaataaaagggctgagattggaatttcacaaattaaattctaatctttggaataattttattcaactttacagaatttttattccacagaatcatcgcaatttttattccacagtcatcgcaaaatttacacaaatttcaattttttcatttttttcattattttacaattctttcatattttacaattttttacattttttacaattttccccaaatttaacaaaattaataaaatttaacaaatttaaacaatttaataaattgaaataaatttgggatgacgaataagatttttaatttggagagttttttgggtattgctggggacgttcactccttcgaccacaacgacgaagccgacttcctactctccaacatcaactcacccaaacactctctcaacacgtattcacccaaatatcaccagtttattcacatagttattacgagttaactatttacatagttatcagttgttacgagttaataattgagttatttagtgttaatggatgtgttagagggttaggttggatgtgtgagaatccgttgtataagtttccgaatgagaacagtcactgggacaatccaatcgacaccacaaacgaattcctaaaactactcaaccacaacacacacgaactctccgacgtattctcacattcttacacattcttacacatttttacacctacacacttagttacgtagtttacacacttttacacacttttacacactttacacactttcgtgtcttatttacacattggtgtcttttttacgcattcatttgtgtatataattagatagaatttgataaccacgaattcttgggggtctaagcattttttagagggagaaaaatgataatctggctgaaatcacaaaatcgcttgaaaaacttaaattctccgaatatacaacaaagttccccgataatatcaaacacaatgacaactgtaaactgggtgactcaattagacatagtgacactatgccagtgttgagaggagttagaaatgtgtatgaggagcgggtagagggggaggattattcggcgtatataacagagggtacgggaacgatactgaagataattgaggcgagtcagctctggttaaagcacacgagctccgagaaaattccactcaaaataaagaaacaattcacgaaaaatgataactttgtcgttttaatcaaaaaacaatacacacactaagatttaatcaattttataacacaactccccaaatttagtagttatcaacatttactcaattttgtacctaattaaaaaatgggccgactccccaaatacagtggctatgaacatttacttaattttgtacctaattaaaaaatgggccgattcccctaaattcgacactatcacactttacttaattattactataatacagtaaaaaatgggccgactccccaaatttagtagttatcaacatctacataattatatacaatattactgcatatgttgtgtgataaatttaaggtttgaaggagaaagtgaaggtatcgtttgtggctccgttgtgtgtaatgtacggcgtattgattgggaaaacaagtgtaaaagtatcattttcaactatgcaagagaggggaaacggcctgttttcctcatgtttccaaatgattttatcacagatttccagtttataacatcttttctcctggctgaacaggaatacattcaatttctcatgtgttaataactttgtatcattgagtttggtgagtggtttgccaggttctggccagtcggtgtcatatccttccatgtttaaacctctgattgtcccatcactgaatagtaaattcatggtattattctccaaattaaataataattcaaatggtaatctcctgaaagggtctgcacagtaggaccacaccaacttgtcaccaaacttgacgtgataacactttggacccaactttattgtataaatgagacctcgtaactttctcaacaattctgtgaattttgcgtaattcaactccaaatcgtagaattctaattcatccaaactgtagagagtgtgagttatgtcgtcccaatctgatctattgttggttctacggtatagaacaggcttaccattgattatctcagctctatagtccatttgtgtcattatcttaacaatattagaattattttgagtgttggtaagggattggtagggctgactcattcttacacatttgccaaattaagccattaaatgataaatttaaggtttaaattacttgtaaataagattactatacttatgtaaggtatagtaacggtatttactgtgctatagtattgtactactactatggtattattactactatacatatacataatatatatagtatatgatatatagtatagtatagtattatgggtatagtatattatgtgtctgggtttaagagtatagcactgtagtaacatagtatactaagtagtttaatagtagtaacgtattagtatagtattaggtatagctatagtatttatgtagcattaaagttatacagtaaagtagttccctctcccctatatagtattagttagctccctctcggggtatataaattagctccctcttggggtatatagtatagaataatactatagctaatttatatagtacccttaactatataccccgagagggagctacttaactacccaaaacccagacaccaaacccccaaacccagacacataaataacacataaataacacaataatcaaatcaaaacattaataataaaatattaaatgttaaatgttaattggtgagatgtgtgtatagaagtcgttgtgtgatattttcccagtccttattaaccctttggaatagtaagaatgtgccgttgagcatgattatgcctaccatttctgctgcttctactactttaactaatactttaactgcgtaatctgacccctccgcactccaaatcttcctctcaccgtccgacacactactaaaaacacttccagactccgccacatatcccttctccaacaactctccccactctctactcactaattctctctccaataccaattctctcttcaccaattcactattgagcgactctgttttatccttttccaccacgttcactatacttattgtagtggtggtgtcagtaccagtggtaagtactctcatagtattctcagtgtttaggaggaagaaggaggacttgaggggattaaagtaaactccactaacctctccaaactctttcatcttctcatattcatacaatacttctcctgataacactattttcactactttgttctcagagtccccatgagtaaaatcatagccgtaggacagattgtgcagatttggactaaaattgctgtggtccaattcctcaccactttgaccataaaacctcaaactcgacatgtcccaattgttaatattagttaaattattgaaattgtgtgaattgtgtgaatagtgtgaatagtgtgaatagtgtgaattgtgggaatggaaagggtgagtggaataatgtctgagtagggctttgtggtttgtgaggatcatgagagatctgacggattcgtcggtgtgtagataaacttgcgtggcaaactcctggtggttgttgtagataacttcgtgtggccttgaggagtcgtagattttcctaatcccaaagccctttttaaccacaaatttgacaccaaaactgtcctcaacatagttaaaatttgataaacttctcttactcacgtccaagtccactgggttcactacgtcaacacccgtgatagaaccgttcagatgtgtgttagaagtgttcggaagtgtgttggaagtgttcggaagtgtgtttgtagtgttggattcaggtgggaagaagttaattttaacgagtagtccggcggaggcgccgcacaccaagagtaacaaaactgaagacacaacatacgccaaaccccgcgacctcttcatcacaaaaattgtgttaaaatgtgaattaccgagcgaatgtgtgagaaattaaagagaataaattattctcaatattcttaaaattatcacctacacatcccaacatttcctctacacattttttaccccgtttaccccgtttacacatttttacaaattttacacatttttacacattttacacattttgacacaaatttatttatttaaatattttatatataaatttgtgattggaattttaaattaggctagacattttacgcatttacacattttttacctaaatccattacacatccccactatttacacaatttgcaaccgttttggtttttattttatttttgctattattttttggtaaataagtggttgaagcagcaaaagtggttaggtgagaaaatttatttctcccagcccgatcaacttttgcaattatttttaaaattgataaaatttaattatttttcaataaaattaaataaataatgattaaataaataaaataaataaggtgagaatattaaagggttaaatgcgttctaatttgtcagcaacgactttgacggatttgcgttgtagttgtaatcgattataacttttataatcaaattggcagttgtggacattggcctggcggtgtaggctacaaaacacattaccacaacgacacgaaaatcccaataaaccaaccatcttcccacacacactacaactgtaactctcctcctccttgttctcctcctcctctttgttctccagtttattctctaatttattagtttccggtgttgcagtttccacagtagtctcaaattcaacattatctgtaccatttaccactttgtccacagtgtcaacggtgtccacagtatccgtagtgtcagtgttagtattggtattagtattagaattagaagtgttcgtgttgatgagtagcgatttgcgtttgaggtgttcgcgatagcatttggagcagtagttttcattcgcaggactaccgcaaaatccgcaattgttcttacacatcaccgggggactctataatcatttttacaatattaatattattttataaatattttactaaaatatgtgttaaataaggtgaaaaaaaataaaatgcaaaagttgatcgggttaggagaaataaattttctcaccccgaattattgctgctgtaactacacatttaccaaaaaataattgtaaaaaataaataaataccaaaaaggttgcaaaatggtaaatagtggggatgtgtaaatagataactaaggaactagtgagggtatgggtaaaagattacattccatagccttacggtacgatcagaaccggcggataagatcttatttgattcgttggagaatgtgatgagatattcttcaggtgagttgagtgttgtagtgtccaggtaattaacatttgctgtgtgtcctgtgaggttatgtaatggaatttttaagttcctcaagtcccagacacggactttcctatcgtaaccacaactcatcacctgagtctgtccacaatatctcacataactcaccaatcccacgtgggcatttgttctcatttgtctactcgtaactttttcatctatttcatcatttacgctgtcaacagtgttgtatccgttagtacagttaataacattccgtgtgttaattgggataagatggatggagccattggagtcagcggtgacgatgagattattgttgagatcgacggaggaaaggttaattttatcttttgagagcgtaaatttgttaacgcagacgaggtcggattcggttcttttatgcaccaacaccgtggaatccttgcccacagaacataccacatcagactctaccgctacaccagttatacaattcctatgacatctcctactcaacctatacattacacaattattatacaaatttttattttattatacaattttattatacaaattttaatttaattaattttaattatttaatttgatgaattgataaattgtttgggatgttggaaaaagttgttgtagttggtaagtctggcgttcacgtcctggattccaacgccagaatcgatcaaaccatcgcaaacgtaataatatatttatgtatataatttggtatataattatgcagaatgtgataactactaattccggggagtcggcccattttttatctagttaaatattatgtagaatgtgataactactaattcctgggagtcggcctatttttactgtagtatagtataaaattaggtaaactctcttagctacgaattccggggagtcggcctattttttatctagttaaatattacgtaaactctcttaactactatatttggggagtcggagtaaaattaggtgaataattttataatgagtgtgtaggagagtatgttgagtgagatgaacggatgtgtgatgtcgagtagtggtttgtgtgtttcactgttggagaaggcaaaattagttttcatttcacacgagaatgttttcagagcctctgttcctgaaatggtccgttacggtgtcaggtccaactgcaccaatttcttacctctctctaggggttctaactctctctagggagtctatttacccttatttacccttatttatacattatttatactttggatagtgttaattatgtgtagatgacgagtattacgtgtactaatgaaggagaaatattattttgcgggtcaaaatccggtaaactctacgtctggcacgtgagaaacttttctacaatataaatagttattcatctagaatatccgagtggtagatatggatcccgggtgaactccaaagtcaagcgggaattggcccggatagtagtgaggtgggggactgccaaggggagctaatacctaattatttactatattacagtaaaaatagggcgactccctggaattagtagttatgagattatagttatataattgtttacatttgacctaaccccgtaatgcagttgagagagggtaatttgttgtattgtgagcaaatattttacaatgaagtgacggatgtgaagttggacccacttgaaagttctcttttactttcttcatccaacggcgatttatcactcgttaaactcgttgatcttttcaccaatgacctacataccaaacactttctcggacataccacacacattctttcagtatcctaattatacacctaattttactccgactacccggaattagtagttatgaacatttactcaactattactatagttaatttttaccccgactccccggaattagtagttatgatcatttacttaactatttactatattacagtaaaaataggtagactccccaaatatagtagttaagagagtttacttaattatatacctaattttactccgactccccggaattagtagttatgatcatttacttaactatttactatattacagtaaaaataggtagactccccaaatatagtagttaagagagtttacttaattatatacctaattttactccgactccccggaattagtggttatgagctatttgtttaggtgtgtaataagaggtatggactggacagtgtggatttcttgagtgtgtctcgtgataagaatttgagactctggcgtgaaaactcaactcaatccgtcaaatcattccaactccaatcgaatccgctcaaactttattccgtaattaacattgtcacgagtataattttttagtacagaggaacttatttattatgtgatgacggaaatttggtaataatcaacttgaaggaatttacactacaatacgttaaactacatccgtatcccccaaccccgtaacaatgtttagcggtcctgtttactcatttttggaggtgggaaatcagtttatctcttgctcttttgacgggattcgcgtctgggattcacattttaaccttatttcactatataatccaagttcgttacggtgtcactgcggggcacctgctcactcacacttagttatctactaccccattatttaccattttgcaacctctctgatatttattttactttttacaattattttttacgaaatgtgtagttgaagcagcaaaagtggttaggtgagaaaatttatttctcgtaacccgatcaattttggcatttatttccaaaattgtgaaatttagataataaatttgtagatttgagtataaatcaaatgtttactgtgaagtcaatcccaagatgtaattataaacaattactaaagcttaaactgcaaaatgtagcaaatactatacaaatataataacacattatatattatagtacaaccctaggtactacacactcagggctaagttgtaagttctccgttacggagtaatacacaagagggagaatactaagagaatatcaccgtagaaactacaatagagtacaagcacagtagaatacaagcaccgtaacggagcaccgctactgtataatgggaggtaatggtcttctgcagttggggcattccagcttaataaccatccactccttcaaacaattattatgaaatatatgatcacacggcgttaaactccaatccctatcacattttataattatactaatagataattaggaagtagctccccgtggcggtcccccgcctcactactatccgggccaattgccgcttgactttggagttcacacggaatgtgtattactcactccactattctggctgaataactatttaattctataactacgattactgctaatagtattaatacttgttatggtatagaatatgaaacatgcagatgttgcattgttgtaagtcatcttgcatgatcttggtccagggcctgacgtaggaataaatcttgggcagtatcggccaattaaacaagtaccgcgcgccatacaaccgctgcaccagtattaccactatctgcaacagagataatagtaatagtatgtaagtcagtgtggtgctggtgttaatggtatccccgtcaaagagatcgaaattgaagatattatccttgaagtagaaaatgtaaactggtaacagcagttttagcactattattaatagtataaaaagatggttgagggggttgttttggccgttccagacatcgagcattatctgcggcacccaaattaaatacaccacacaaaccaccacagacttgttattgtagtaataataccaaattatcaacaatatcgtcataaacgtgaagtaatatctataaccattgttaacaccccgtaggggttatttactatataattcaaatttattgaaaaataattagaaatttagtgattttggaaataaatgcaaaagttgatcgggctacgaaataccgaggaaaataattgtaatttctgctgctgtaactacttatttacgaaaaaataattgtaaattgtaaaataaaaatcaaaaaggttgcaaattagtaaataatggggatacgtaaataggtaactgagttagtagagtcctcggggacaaaaagagtcccatcggggtggctatctgtagctaaataactagtatgagcggacctaacgccgcaacggacctataaaaaatgctaaacgacttttgtagtacattccatccttgtctgatttgatgcgaatgcgacgatctccaaatgagaataataaaactgtgctgcacaactgtcaacaaaaagaacttcaagaataataaaagagtaaagtaaatgaggctggagaagaaaatgttggagtgaaagaggagtagaaagatctcgaaaacttcttggaaagtcatgaggctgacggtcatgatgcttagtttgttgtagtctgactgcgttgtgatgtttttgaattggttattatacaacaggagctcgagtaaactttttaatatgtaaactatgtacaaaatgtttgttgtacgggataacactcgcatgtccttctcctcaccggttagcctcactcttatccctatttcattactgtataactcggcttccacccgctctgactgcgttacggagcttggtcccgcctcagcattcccatgtgactgaggaactgagtttgattgcacaggattgaaatggtcaatcagtacattcacattacccctaatattatccacatccttcatttccgcatctatacaaatattaatactataacaagttaggatagtacagtggtatggtaatatctactatgaactccaaagtcaagcgggaattggcccggatagtagtagggtgggggactgccatagggagctaaccactaactattactataccacagtttactataatattaatactatactaggtcaatatagtacagtgagtagtacggatctactatgaactccaaagtcaagcgggaattggcccggatagtagtgaggcgggggactgccacggggagctacccctaactatctaactataccattattatactacagtttactataatattaatactatagtaagttgggatagagcaattggtatagtaatatctactatgaaaaccaatgtcaagcggagattggcccggatagtagtgaggtgggggaccgccacggggagctacccactaactatactattactacaatagataatgagtaaataattacctttggtgatattgagaatggttgtgatatcatcttggttgttgatgaggttgggagcggagttggtgttgaaaaagttgtgtgtgttgaagacgctgaacgggttatacagcgagatgtcaaagttcgctatgtgctcaaactcgttctgcacatacctcctcatatttatcaaatacaactcatccatctccctactcgatatcttcacattattcacactattcacactgtttacactgttcatagtattcatagtattcatagtgtttacagtatccgtaggagattccggatcctcagtagtacctacagtactattcacagtgtttgtgataattccctgagagagagtaagggagagattaaaattgtgtatatttccgaggtgtgagaactggttccaggtgttcagtcttatgctattcaacaacttatcattcgaaaccacacttaatcctcctttcccattgttaatgtgtagattcttggtattaataaaattaggcacaaagtcattcaagtaccagttttccccctctctcacactgttcacagagttcacagagtttacactaccaacagagttgacattgacagaattggagagatgaatgagattggagagtgagagtatgatgtgtgagtgtttgtgtgtggatgagaagaagtgtttggatttccagaactggtaccacttgccctggtagtgcggctccaggactatgcccacgtaaatcctgtagaacccgtccaagttcacgtccttcaacacaactatcaactccatctccccaattacacagttttcctcattatttacattgttcccactgttaacactgttcccactattcccactattaatattgttaacactattattagtattagtattgtgtagacatagttgataggtcccgtggtagtatgagttgatgagattgaggttgagggtgagattgtcgggatcgtagggtaaaaagttgacaataaaaaagaagacaaaaaccacagccaagaagaaataaaagaagaatttacgcctcacactctcaccctccaatgccataccctccacactctccacattttccacattgtccatagtgttaatattgtccatagtgtacatagtatggatattgtcagtagtatgaaaagtgttagagttgtaagggtgtataattggggatttagataaactttttagtgtgtttggtactattagtgatgccgaggtatttgaaaatggtgtttaggtgaggtttggagaggttagcttcgccacgctcaaacttcgcaatgtcactcgataacactacaacacattatttcaccacaatttacacattgctaattgtataataagcgtaaattaggagttttaaaaataaatacgaaagttgatcgggctagcctttaccgaggaaaataattatctaatttgctgcttcaataacacatttggcaaattttaattgtaaaataataaataattgcagagaggttgcaaattgtaaaataatggggtagtagataactgggtgtaaatgtgtaactgtggtagtggattacgtatgtgattgggatcattatgaagtgagttgataacaaaggctaaattgcccctacgaatcctcttccaccatctacaaaaatttacacaattttcacacaaataaaaataaaattaaattaaataaaataaaaattaaaaaaatggtggaaaaaatttgtacctgaaatattcaacggtttttgggacggacttgagagtggagagtttgaaacctttatttggtcttggttgtgttctgcttcctattctcaaatgactccttccccaccactgcttcccaaacacatttatcccactcctcaccatacaataattattacaatatttatttattacaaaatttatttattacaaaatttatttattacaatattattaatttattagaataaggttaatttattggaataaagttaatcttgtggtgtagtgtttaaattatattatccactaccatacttaatatttcctccccaatactcataccaattctcttttcattattagctccctctcccctaacaattgtagctccctcttggggtatattattagctccctctcccctaagaatattagctccctctcggggtacccttatattagctccctctaggggtatacagttaatagtattagaattagctccctcttggggtatattattagctccctcttggggtacccttatagtagctccctctgggtctccagtagcagcagaatgggtaataattttctcagctcgagtggctccactgctgactgagttacagactgaaactctactgacagttctctctttataattccccaggacccagggatgtgtgagaatctgttgtagtgtgattcgtttacttggttccacgtgtagcatttgcctaaccagccttgtaaactctgtgcttttcctcgtgggaaagcttagcttagtggataaaatcagctttaaaactgatttgacagtttcctccctggtggtgtagggtaactgtccaaacaccatcgcgtagagtaccacgcccagactccacacgtcagccttttcacccaagtaaccacaagtaccgtccagtacctcaggcgcagcgtaactcattgtacccacagtctcatataatctgacatcacccctcacccttatagacgctccaaagtcacataactttagcacgtctacagatttgtaaaatgtgtaggtgtgtaaatgtgtaggtgtgtaaaaatgtgtaggtgtgtaagtagttaatttgtgtatccccattattttacaatttgcaacctattggtattttatttacaatttacaattgttttttcataaatgagtggttacagcagcaaaaattgaggaaaatttcctcgaaaattcgtagcccgatcaatttttaactttattttttttaaccaaattttacaattaatttttgtaaattttggcaaattcagataaggtaaataactacataatgaatatactgttggtgtgtatgagtaggttttcgggtttgatgtccctgtggtagatgttgttgttgtgtagatatttaacggcgtttagaatcattttaaaggcgtttctggccttgtcttcagttattgcgccgtttctccgaatgaacgtgatgaggtcaccgcccgcgcagtactccatcaccagcactaaactgcgccgcgtctccataatcaccacagtctccaccacattctcgtgcctcacaccgtaacttatctccaactcatctctattattagttatttaaggagattagccgttttattctaactcataataataaggtaattagttatattactacagtatgttatagttaataagttagaaaaatgagtaaatagttaactagggaactaaagagtcctagggataactaagggtctagggaactaaagagtcctagggataactaaagattcctagggaactaaagagtcctagggaactaaagagtcctagggatagataagtagtcctagggatagataagtagtcctaggggataactaagggtctagggataactaagggtctagggataactaagtagtcctagggataactaaagagtcctaggtaactaaagagtcctagggtactaaagagtcctaggggataaatgaaggcctaggagagacaaaaaagtaaataaaaagttgggtgccccgcagtgacaccgtaacggaaacctgatctttgtgtatgaatgaaaatcaacacttttattaatgaatttgagtgcgtataagacatgtttctcaccaactgccagataaactttaccagcagaaccttcatttatcaaccccagtatcatataattcctcaacatcataaatccaactcctctctccacaacactattactccactccttaatcccctgaatctcaaccttacactccagaacatcccctttatccaatttacacagtttgtccacaccatcccctttattcagtttatccacaccatccaatttgtccaatctatccaatctgtccaatttgtcaggtttattttgggtacgacttctgcatttttgtccgctgagtctgcacattttaccaacacttgcgcaattcttagtgttaaaaagtttgagattattggaaatttgaataagttgtttgaagagtgaattgcccttgatgatgccgcgttcgatatattcttcaaattccgtcactacgtcaccgcccactctataacctaacacaccatattaccaactaattatagcttaatctagtaaaattatagcttaatctagtaaaattatagcttaatctagtaaaattatagcttaatctagtaaaattatagcttaatctagcaaaattataccagagaggaatctgaaaacttctttagtatcttcatccgatctcgatatcagtcttaacacctacacatactatagtatataatataagtagtaagttagctccatctcggggtatactgtaaaacagctccctctaggggtataatactaggtatatagttaattagctccctctaggggtataatactaggtatataattatttagctccctctcggggtatatctaagagtatggttaagatagctccctctgggggtatataataaaacagctccctctgggggtatataataaaacagctccctctcggggtatataataaaacagctccctctcggggtatataataaaacagctccctctcggggtatataataaaacagctccctctaggggtatatagtaaagtagtaagtgttaacttcccaggtggcgatgagattggagagtttgtcgaattcgttgggtttgacgtactcaatgtcaatgccgagaaaaccgctaaactggccattccaatacctacatcccactctctccatactccacaacatatattatattatttagtatagtatattaatatattatcaacacatttgtgctctttaataaggtcaacagactcactacaacttacaaatattacactattaactagattacagttacagaatttacataattaagattacaaaattaacgagtttacagtattaaggagattaagtgtgagtgtttagtttattggtgatgttgatgatgttgtggagtgaattattatgttcctgtgttacttcagcgattagctcttctatacactttaaaacgggtccggctgtgtaatcgctaacggtgttaacattatgaatctgggcgtaaaaggatagttgttcctgtgttaacgtttttaagggtctgagtagtgtgacattgtccagagtggtgtgaaacgctgtggagttggcaacgtcacctcccaaacccagacacgtcaaaagcaaagtcatcttacaaatatcctcaacacagtctggcaacagtagataaaccctcgtatacgaattaaagtagtgtctgacgttgttgtatagtagtttattccaggatattacaaagctgtcagggtcattttgggccattttttcataattttccctcaaaacatcacattccaaggtgcacacagtattttgtacagtgtaatctacagtgttcagagtaccgtgtggagtagtgtgtacagtgtaatctaaagtgtgtaaagtggtgtgtggagaattgtgtgaggtattgtgtagtagatggcaatgtgtgatgatgataattgtgaggtaattattgagtttataagcgcaaagtgagggagattcaaactgttccgtcacctccgttggtgtaaatttactcaaaattttaaccacagaattgagtttctggttgctgatcgtgttaacatttgtgattgtgttggagtttgttggttcctggacgtttattatcacgcttaatctcatgtcgtctgattccagcaatttgtcaattgtgtaggtgttagaattagtagaaaaaggtgagagggagctactattcttaggggatagggagctaggggaagaagagggggagctagaggaagaggagggggaatgtaatttggcgggagagtgtcggttaagattcctttgaataatcaagtgcagtaaaattaaagaattgctattcttcagcaataatgccacaaatctctttttatccaaaagattggaatttttgggactagttgagtttttggaatcattaaatttctcagaatttgcggaatctccggaatttcgggaatctgtgctagagaagcatttggtgcgtaaatttgcccgaaatttcttatttatcaaactttcgtcaaacataattaaaaataaaaataaaaataaattaacaataaagtgataaaataataataaaataataaatgataaaataataatggtgaaaaattgttggtgagtatattgaaggttaagggatagattacacaatgaattacaattatattactcaatcatcgtcctacaacattttcaactattcaccagagttaactcatgactacattaaactcgtgactacattaaattcacgactaaactagtgagtaaactcgtgactaaactcctaactaactaaactcgtgagtaaactcctaactaactaaactcgtgagtaaactggtgtgaataggttgaaattgtgtgagtacctcgaactcttcttcatcggcttcgtcgaattcgtcggtatcttcttcttcttcgtcttcttcctcttcctcgtcctcgtcttcctcctcttcctcctcgtcagacgagtactttttcttagccacagttcgcgcagactttctctttggctggtccgtcgaagctaatcacatttttcaattaactttatcaatttaattaatttaattaatttaattaatttaatttaagtatttttagataatttgatttaagtatttttctggtaatttaaggcgtttttggaaaatttcgcttcccaagtatagccaaaattaacggcaaattgttataaaaatatttaccaaaatttaaccatctaactacaataattaacattttaaccaaattaacatattttagctaaattaaaattagctaaattaacataattttaattaatttaaaataatttgggtaattggaggtgtgaataggtatgagagggtagtgggaggatactttcgctaccatcgtcttcggcgttttctacatcttccacatcttcaggttcatcctgctcgtctaaatccatgcaatatcacccaaaaatcaaaaaataacaataaaataataatatttaaatattattaaaaaaatattgtaaaaattattgtgtaaagtaggtatgattaccgtctgagacacggggtcgttttctttgtagttcgtcgtctgacattttgtgtagaaatgaagttgatctatggtatatagggtacaaataactccgatgatgttaagagtaaaaaaagtgtaatggtaatttaaaatctaataattaatttgtaatggggttatcaattttaatgggagacgttaatcaacaacatacatcatcttttcacaccttcactcaattcctacttcacccaaaccataaacattcatactgcacccggatcccagcagattcccaaatccaaccagattccacacaacatcattactacacattcactcattcacacagtattttcccatatcatcccattatattatactattatatactatattatatagtatggtatgtagtatggtatatggtagtatagtacagtaagtagtatatagttaagaaaataatgtaatgtgtgaatttatgtgtaatgtcggagtggactagacataattctataagccgtaggtcgtaggatcgaatcccactcctgaaacacacaaccaaccttaaaattatttaattaattaatttatttattaatttatttaatttaattattaatttatttgtgttgtttgatggaattaattattttgtgaaaatttcttttaaccagataatatttttattgatagagagtgataactgttaataattgagatttaagtttggattctaactccccacagttgtgtagtgacttgaattacttttatcttatttatcttttattgttattttgagtattggacgatttttaatattaaattatttcaccttatcgtaatatttttttcctctacttctgaccttcattatgaggtattcaatagtatttccatagttattgttataatattaataagattcatgggatgattgtagtaaattatcttcggatcgattgaatgacgccgttacggctgttttggaaggctcaaaaaccaagaaacgaaacttcaccgaaaccgtcgaattacaaatctgtatccaaaccattcagtcccttatttaccccattatttaccattttgcaacctttctgataattattttactatttacaattattttttgccaaatatgttattgaagcagcagaattgattgagggaggaaaattttaatttgctagcccgatcaactttggcatttattttttttctactattttgaataattatttaataaaatttgaccgattctatctaaacaataataataaataatgtttatagctctgaaggactatgacacacagcgtgataagcgttttagtggcactgtcgtattacaaaatgcgccgaaaaagaacatgaaagtttgtgtctttggggacgctgtgcactgtgacgaggctaaagcgctgggcgtggactttattgaccttgagggcctaaagaaattcaacaggaataaaactttagtaaagaaattggcgaataagtacagtgcgtttctggcctcacagtcgttgctgcctcagatccctcgtttcctgggaccaggccttaacaaggctggcaagttccccactcagctactccacactgacaggatggaggataagattaatgaactgaggtccagtgtgaagttccagttaaagaaagtgctctgcatgggagtcgccgtagggaacgtcgaaatgtcacctgaacaactaaaagccaacattgtattatccgtaaactacctagtttcactactaaagaagaattggaacaacgttaaaggactcaccatcaaaagtaccatggggaaaccacaacgcatctacggttaaccccttaactttggttaacttgttaacttgttaaccttttaacctgttaacccttaactttggttaacctgttaactttaactttggttaactttgggtttaatgttgtgtcttaaagtgttgcttgactatgtgattgagtagttagaacttgtgtgatttgactggtgaatatttattattttagatatctttgaggggtttaaagagtagttagggttagattaaggaattttatgtttattttgttaatttaggggaggttataggattttttgggttaataatctaattttttaaagtaattttctaataatttactaataattttaaccaaatttatctgtttttgggataatagttggaaaatttcggtctaatagctgggtaatagtggttaaaattaccatggtacagtacccaggtacctactattacccaaaattaaacactcaataacagcattttagacctaaataaaagcatttagataactaaaacgatgtgctaaatatgttaaaattgtttaatttaattttctcaatagtcgaaaaaaatttatattttcggaacctaaatgtcactttttggtccgggccatttcagaccaaaattcgaaaattttaaaaactcgaaatttccacaaaatcaacagaattaacctctcttagcatcagaaaattataattaactcgaaattatctgtgtacactgaattatagaatgtacttgacaaggcctggataatcaacccaggggtgacataactaatgtgtaaacgtaaatttagtagtaaaagtgttaaatataacttgttagcctttaaaatttaaaaatcttttttacggtgtgtaaatcatttgaacactttagctaacttgatacctggaactaattctactgttagtaatttaacacttttaattgagttctgtgagttccatgtcatattttaaagggcatgttactaattctgatttatttgtctttacgtcgtaaatgaaccagactgaaacatcttctccacagtcctcaaaattatgagagaaatccttataactaacagtaacagcgtcaccaagattaatcatacaaaatgactctgtaaaattaaacttcaactcaatcctcgagagtcttaatgagttttttctaatgacctttagatcttcagtattgaacatttctgttgatttatcaacccagacatcagaatttgacgccctgtaaaggaatttaaatgtgttgttttccaggacaattattaaccacttgtcatcgtcaatatagtaatggacttgttttgcgaaaagtccatttctctttttacaccaaattaacttatctccttcaactattttattaataagttcccaattattcgctttgtaagatttacaattttcgctatttccgcagtctggattcccgtatttatttgtcccaaggtccacttgtatattctcaaacagtaattgatcgttataatctatactaaacttacgatccaggacatgttttattgattcgcagaaggagctaccgaaacatctacccacaaatacaattcttgataaaacaaaatttatagctctaagtttactgcgttcactcaccgtaattattcgaaaactattaaaataattatccaaagctgttgcagctctttctttataatttatagccttctcaccttctctctgttccggagtcagatggtatccaaaatcacaatttactggaatagactttaaaatattcttgaataactgaggttttatctcaagtgtaaagagatcaactgataaacataatagaattccacttgagtcattttgttcaaaaattattctgtccttgtacttgaccttttctaccacaaacgggtataaaataatgagaaaatggtcataaaactcaatctccgagtaataattgtaatacctgcgcatatcatagtaaaaccgtaaatccgagtccacatcacggtaaaaatcctgatatacaccaaaatcgtcactaaacgcgcgtaaatcgttaatgtcaaacatcgttggcatttctttccatttcccgtcccagttttttctctctagaaatagcactttccgtttattcagtactaaagctataaaactctttttacctttagaatagactaggacatgacttgcaaaataatcctcgtttccggtccataccacttcagtcacgtttaccagactattaaaacggattagctcttttcccctcatgtatgtgtaatcatttccacatacaacttcaactaaatttgatgacactttctgatgaatgtcaagtgttattaatttatatcctctcgggcatatcctttcttcacttttactatgtcttttatttctattgccgcgactgattgtgaatagataatatatagcaatatcagacatcatgtcagatctaccgggatcatccctgaaaattttaaatcttttcatattaaccacttttataagcctttttaagatatttttgacatccggatcattagaagaaagaagtcttcgtaaatgtccttcaaccttttgttcttcagattcaaattggtcatcttgatgttcagtttgatcttggtaagtttccagttgttcatcttgatgttcagtttgctgttggtaagtttgagaaatttccatgttatgaacctaaaatcaaagatttaagagtgttgatttttagtgttatttataaattaaattatgtaatctacgatggagttttttttttgatgaattaaacagatctgataccagctttcaatacatctcatctaacattttacatacatctcatctaacattttacacacataaattgtcaaaaatgaaaatgagtatatatttacgtaactattagtcttaaatttatgtaattagtagtaaaaacactcaatttatcacaatggccgtcagtggtcaaacacgcattttatacaaaaatataccaaactatacataaattagtgttatttacttataagcatcttcaatgttagttcatatctgagattacacatagctttagaatggttactgtaatatcttaacatcttcactggttcctagtactttcttgtccgctatccctaaaatcgcgcggtatatcgtatcctcaggcttgcaattgtcttcttgagtgattaaattattgaaaaactcaaactctttcccctttttaaggttaaattctcttgaaaaggctaaaatgggttcctttaaataattaatcatcatatctttaattttggctttgattttgtatgccaacgcctgagcctcgaaattataaaacggttgagtagtgatccttactagtaaatccttctccttctgatcaattagatcctcaggggcacttttaagcttctctacatatgttgccctagcccagataggcatacagtttttggctatgttatacaatacccaaattgcggtagattcagcatatccatcgacataatttagtatagcatttgtaataaataaatcccgaatactacacacagaatcatcaaaattaggcgggaaagtaaagtattttttcactaatcctttattgtaaaacttcttaaacactaagtgatacacagagtctagtttagctcttagctctagttcctcgggactgtagttaacaggagtatttatcaccgagtgagtagtttgtggctttttagaagttggaattttagacgtaatacgattgtgcatagattgaccattggtgttagtttcttgttccaagtcaactgagtacatttcattcagcctatttttaatatgttcgagaaggtcagcatagttaacgccactaaaatgttttctaaatataccggcaaaataaattcgaaaattcttgtctatacttgccaagacaaactgatatatttttttctctatctgcaagttttctccttcagtcactaatctgctaaataactcaaactcctcatccttaagatcattattagcttttgaaaaggttattaatttttcatttaagtagtggacgataaagtgataagcttgttttcttacgtcgacagttggttccggataacctattggacgaggcttatttttgatgaattttgtcaacaaatccttttcctcctgggaaattagatgccctggagcctttttcacctcgtgtattaataacggtttgtgatcaagtgtaaaagatctttgttgtatgtcaacgatgagacgttcgactctttttctaataatagcgtcatacaaatataataaattgccgctaattgaggggttttgagcaccgtagatgggatcattgacggggtgaaaactagggtcatcaggtagaaacggtttattataattcctcttaagcaacaaacgatagagagagttaagttgagatcttaattccttttcatcctcgggagtgaagatggtaggagtaacagaagtgctagtcactttctgttgatcctgagtttgtggattataagagattgaaagttttgattcaatagaatttgaaatagaagagactacatcagagtctaagcttttagaagctgattcaggagattcaactttctcagtatttgagaaaactgtgtgaattgaagcctgtgtaccgagattggacttaacggtgacatcaggaatagtagccatttttaaatatatttaaaatttttataattgataaaaattctaaataaaataaagtgaattaagaatatcaagatctaaataagggaaatgggataagtagatctgagtgctaggatctgagttactattgtaatattttgaaagttaaaaataacaatacaggattaatatataacataaatatgattaactttgcctggatagttcaatcccagggcatctatctccatagttatatacctagagtacctagtacagtagaaccgatactatattattaaaggagtaaaattagaatacaccacgaccgaaactagtaacacagtagtagagtcactattgtaacaggtaactgtaggaggaggatttcctgtttgatttgaacatactttatctactttattacagtacattttaacagtattacagtatattttaacagtattacagtatattttaacagtattacagtatattttaacagtattacagtatattttaacagtattacagtacattttaatagtattacagtatattttaatagtattacagtatattttaatagtattacagtatatttcaggacgaggtttcgaacccagtacctcttggtcatagtaaataggtgtactccactccaccattaaaggaatagtaaatttctagtatttggattttaactgtgttcatagtgtattgtcccaggataatatcctaatcaagtaaaataaatgtttattcttagtattaaagatatttttaagtattaagtatactatagttaagtaatagttcgggtgaggtcccccgggattggattatccgggctaattattgcttgattttggagttcttggtagctatacaagaattcattggcttgaactatatactcagtggtcgcccaattatatactatccggaacaacgtaaaacacatactataatactaattattctatgtatatatttatttttttaattataatttttatatatttaaaaatgtcaaatctgttgaaaaggtgtaaaattttgaaaaacaaattctttgaaaatttgtaaaattttgatcagaacccaaaagtggcatttaggtcccgaaaaaaatacaattttttcaactattgtgaaaattaaattcaataattttaaatcatttctattatcattttagacataaattacttaaatttaagaaaaaaagtttgttattgattatgaaatgctcgattacatacgcctatgggacctactttactagtactataactataataatattcgttaactgcactctacacactattatctactgttatctacctgtaaatgagaaattatcaggaaatcggttagaataaaatatattatgggattttaggaatcatgagaaaagaggtactaggatccaatgaagataaaaatattccaataaactattataaacatgtaaaattattccagggactattattctaaagctacgtgtaacctcaataactgactgatatttacacaattttgagactgataccaatgatgaagttgaccaatgagtaacagctctagcataacaataacttgctaatttaactacactttatactttatggaatctaatttatatatactttaaatttactatatagtatcgattgaccaaagtagttgctcaaccaccaacggctaatcaatcaaatttaatcctttcaatactcattatatacatctaatactacttgtatatgtaaatgcatggtcaaattttcatttttattggaattaatgcgtgtgatgcccctaggtgccgtttacctacccgctatgatgggggaagaactacacattacagggtctcgcccaacagatatttaataaaatttactacattcgacaagcaacaactagaaacaactagaaaataacaggaaaacatattttaccagctgaaaaccataattcaaaaatggaaatcatccacgttgacgaaactgacttacaagagtcccgtaactcgaaaaatccaaaggtaagaagttgcattgagaagcttatgaatgaagccacaaggatagaaattgaaaggcttaaaggggatcccaatgtaactgctaaaattcctgcccatgttctggactactttgtatcaatcataggtactggacctactggacccagtgtactaagtgagcacacaggagtcaacagttcacaaaatgttcagttaattaacgctaattttcaacagcgtgaatcaactgacaaaattgatgtggtagttggcaataattacaaatctctggaggccaaaataggttacggaattattaagttatttgatggacatgaacggatttgtaatgaaattgaccctgataattacttaacacatgttttactttataaaaatgttgaaaaccgtttcatagcaatgttaagaagagatagctcactaaaagttctaaaaaaagcaaatgagaaatctaactttgaagaagttccaaacgattacattaattttaatcatttacaagtggttaagaagaacggtgaagtagcaggatacagggaattcattaaacagttcgaaggatgctgtctcaacgtatggtttccatttttgacagataaagtaatttacaaagggaacaacatttttgatgaaaacgagacaagtgtaatacttgaatctctgtcacttaatttattaacagaggagcttaaataccattcacgtttgctctctttgtatagcctatcagttgagttgggtttgaaaaatcaaacatctgatgcacaaagtgtactcacgcccatttctcatgtagaaattggagaaagtgaaacatctgatgcacaaagtgtactcacgcccatttctcatgtagaaattggagaaagtgaaacatctgatgtacaaagtttaattccgagtatttctgatgaacaaaattatgttttgaataaaactgacgatttgtcatcacatttgagcaaaacatatatagaagcaaaacaaaatcccaagggacaagatcataagatgcagaaaaaagaaattttagatttttgtgagggacttttggtcaatatggattcaagtatacctgatcgaccctgtgaactagtaaaaacggttcttgaaagtaaagccaaacaggaacatactccaaatgattcagggattagatttatggcactggatattaaaaaaccagcatccaatgaatgtagttgtaaatcatacccaaattccaggttctacgaggcaccggaaaatacattatttaatcaaattttggagaaccctagggtaatctgggaacacgaggtaggtgaagaatgtattaaagaagtttatcattattttgatgaaaatgaagagtggttggtaactgttgataacgataacataactaaactttaccacaagtcatcaaattctgattattggatcgataaatctggctacatgttggacaccagagatttgaaggtcattagaaggaactcagaaccactatcaccaatggatctgaagctttatttcagagattcgttctgtattctacctcttggtgacgttgttagtgttagttacagaggtgaggtttatgtccttaaagaatatggagaacacctttcagtctggctcttttacaattttcagtcaaataaggctgtttttatggtaaagaaagaggaaatagtgctccaaaggttttgttgaggagttttttctgaaacttcaaagtctcatcaaaacttatgtactgttttactggtctcacactggcctgaacaacaattttccaatttgtctatgttttacactttaatatcattgattacttttactcaatatacgtttaaacactaaattatctcacaaattccagttatacgggcatatttacgcttgatcctcactatatgtaccactctttactgtataatactacagtaccaaggtgaaaaattgtattattttatatattaatattaatgtgttaaccctgttcacagtgttgagaattgtgtatgatgtgttagattctttaagttgtgttagattctttaagttgtgtcagattctttaagttgtgttagattgtgtatgtggtgtgattcttaataataattttcattaaatattatttggaatttaattataataaatttataattaaatgacttcacttggcacggtttcctctttcggtaatatcaaaggacctgacgttcctgatttcgtatccaatcttacacaatcttacaaaaaatttattattttttacaaaaaatttattgttttacacaattttatcataattttatcataattttaaaaatttaaaaaatttaattattgaaagtttaatgaaaaatttgttttagggtgcgtttaaggtatcgaatgagttatttggatggaagaataaaagaaccggcgaagtattacaacacaggtcatccgacgtctcctcaatcaccttcgttaaaaccaactccagtcctctcctacacaattattcaacctattttacccaatttattcaacctattcaacctcttttacctaaattatttaaattaaattgtttaattgagtgaaaaatgttgtagatttgtaccaattgagaattgagttgaatgagtcaaagcaatttaaagtcttaagattcgacggattcactgaaaaagtctcaaacaatatacaatatcacgagtcaacaaatttaaattatttaccttgtatgattaatggtgttgtagaatgtgctggatttgagtaagcattttgaggagaattataagatgtcttgtgagaaggatgaggtttcttgtactggttggcattgggggacttatgaatttgacaacaccacgttcagactcagaattaataataattctggccttgacattgatgcccaatcaataattcaggccacaattccttcaaaaactgatcttgccattgagctcaagaatgttaacacgcttaataattctgatgaacttgttgaaatcaggttctgccttccaaataaactcgatcccgaagataatgaaattcaactcgaagatcttaaacaagtgcgttacggtgtctggtctaacggcaccagttatttattagttagttatttttctactgagttagctaccccgatgggactctttttggcccagggctcctaactatcctttatttaccttaccccagttactattctattttgcaacctgttggtatttattttactatttacaattattttttcataaataagtggttgaagcagcaagaatgggaggaaaatttcctcgataattcgtagcccgatcaacttttgcatttatttccaaaatcccattttttacaattaaaatttgtgaattatgactaaataataattaacagtgttaattatgtgtttagacgtttttggtgaagagtggtttggatgagatgaagagtgagaagatagcgttattgatggacataccattaatagtgcccaggggtcgttatgaaattgagttcaccaaaagaagtattaaactccatggcaaaagctacgattacacccttttattcactaatattatccgaatgttcctcctaccaaaacccaacagcccatacatcaattttattctaggtccgttacggtgcttgtaccaactcacttgttcattacttagttatgtttctacagagttatatcactcgatgggactctttagactcgggggttctcatttctccctgcggggcactattccctagttactcctcatactatagtattagctattgattactttgttgtaggattatcccaatcgatgagacagggtcagactcgttacgcctacatagtaatgcaatttgaaagtgaccatgagactaaagtcgacctaaacctccaagaacaagacctcaagcaatacaaactcgataaagtcctcgaaggtacactcaacacaactgaataattccttaggcaagacgtataacgtcgtctcaaggttatttggatctttagttaaccgctccatcgtcgttcccggagatttcaaatccgaaaaaggagattcagtatacccactatcaccacctaacctcagctatatactccactatactatatactatactatagtataatatgcttggtattatagtataataatgtgtgtaggcgatatcgtgtacgtataaggcgacgagtggtcatttatttccgttgaaccgttccctgttattcatcgtcaaacccgtcattttcatcaggtaacacaataataatacaattgtgtgagtagatttgaggacattgtgagtgttgagtttagcaggacgggtgcgacgacacagaaccgtttcttcgccatcctcgtctccatgcgaggcaatatcgaatacgaattcaccaacatcgataaaaccgaattcaaagtattcttccacctagttttctacagttaattattagtatatagttaattattagtatatagttaattattggtatatagttaattattggtatatagttaattattggtatatagttaattattggtatatagttaattattggtatatagttaattattggtatatagttaattattgagtatatagttaggtaatgtggttaaatggtattgataattgtgtagtatttgaatgagtatttgctgagtaaggacataagggtgaagacgagtgaggagacggagcacgttgacaacacaagttacaacgaacaggaggatcaagaggaagaagaggacgacgaagaagatgaagactttcaagacggtaccccgttacggtgcttgctcaaaactactcagtttactacttactcactttttcactactgagttaattatttactactgagttaattatttactactgagttaattatttactactgagttaattatttactacttagttaattatttattgctttgtcaattccccgtggataatggttaattttacagaatctgaagaatccgaagaagaggaataaactacacaattttacaatcttaatttataattttaacaatttataatttttataaaatttgtaaaatttgtaaaatttgtaaaatttgtaaaatatataaaatatataaaattttgggaatggtaagatttacagaggctgaggaatatgtacaaaagtcagctcaaagtgctatactacacaaacggtatccttcctacaaatttacccattatctactccatttcctcatagtaataattaaacttgatgaaattgaataatttagtaatgctgtgagtgtgagatattatgaagacgaatttattaatcatttttctgaccctaaaccacaaatcacaatcacttccctcagtaaattccataccattaatataatacttgtagtatatacaataagagtaaagagtataagaatggctttggaccgatttattcagttattcccaggagaaacagtacaatttgttaatctcggcagtggatttgataccacgtcattttggttaatccgtaaatacaacaatgttgtgtgttttgacactgatttccccgatcaaatgaagagtaaatccaggattatagccgaaaatgacatatttagaagattgctaccagatctaaagctggtaaacggattcatcaattcaactaaatacaaaaccgtaaccaactctctcaaaattgactaataatttcattaggcaacatttgatttaactgatataaacggatttgacaacttaatcagcgccggtttatctccagagtaacaaccatataacacagtgtgtcataggctacctacggtatatttggctgaagcagttttcatgtatattgacacaaataaagttgatccagtactctttaacttagttctatttgcccataggtactccggaaattatcagaattctctacttcttgtctcatttactgggaattcgtatcttaacactgattatcattgtttagacaaatcctaatgataaatttggtcaattaaccattcaaacttttaaagtattctctataaagttaattatttctaggaaaataacattgaacttaccggcgtgaaatattcaatagaagaacataatcaaaggtactcattacccggtttattcagcatattaccactgtactacagtactttatgtactatagtagtctatggagtatagtactgtatgtactacagtactgtatggagtatgttgtagatatttggatttgggttgggacgaggtggtttcggtaaatatgaacacaatgtggtcactcctggatccgcaagataagcacagaatcaaagtaaaataatttaattattagtttgtttaggggcttgagagttttaatgaggtggaagaacttggagtcatttgcggccacttaatgctaggcttggctattaagaatttcaaagaatcctgggaattcatatgtaaactaagggaaacgtccgggcaacagtcctacacataattccacaataaattaaaatgttaaataatcttcataaactctttaaaaatatttcatatcatttttacaattattttattattttattattgcgttatattgttttacacattacccgctagaactcggtttagaaaaatttggaagaatttggaaaaatccaaaatttccaaaaattctcatttcaacatgttttttacattatttaaattattatattctgtgagacttagttttaatttttaaagtttaattcctatggattcgggcttggttaagaaaacatcagatttaacatcaagttttaaggcgtacgttttaaactattaataattggtgtagcgtagctgtgaagcgtggctactacgaagatgaattcattgacgcatttgtcgaaaccactaatcattctcctctcatgaacatttgttagtatttctagtgttaattttactcttagtacataccattcgtacaaattcgttacgtctagttttggacaaattcgtgtctcagttccctagggaaagagtgcaactagtaaatcttggtgttggatttgatactatttcattctacgccctgaagaattatgagaatgtcgtgtgttttgacacggatttccccgatcaaatgaggaccaaatccaatattatagcagggaatgacatattcagaacactgttacctgatctcaagatggttgacaactttgttatgtcagaacgatacaaaattgtaactcacacagaataatagttcattaggtaccatatgacttggctgatcccacagggtttaacaatcttattgaggctggcctatcttcagagtaacaactttagaactaatgtgtgtcaggttcccgacgttgtatttcgctgagtttgtctttatgtatgtcaaatcagaatttgtcaatgaggtatttttctcattacacatccacattgtgtaggtgattgaacggttgtattcattttctagtgctgattctgtgattgtagtttcagaatttgtaactactcaaacttaatttattatttaggtctcgttacccacagaaattaccaacttttactctaaacttcttaaagtattttttaactgttaatagtttagtgtgcaggagttacagcttttggaccttatgaatatccaaatatcaaatcacaaatccagaggtatgaatcactcagttcactggatgagtaggtacagcaggcgctggaatgtgaagttggtttgttacagtgaattctacaatctaaacacctcagaagaagaaaaaaagagaatcaaagtactaatttacctagtttattatgtgtagagtttggaaaagtttgagaaaatgagagaattaggcgccttatgctctcacatttatattactctactgtataaaaatactattcccactgtgatatcactgtttaacgtggaaaactatgattacacattgagaaatgattatgacattccctatggattggagtatgattataatactgaagttgatcttgactgtttctatcacttggatcttggaaacactaatttagacgagattttttccagtaattctagctccagctttctcaaccaattcaacgtctcagcataacatacaaattatatgtgtaatctaaggctaaatactgggaaatagttaccggactataaaatatataaattgaggaataaatttgaagataaagttttagttaatttgagaaagctaggaagaattttattttttaaaatttgaaattattttaatattcttaaactggggatattcctacttaattatttcaaagtatattccacagtatattccacagtattcttctcctaaatgttaaattattattttgagggttaagatatttgagtaattaatggtggcgaattcgccttctgacgttgttaagacaagtcactgtgtttgcgattttaaacggtaaataataaacttccattaactaatttactgataattgatttagaagtactgtggacaagggatattatgaggataattttattaaatatttctcttctccttctgaccagtcaccgtcacttcacatgtgtaagttttatactatcatcttggttagggttttacatgcgtgtcacggctctgagaactttgttatcagttttcgtcgagtcgtttccccaagaagttcaatttgttaatcttggcgctggtctcgatacgctgtcattctatctactcagtaaatacaagaatgttgtctgttttgatttggattttaaagatcatttattatataaaactgaactcttaaccaagtctaacgggttcgaatttttaaattaccaagtcgttgacggactcgtcaaatccaacaaatacacaatggtactacttactcatttactatagttctcgtttgcctggataatacactcgagcataccctaactatatacttaatcttaactatatacttaatatcttaactatatagttaataccttagatgtatggttaataggttaaatatatgtgtttaattgttgtatttatgtatgttgggttaggtggcgatggattttgaggatttggaatcggtgtataaacttgaaaaattcggactttcaagacatcttccaactgtattcttatcagaattttgtcttacatacgtacaaaatgatacttctgaccaagtaacacactccgacaatactaatgattaggtaataaagtttttgagctccttttcctccaaaccctcggcttacatttttctcgattacgtatgatcaattattgaatttgttgttcagattgggagctggactgcctttggtcaatggtactccaaactctttgaggtaacaagtattaaatatattagtttaaatattacactgtcaatgcgtatagaactttggagctgaatttaaatcatttaaaaagtttgatacaatagaaaaacatactcaaaggtatgatttaacggttgcatagttcattagatataaagaattgggctgggatcatgtcatggtcaacccaatgagcttcacatacaacgaactcatcaccgaacaagaacgatcaagactcaaggtaacaacttaccactgtgatattatgtaggacctgagtaaatttgataatttcgattactttgctgtgttaccgaatcacacagtgattggtgctgctgtaacgcagaaggaacaattgtctaggctgatagaattatatgacatgacaaattatgtcacaaaggagacatcgacactaattccatatgacgtgggatttagaaaagatggtttagacgttgactatttcaaaaaaatgctacacccatttgtctaatccttaacatatcacttactaattcgtaatatattcgtatattattattactattaattgtgcgtgatatggtcggttgagttggagatttaatgaattactgtagatgagagttgtagatctgggggtaattaaccttttaatatagtaataaaattgacaattggggatttgagggattagaataatccgatgtatgaattggatttacctaaggatgttagattctggtcacacttcgtattattatccaagcggtaaggagacgcaattatcctcagcagttaatggaatctttagaatcgccgttgacaaatactattatgaagatgagtttatcaagtatttctcatcccaagggacccaggatccactcctaagtctcagtaagttcattactttttattatttttttagcaagctacgtcagagtcgttgggatcagaactattattgaaacctttttgtcagaatttactggagataaggtccaatttgttaatctaggctctagtctagacacagtgtcactttatttactcagtaaatatccaaatctcgtctgttttgacctcgatctcgaaaaggaaattaaaactaaaatcgacattatcacacataccaaagagttgttgagtttgttccccaactataaagttgagaaattagatttctattccaaccgataccacgtcgtatcacactaaatcttgagttatttatagatttagttatgtgtaaaattagttatgtgtaattgtgtaattgtgtaattgttgtagttggagtgtgatttgagggatgtgaggaatttggacaagttgaagagtcatggattctcttatgaattaccaacagtttttctcagcgaattcgttctcacatacttagaaaatcatctttccaatcaagtaacacatttaacttttgcatcaccatttaactattgtcacatgagtaaattgggtattttaggtgataaagcatttttgtgataattgtaggagtttccgtttatttgttgatttggaatatgtaaggtttattacatttataatatttcagataaagcctaacacatctttgttcaagtggatgtactccatatgggtaacaatagtattgtaaatattttccaggggaaactcactccaatgcacagtttatccgattatttcaccaaagaattacaaattcaacggtaacccactctatactatttacatagttcagagttgattgtggtacaggtataaggagttgggctgggatggtatattttcctgtgattacaactttatttataacaattttatcaataaacatgaacgaaaaaggctcagagtatttttacacagttaattattatttatactcattcatgaggatgtttagagtattgagaattttaatgagatggattcattgggactatattgtagtcaaccattaataattgtcgcacacaacaattttaatcattatttaatcaacaaattcaataatcttttcaaagaaaaagaaaccaacactaataatactagaaccaataacaccgagggtgataataccgagggtggtaacgatgatgatgagttgttaccatatttgagtgatgagtatttggaaaaggatcgtagtcttgatccgattcatcaaatgttctatttcttcttcagagataatcaaccgtattttaatccttcctaatactctacataatattatacttagtatattggtatgcatatatttggatatgcagatctgataatacatgaatctagaagtgtctaaaattattagatcagttgatataatttaatttaagctgagaattatgagtttttacgttggttcgcataacattttaaacggcgattcacataaacctttgggggttgttgatcgtctagaacctgtgcctgttatagtaaacattgaacttaacaggaatagaacacacgccgcaattgttggacacggatatacaccgacttcagggtttatatttaacagagttatcagagcagacagagaatctggcaaggacgaactggtatggcaaactacaaaccccaatgaatatgtccatgaagtaaactttactgataaggcaaatgaaaatctactttacctaaaacttgtaaatggagatgttaaaaaaatgattagaaatgacggagtctggtcagaagctgagcagttgactataaacataaattgcgaggctagttctgaagagcatcaatatactgttgcgcatatacttggggaatcgaaatgcagagtttatactcctagacatttttaccctattaaaagggtcgtttgtcaagatcccacatcagagtcagaaaaaaccatctgggaaactgaacatcctagagagttttccaaaaacgtatcggttttaagcgtaacaaagactaagaatggatatcccgataaatacctctgtatactccaggaaaataacaactatctcctattcctaagggacaacgaattgaataactgggttgacataaccaagacgagggtaaaattgagcaaattccaatttttctataatttcaagaagctcacacctgaggaatatgaagtgaaatacgagtttttaaggtttaaaatattattcaagtttggctgcaacaaggttaaatatgacgggaaaaaattaattaggaaatacattgcaggacttgaaattgatttatcagatagtagtattgcattttgcgaccatagcataacattaattatgaaaacaatagttaaacatcctgacaatcttcctggagatctccccgaaaatgatgaagatgctgatgaatctggtttaaaaacacaagttatctctattaaataatttaaaattcagagattaatgtttaaatttattagcccctagatttaacactttaaatattaatatattaactatacactactatactactatactactatactatattatatatagcagtggtaacattaagtttgaagtatatctttgaagagttctcgtacggaatcagatttctccaatttcttttggaacaacttgggattcgctttaaactctgacaaattcattagtttacaatatttgggcgattttaacttaatttcctcataatcctccacaacctttgacaaaatcttaaacttatcctccggcttcaatagtaaaaaataattatacaacacataacatccgttcatattaaccgacaatgctacacaattagactcaaacgttgcgagaagcgatttacagaacttatcttgtatgagtgaaagtctgggatcaaacatgttttgaagtacccttgagaaatgtttatcacaagttacctcaataaacttcccgctgtcaattacatgtttaaaaaagggtttaaacgaggaaactaggtctgagattatggatttttggaacttgacaaggtaccccagcactgaacatccggccggtttaatgtgtatatcatctctggttctcccggctgacaagactgtgtaccagatctcctcattcttttcaattttaaaatcatatattattttcctataaaataactcctggcatgagtacaagtctatacacgacttacacaacttccacaatatactggaactcctcccattcatcaatgacacaatattcatatctaaacaatacaataccgtttgcatacttaatatttactatactaatgagtaaactgtgtagaaaatactgtgaatcatgtattgtaggtgtgaggattggaagtgtgggttttcgatgaaggcttgtacgacgtagtttgagtagttgttttcacagagtgtttgaaactcgttcgagataagctcattgaagatgtaagtgtattcatagttggttgaacatttaagacatgcctctaggatataacttgagttcttcacactccgaaccactggtatacactcctttatcactcccattaaatattttctatccactacaaaatatttggttgactaagcaaatttactaaataagttagactaagttataggaaacttaactaagctagagtaagttatacgaaatttgactaagtaataagtatgtgagttacgtagatttgcgattttgagaatgttgatgtgtaggcagaaggtagaagaagcttgagtattcaagagtaaattcttaaaatctttaaacaatatctcactccaactcgttaataccctcacacgccagtccgccacctgatcaccaatttttaaagtgtaaattgagtaaaattaagtaaaattgtgataattacctctggaacggttagattgtcgaaattattacctgtaaaagattaatttgctgtgtaaaaatacttttggagtagtactgattacgatcttggacaccaacgagtgcaagtattaaactcctcaagtaatgtgagcccgaactatgataaaacatctcatataaacattctctacaacagtttacacagtgttaagtataaatgactgttaagtataaatgactgtgtaagttggggttactcaattttcttggtaatgtgtattagaatttgatcaaaatcatggttaaatttgaacgctgtcatgcagtttaggctattttgatacacagaggagccaactgggtccttacaagcctttataaaatcacacttaatgtacatattcgtcaagattaccaggcataagcctctcttttcctctaaattctcctcatcctctaccgaggcaataaataattcgaacaagtcgtagatgactttagaatatcttggagtcacagccaattttggaatctacagaatttcaccaaaattcagataatttttcactaattaaccgataggagtaaaataattgaataaaataattatttgtggataaataaactaaatatttttattacgtgttggctaatttcggataatgtgttgtaagagagtaggaatttatcgacatgtgaggaatcctttagggtttggtttatttgttgttttaaactattcaagtaatttggaaccttctcaaattccatcttaaaacactaaaatttacacgttacaactaatttacataattaattttttattaatattaattttcttctcaagtgtgttatgtggtagttcagtaaatatcttacacaattaggatgaataatgcacaaattcgtgaaccaagtacccttttactcagttaataattatataataatattaataattttatagcggtagagagggtattatcggtgggttcaattcaggaagattattacgagtttaagaacaagaatgcgattaaaagagtatcagatccggtaagtgagctttactggacatattatgaaaattataatcataaaaaatcaactaaagctgataaaaataatcccagcatcatacttttacatggcatctgcggtaccgctgggtgttacttttatctcttcaataaactatcagaactggtatttccaacactattatactcttaactactgtatataacatagatctaataccctaattctacccatcttggtttacttgactcccggatatttagttacaggcgattcccctaggggagttagttactcatttatacacttactatacttaatatttaataattatttcaggggtttcggtgtatatctgctcagtatcccgagtatgaaactccttatgagtggattagtggtttttctcactttttagagtatttaaatttatataaaccctgtgtgtttggcagtgatttgggcggatttctactccaattattcgttcaatcctacccaaacctcctaagctccatcatactatgcaactcctatcgcaagtacctctctatagtatttttattttacagcttaattactcatttttacttattttttacttattacttaatttatttttcatttaggactgacgactttagtatatctccggcgttccgtgaggtgtatggtaatttgtatatgttattaccgcatgtaatattaaagaatttgtatattgagtattacatttgtcctaaaactgaggatatcaacgagagagtcgagttgagagaacaatacgccaaggaattcatggcttgtgaactcgatcacatctcagccagtgatctcggatccagaatcacgtacccaaatcacacaattatcattattaatcctgttgtagactacagttaacgtgtgattatgtgtataataaggatttaaacgggtttagtcaggagaaaatacttctcattgaaactattaataataacataccacacaatctcaaacaagacattaaactatggtatacacatactaaaccatataattaagtatataattccgtagttaagtaaaagttgatagttaccaaatttgggttgtctatgcatttttaaccttatacccataccattgtgtaggtattcgaattctaaagttggttatttgaagagtggcggtgattttccatatctaactagacctgatgaaattgccattttcatccaggttcacatgaacaacgtcaaatattcccaagaatcaaattaccaacttctcatcaactctttaaacacacgtgatcccaacagtgttggcgatagtatcaccaaagttgggaatagtatcactaaagttgggaatagtatcacgaaagttggtagtagtgtcagtgaccagacggatgacgattttcacgatgtagattacgattctgacaacagcatcatcaacaattttaacaaaaattacctctaaacatacaattaatatatacaaaatttacctctaacaattaatatgtaaaatttaaactatataaaattttatatattgatgttattgtgtggagaagcgttggcatatttgtgatctgatttgttgattgaattccgtgtttcccaagtatttattaatatcaggaatactcaacaaatcatcacaactcatacgattcccgctgttctacaacagaattacactacttgccaagtgataattgagtaactaactagtccatagtgtgtgctaaatagtgttaaatgagtgaaaactctgtaaattactttggagagtaggttatgtatgatgttgtgtatgagtttggatcttttaggatgtgcaggggttttaagtttcgagtaaataattaacttgacacattccttcatatcactagaataaaacggtaacgctccatatgatacgtagtataatatcactcccaaactccataaatctattttatcctctaatacctccactgtatccagggtatcacccacactatccactgtagtatcggtgggtttaaaagtgttgtaatatgaaatcaagagttccggtgcagtatactctatggtacctgaaaataataataaaatactatcatcataccggtgaagcctgacttggttgacttttgtgagaagacttggcaggtaccgaaatcggaaatcataaccgtaatactatcattaccatatttaagtaagatatttgacggttttaagtccctgtgtattataaaattcttatgtaaataatttaacccattcaacacatcaataaatattatcatcacctcgtcatcagacagataattcacatcatcacctgacacacgggaaatactatcggaatcacgtaaatcctcccctttgtatattttttgtataaaattgtatagattgtcaccgttacaatattccatgagaatgaagaggtaaggaatgtaagggcacaattcattcattctgtacatttctaaccaggaatggttatagtcaactacattcttatgctttatgttttctcttatttttatttcctttatcgccttttttaaccattccatatcatctccaatagggattttcttcaccgcatattctccctaacacaccaatcagttatataacacaattaactacgtaatagatttaactatgtaactgtgtaaatgtgtcgtaaactgattaatattgtacgagaacgagttcatcgaggatgtgtatacaattgtagacgtgaccgtaggagccggaacctaatttcggtccttcaatgaaaaatctcttataatatcccgttattaataaatatttcgggatattcttcggtaactccattagctccattacgtccacctcactatcatcaactactttatagtcactttgtgattggtcctcatctctcgagaaactgtcatttcttatcaagtaaccacgaagtccattctcgccaattctatcaccagttccactaccaaatccgttcccgttgaatgtgtcagtgttagcagtgtttgggttgtaattttcgtgtaattctagtgaggagatgttgacgtcattggggtaattattctggcttgagaaggtttgaaatgagttctgtaagagatagaaataagccttggcaatataattatacttctctccactcaaaacactaccacaaaacggacatacattatcactaaaaaaatttttcaatatttatttttcaatgtgtaaaatattataatttatttaataataatttgtacaatttatataataataatttatacaatttgtatataataattttttacgtgttattttgagtgatgttgtagattggtagagctctgatttgtccagtttggttatataatacaattgacttatcatttttgtatactacaatttctccacaattctctcttatcattaatatattaattaattattatacaaatatttatgtttaataatatattttaagggaagaaattgagaaaaattgggtttaggttaggaagttactgtacgggttaattcttctataacttctgtaactactactctcgctattctcattcaatgatgaccaactttccacatactcattactacccgttaccgtatcctcctctttactcgtactttccacctgcacactggagtcatccaattgtacacttgaaccatctaatagtgcactggagtcatctggttgtattgtagaattgtttgtgtatgcgtgtgttagcgactttgtcatgttaatggtgtgtttggagctgagaaaggtgttggaatatctggaagttaatgtgcttgatgagatcccagtgcctgaagaagtagttgagaaatcacttgtactttcttcatctgctatgatagtacgaatactcgaactgtccgtatcaccagtagcctcagattgttcactaactgatatactaccagatccattgattgaggtgtgaccatgtttaattgtatgttgaccaatggtatcggaggagtttttgataattttgaagttatccaaattattattggaagtgaaggaactacttgtaatcgtactagtaacactagttatactctcacttctcaacgaaggttttctatgcgtaggttcctcaaacccagaactactactcacagattcatttgccgaattattcacagaactgtttacagagttattgtgagtgtaactagtagcagagctacttctgattatgctgtttatgttaccactacttaaactattttcaaccctattcaccacactaacaccagttctagaacttagtttgctacttggtctactaccagaacttagtttactacttggtctactatgagtactgttaaccaaggatttatgatcactttcaaatatactttcagtcttaccactgatagaactaattctatcactactagtgagtttaccgctgctactgagcttattactgctggaaagtgattttgtgagactcggtgttgtaactcttccacttcccattcccaagccttgagaacgattcgatgaactcctgccgatactttgaataattgatttctcggcactacgacttgatgagaataaatcactagtaaataaactactcgaatccgttacaccactcgactctattacactactagtgatggatttactagtgctggaactagtttgatcgatattagttgggctgggaaagatattatcattcctgtgtaaaacagtgttaccagtgcttagtgtactgagtttgagtgtgttgagattagagaatttgtccagttcactgagtgaattattactctttttattcttgattattttactattgagcggtaacttcttattcactactctaacactactactcattgtatcatccattgaactcaatgaactaaatatttcactactactgtcactaacgtcactcttcgtattctcatttttagtatcaccaatcttagtatctttaatcctagtatctttaatcttggtatctttaattttatccttgttggtttcggttgtgattgacgagtttgtcaagatctttttcaagtacaaattaacattaatggtcttgtgactctcaaaatcattagttaaatcagaatctgtaaggattttcttcagtattgtactacttgtcagtgttctattcaaactactacgtgaatccattctatctcctaagtctattctatctcctaaattcaaagtatctcctgagtctaatctgttggtatatgtgctgctgcttagaacattggtatcaagtctagaacctgaactaccgcttaggctactaatcgagaaaccgctgaccaaagtgccactggacaaagcttcttgaagactacttgtggtataagttttcatagaactgaaggtgtaatttgatgaatactcatctctatacttggaactatcaggtctacgtccacccttgggtttctcatctctatacttcattttctcatctctgtggtcggatttctcatctctgtgtttggatttctcatgtctatggcttgatttttcggtaaaatcgtaagaatccattttgagcacttcctcatcttttagattctcatagaattccgactgtcgtgatgacattgtgatgtattcagtggagctgttctcgctcagcacaagacttccagagccgctggcaaattccaacgtggatttaaacgaactaaatctcgatttagaagaagtgaatcttgattttgaagagttaaatcttgatttaagcgaccttatacgttgaagtcggtcctcatcagccttcccagtcccttcaggatcatacagtacatctgcaacattactttcaaatgccaattcctccagagttttattcttctgagcttcctcagaatcctccggtgccctactcctcaccttgtcctccacgtgagtctgaagtaaaattatattcctcagagtctcatcgatcttattcgcatgcattatgaggaagtatgtgctaaaaaggtcagaacacatttcaaatatcttcagagctaccacaaagatacttgtgctctccctagaatctagaaaatccagcttatgttttattacgtcaaacatgttcccagagtctatagtgttgaaccttacagtcctaatcaatattctgtatcctcttgggattttattttccagctgtgatctccattcactaatttgactcttgatgatttccaaattatcttcgtgattcgtatctctggcgtggaccatgatgatgtagcgttttagaaactcctgtaacttctgacaggcgttgaagttagtcaccaagttctgcgcacttctgtacatacttatgtaacgcttcagctcctctaacattcgattctctattatattcaccacatactcatttttcctgtgccagtttatataatacaccattctctcgcccgtgtcacacaccctggggttaacagcagtgttgacgccagaatgggaattaatgtgttggttgatttgtgtgatgattttgtgataataatctttagtaatgtgcatggtagggttatatggaatgaacgggtaccagttgttaatattattaatatcatagtctaggcttgcgatatccttcctgctctgcacatttaaccataaattcttgtcattaaatagtatatttatcgtctggaaatttgactttttcacttccctcttcattacctccctctccatatgtattttcttgccatgcttcatgttaaaatcatacatcaccatcacgtcaaatttattcttctgttcaacaccgttaatagtgtcggtaacaccgtcagtagtaccatcggtaacattatcagcccgggatttcaaaaattgtatgaggaatgcgttgaattttttatccttttgttgtccgatggcggcgtagacatcgaaattgggattataattaatgagaaaactgagaaataaaacacaatgatcaatgatactaccggtcttcaactttaacaagaaatcaatggtgaaaacgttttgtaactttttatttacaaacggtattgagttgacgaagtggaacatgtgattaacactgtcaacagccggtggtgagtgtatcggatgtacaaaactagttgggaacattttattcccaaactggtcataaaaataatacaactctgcgaaattttcattatttgaaatcatacaaatgttcttccaaatctcaatcagcttctcccaatctcccgaattacccgctctaacagtattactcactctgacactattaggtctaacattaggattaacattatcaggtctaaaattagggttaagattggagagtctcccaatttctgaacttctggacggagtaatgaggggatagaaccaggctgagaatgaaatgtttgagatatggtcctgttcattatattgatagtgatacagcttcttcgaagtcgtgaacacaatagtttcataagtaacttcatacttgaatgagtccatcaggttatgcatcttcttcgtcagtggtctgagcacattcttattatagtaaacctcacccacagttacttcgcagctcccgaaataatttaacttttccataatgtagccccaaactgtgattttaatggagcccatttcaactaactcttcataagttgtcactggtgggattgggatatacaattcctcattatactttggacccagcatgtctttacacaaattagtcctcagagtcacattattaaacgtaacttcgacgtaagaatctacagattcttgcgtgtttgccaataattggtcaatattgttaatatgtactatgagcagatgacttgaacttgatggtctgttagtacctctaagttgtctatatcttggcttgcggttaactatcattgtgccagttactgttcccagctgcaaatcatccaatttatcattccagccctcatactgacttttaagtttaagccattctggcgggtacagtctactacttatgtagggatagtctacgatggattccattggtattgtagctactcctatacaatttgccgcttttggcgcactccaatccatcaactttatttccaggtgtgagttacataattcattcagtgtacctctgaacactatctctcccaagttatcccactcacagctgaatgcgtttttcacagagtgtgacaacagtgacatattcttcaggtgcatgctgtcagttttaagtcttatgaataatctgggccagggttcaatttcacacacaaatggcacgtacttcccaacctgcacaaaaaacttgatattatctctcaaaattgtaatgtactcgttgttgtcactttggaatgttaacgtcgtctctttatcctttttttccttgtcttcgtctgtactcttgtaacccactccagccttggattttttcttcctcttcttttttttcgaggttttttgtgactgttgcggtgactgttgcggtgactgttgaggtaattgtgttggttgtgttgagtgggggtccgtagttggtggttcaacatttgtagtggagtcacctgattcctgattatcctcttgatcgtcttcatcgaaatcatcgtcactactatcgtcctcttgttgttccttttccttttccttcttcttgttagccttgattttcttcatcttccgttccatctttgttctaaaaatactatacctcattttatccaacaaattccactcattcacatagttattcgtaccctccctgttactcacagtgttactattttccgtatcactaagtttggaaagatgaagttgtagataattgaagagaaaatacgtggaaatggcgttgttaattttaaaatttatcaagttaatttcaaagtcgtagagttcttggaaaaataagttaaatgacaagttacaggttaacttcttctggttatcaatgtacttgtacattgggatttctatatgttcatcaccttcagcaaacttgattaggaattggtcataaatacttacaagactgtttactgtgtactttttacagctccaaagtttaattcttagcttttcattttccaagtccaggtaactcccacgatactcaaatgagtgagaacactggaaactcctcgtctgatccttctcaatgtcctttagaacaggtgttcttatataattcttactctttcctctgcttagaatgtagttggagctaccgatttggactctgcactcatctcttgtaccgccaaaatcaaactctgcaaaacaacttaaactctcaggtaacaaattaacaattttaagattaaacaacttcacactccatcgtcttggataactccaatgcctcttctcctgcatgttagttcctcgttcttcgtactgagtattcaacgagtcaataaaggcatcatacgtgtactgattactccaaagtaaatcatcgtcaaagttttcctttatctcattaccctctggagttcctgcggttccctcctgaggcacattctcaccctcaacagcaccaacattcgggtccttattctccacttcattcgtagcattaatattacttactgagctggctgtgttaacttgattggcagtagtggcgttgggtattaaattactttgttctccgagtactttatctatccccttaagcccagttttttgtaaaaactcgaattttttcgcgaaaaaatccttacccttagaaaactccattcttctaccttaattatacattagttaacaggttgatatgattgttattttacatttattgagatgaaagttgtactgtgtgtttgattacacattaggactaaaatttagggaaactataaatttctatagtttatttaatattattacggggaaaatcactatattacaaattaaacaggtttaaacggcctgttatccgacgttgttactatggtacacttaaatcgcgataaattctacaatattaaacactttaaacaagattttatgagaatattaatttctccatcttcaaagagaaattccgggcacattttatcccacccttttaaaaataattattatttctatcctccaagcactacaactatataattattataaaacatataaaattaaagattaaatgtataaaattaaaaaatttatatatgaaattatatttgggataaaaattagttgtgatctttgatgatataatttgctaattgtacggcggtggctggtgttattcctggaagttccatcgcttcttgtattgtttccggcctctctcttgataatatctctatctcctccatcgacataaacttaaaattttcactaaacattaattataaaaattttaatcactttgttaactcagtaatattattaaataaccgtgtaaatgtgtagcactgactggttgtattgtatatcttgatgtatgtgtatggttcttcctgagattgctctttggtattgttggttatatcttttaataaatgacgaatacttagcctgtgcttcgataaatgaaatcacatttgggctcaaattactcagtaaactctttaaaaattcaaccaaactttccatttcaacatttaatttttcattttctctcaaataatattttatcaccttgctaacaatggcctcagtttgatcatcactaggcttatcaaagtgttccggttgttctgatttctttgtattcatatgactgagtagaaagttgatggatttttgttcatgatttgagaagggcaaattgaataaatttagtttaaacttttccataaagtttttgttccccaagttcagtaattcaacaaccttttccttgatttcggtgtattttttaccacattttagtgcgtcccagcctgttttatacacattacaactcctgtcaattccccaatagttaagcgtattcgtcactgatctaccaaataataatcattctgtttccttactgaagagttgagattacgattattgatttaatatacttatttttcatcaagtctaatctctttttattccttattacaccatattttattccctttattaacattctaacatctccattgtctatcctacaacataaagaggtgagtaatatagttgttagtgtgcgtttacctgttttgtagtctgtattcagaccttgaagtgaacatacgataaggttctgtaataccttttcttatcaaatcatcaatcaacactcctaataataatgtaataataattttttacctatatagccttcattacggttaatgacaaagggttcattaatattaagacttttcaaggctgaatttatgccagctattacacccaaacttccagcctcctcataacctacacacaatttagttaatacaattgacttaactatattatgttagtgtacctgtggtaccgcagatttgacctgcgagaaataaattatttattttcttcaattctaatgtgtatttaagatttgttggatctatcaaatcatactccacatcatacgccggtgttaatatcttcacattttccaatccctttatatttctcagcatctccctctacacagagtgcgtgtgttattttgtacctgtgtattaatgtcgaatgagccggataaaccatttgggtatattatatcactattaacaccctcaggctccaaccaaactatatgcgattttatcccaggatgcttcatcacctacattcacacatgttacacatatttatcgggtgtagtcatgagtcaattgattatgtacgagtaagactgtgtaaactgtgtaaaaggtactttggtggagattgatgggcaatatcttggtcctaatcctgaggtataatctggtaaattatgtaaattattcctcacaatactaaaaattactcatcaatttaattatttacctgtgtacccgttcgttagtttgtgttttatagcaattaattaattgatttgtgactttgaaatcttcatttaaatatgaaaagaactttggattctcatcactttcttgtacttccaaattctcaaaattaatacttttcctatccagtctcgcaggtgttcctacacagagttaacacaatttgtgtacctgttttgaatcttaaggtgttaattccaagtttattgaatatattactcaaattatctgccgcagattcaaactcgccagtaatacgattaatccttcctcctccataactgaacacaatactattaatagttgacgtacgtttgtttggatatgtgacaacggccttttaagaatgtgccagttgtcaatattacacatttgctctttattactccgccatctttcattcttactccttcaacattcattgtactaccagtgtcactatcgactgtgttagtgtcaactgtatcatttgagtcaccagagttaagaagtaattcatcgacgaaatcttgtaggaagaagagatttggataattttctaataattttcggaggttgattttgtataagtcacgatcgatttggactctaggaccaacaactgctggtcctttggaagtatttaagcaacgaaatgaaatagccgacaaatctgcacacattcccatcacgccatccaaagcatcaatctcacacaccaaattacccttaccaatcccgccaatactcggattacaactcaactcccctgtaaactcaattttacactttttattatactttgaatttatatttaacttggtaaatctgcggaatctcattacacatgtatatatcacggaattgactaaattaaacaagatttcggatgaaaatcctattgaaatacctatggaagataaatttggagtgattaggagagtgttagctccaattctggcggaagctgtagcggcttcaattcccgaatggcctccaccgacgaccaggacatcaaatttaggatacggcggttttactacattaaaactatacacacatttgtagaatattatcacattggctagatttaaaatattatacaaaattttcattaatttcaagcactcccaattttacacattttaattcaattttttaattttatttttaaaatttggaaataatttaaaaatttataaggtctggtaaataaagataacgagtaagggtatgggagaatattaatataataagaatacagtataaatttaagctccgtggatgcgtatttgatctggagtgacgagattttcgcgttcgagaaacttgacaacgtcctgcctcttgtcgccttggagctgaatgatgcttccatgttcctcgtgcatgatcacggttccgttacacgagaattctttcttgagtgcgcgcaccattttctttaagtcaaggctctcctcgaggccctggacagttgtcacgcttttacgtccgttgcgttggtggttacgtatgtgaactaactttattggtccatcagtattagtctggttaaaagggtctttaagaccaggagtataatcaaggaacattacctaaaaaatatttaatcaacaatttttaaatatttcaattagtttaaaatcaatttatctaattttcaaatattttaactagtttaaaattaatttatctaatttttaaataatagattgaataaataatttgttaaattatgatttgaaccaaaaaaataatgaaaaaatttaggtataaaaggataagataatggagtggagagtgtatataaagtaatataaagtaaagtgtgagataaataattttatagtggtaatgaacaaacttggtttggacttttagtgtgggctcgtatttaatactgatatgacttgttgaaagatatcagaaaaaatgataaagcgtaattaaaaaaaataatttgaaataaacctaaaaaaatcaagtaaatctgacaaaagtgcagatgcatgatgggccttgagcaaccccccacatcaaaaattgagtcaactaaatccctcaacaactcctcaaattaccaccaactcaacccatcaacaattctaaaatttacaccatgatttaatctccctatacacttaacaggagcgtaaaattacctgtctaaagtcaatttcggactactctgtacacccttgatacttgtagataacgcctcgatctcctccttctttgcctcaattctcgtttaatcatatttttaattatttttaaagttcaaatctatccaaatttacacatttgagcctgaaatattccagatcatgatatttattttacacatctaccaattctccttattctctttttattcccaattcatactcaatattttattatttatttataatttattattttatccttaaatttcttcattttgtccgaatgttctgtagtatagtgtacatagcattgttctgttaattattatttttttggataaatttgttatttacacattttgttgtttttaatttattttaatgttttatttaatatttttttattattttatttttaaagttttaaatgaagtttaaacagtattaatggtctttgggttcagaaagaataaaaaaagtcccgtaaaggacgtttctaaagctaaaaaagtattcccctcaccaattacataattattttaaataatgttgttaaaaaaattttagagtgagatcgatttggctctggcgaacagtgagactacactgaattacttgacaaaaaagcaagaaatattagagaataaaataactgtaaggatagcaacattaatattgtgtaggagtgtgttaaattggccttggaatgtagtaggagaaatgataaaacgaacgctttatcccatttaagaaggaagaaattacttacaaatgagttaaataaactaagatcaacactaattgcgcttgaaactcagagtatcgctttagaaggcgctcaaatgcaacacatggccatctcagccctttccgactccttaaacgctcaaaagtttctacagtcctccatgtaacacgctattactataataatattactaatggtattgtagagattcgagtaagtttgatgatttgcttgatgagttggaggagagtagggagacacagcaggagatattggacacaatgacaagtaacatctcaccaaatctcgaggtaaattacacattatccacacatttctttagtttgaagatgaattaaacgaattaatacaaagtcaacccaatgaactacatgaattggaacagctaaatcctcctactgataaactaaagcagaggatttcgaataaaactaatttaaactaatattaatacatttatagtttaattctagtttgagatgtatgaaaaatatcaatacattaaaagttggagaatgatgaggaggtaaatcaagcttaggtttgagtgtgcgaatgtgctttgtactcccatttttttgagtagtgacttatcaaagagcacgtaatcaaatttctccttgctaactcttttccattgtccttttttacagaggaaataagtttcatttggtgaggaaaagtaatcaattgagtaaaggtaaagaccaaagatttcgccgttgataaagtacatatttaactccctcagagcttcagtggatgttcctttccacacacttacgccactgtcgtccaacatttgaacggtaagcctatgaggaagctttattatcctaagctcgacctcacccaaacgacctgtatgtgtctgatatgaacttattactgattcctttgatatgtcaattctattaaatccacacactaataatgtacatatgattattatttctattatcatcacatatttctttcattcatccggttcatccgtctaattcatacaattagttcatctgattagttcttccacttcattcatctaattcatccaattaggtcttctaatacatccaattagctcatctaattgatccactcatatcattaatcagattatttggttgattggtatatgttacaaattgttggttggtaatgtgagttttaaaaatgttcacattgtcgatttgattttggaaataatgaaatttggcataaattctaataaatgtgtaagataagttatttttaaaatatcctttaactctaaaattgtaatataatacaatatataatgtacagcttatgtatcgaatatctataagattcaaaattggatacaaaatattaaaatggatttaaaatgctggagatcatctacaaatgaaataaatatttggtaaatcagataatgttcttttcttgtgtggcagtgccaaaaaacatgtgtaagcacaattaattaaaatttttatttttttcaatgtttttactaatatgaaatggcagataaatcaggccatttgagccttggtaaatctctcagcaagattaaaacttcaatttctaaccgatttaagaagccggaatcctcacccaatcctaaccctaaaacttttaaaagagcttttaatattttagaggaagaaattccaactaaatcaaacaacacttttaattgttctgtcaacaacatcgagcacccaagcgggtcctcaccaatttcaccaactctggaaaatctgactctaaagtccaattatgattcacaaaatctgtacaccatggaaaacttggaaaaagacgaacttgaccggatttgcagcgaatacaaggataaatatggcaccgatttcctcgatgtcggactaaaaacttatatcgaggctgtgatagatactaaaaacttccgtaaccgctgttaccaaattttatctaaaaaattaaattatttaaataaatataataataaaatggtttcctcagttaattgcaataattctcaattcgacactcctgttaatttattcccaaaaggctcttatcaaagttctgaacctgattccaccaaagatggcttccagtcacatatagctagcagccacttacacaagaatacacaacacagtacttattctcgccccaatttatactctagagaccaatctaactctctagaaaaacctgaatcagtcactcaaagtgttaatcgtgtgggtaacgttgattctgagaagttttatgagaatttactaactcctcagaaagtgtacaataatgaccttaacagctttataaacaagtacaattacttaaattccagctctaacaaaaagcttttcattggcagtaacagtgacagttttggatttgacgatgaaaactctgaaatggagactgatcacgctattttaagttataaccagaagcttgaacttctgaagcggatgggcattggaaacgactacattgcaactaaactttgtgataaatttgacagtaactttaacagtaatgagctgaaggatatcaaggaatttaatttgttctataaacaaaatttaaaacatcagctggatttgaaccaacaactttctttagattttttacaataattttttattaccagttcacactagttaggaaatttattttcgtagtactctaataatttttcctgaggacccagcttttaccatcatacacatataaataatagtatggatcaaagttcagatatagaaaaccagaagacttaaagtataaagacgtaggatatggaccagacacataattccacacacacttaccatcaaacaacaacttagaacactcactacctaacaaatatagtaacgagtcactattgggatactcaagaacatcacagcccataggaacagacttactacgatcaacagaatcacacttacacaacctcagatgcttatggaacacagaagttacctgaccagacacaacaggaacagacacaggagctacagctttggtaacaggttctactacctcattgactggttctactacctcattgactggttctactaccatctcattgtttctacacctttaacaactggttcactttgttttgtaactggagttaggggttaaacgcttagtttcttgtatgaatctttggtcttggcaacataaagctcgttcttaatgggatcaaactggaacatggtaacctcaaatcctggatgatcactttgtttccagatttctttctctccaagtttcactttcctacacttaactccactgaactcataaatgaaggcaaaactgcttgaataccctaggactttaaccctgtaattagctctctttatctctacatccttatcaccaaagaacttgactttggatatatcatgcttctgactcgtggtattgttccacttaccactagactttttgagtactaaacaacctccactctccagaaatattgcaacattatcattacccttagtaacgactatggttccaagcacattattctgggattcccagatgacatctgttttctttacaattttgttaaatccacagacagatttcgcagtgtatgtaggatagctaccactcttacagtactcaaactcagttgtacctgccttcttatcaatgtcaagagtaacctgtttactggtaccagttgttgtaggcgttgtaggcgttgtaggcgttgtagccgtggtagctgttggagctgtagttgctgtagttgctgtagttgccgtagttggaggagttggagtagttggagtagttgctggagttggagctgtagttgctggagttgtagttgtagcagctgttgtaggtgttgtagctgcgggagttgtcgtagctgttggagttgcaggagttgcaggagtcgactcagctgtagtggcagttgtaacaggcgcagatttggctggttccttagcctcttctttagtctctggagccttatctggttccttaactggtgttgattgtttgggttctatcttcttgacttcatcagcttggttcttcacaaagaatttatttgtggtaagaccaagtgtaaatgccttgatctcctcaaacttctgatcctcatcatggttccataccacgtcatctcccaatttcaccttctgacatttgataccagttttgaatacgaattcatatgatagaaaagccaaatttacattataatctgacgactttagttccttatcactttcaccaaagaacttcaatttcttcaaatcaaatctatcagcagtaacatcagaccattttccaccagcaggtttttggaacagcctgaccatatcatcctccagtagtatgaccaagaacatgtcaccgttagcgaatttcttagtcctgaccatagtaccagacacaccatccttacactcccaaaccacatcacttttctctgaaaccttgtcaaacacacagtcgttcttcccattgaaggtcttaacattattatcatcagtgaattcaaactgatctgtaccctgagatttatcaatatcaagactgattgtcttgctaacagtagctggagtagtggcaggtttggcctctgctggtgtgggtgtgggttctgatttggcaaccggagccgcagtcactttagtaaccgcttcagcttctaccttgggttctatcttcttgacatcaccagacgggttcttaatgaagaaacagtttgaagcaagacctagtgaaaatactgttatctgttgaaacttcggatcgtctgtatggctccagacaacctcttgacccagcaacaccctcctacaattgacaccacttttgaatgtgtgactaaatgacatgtctactatagttacatcgtagtctgtctccttcagcacggtgtcaccttcgccgtagaattttagcttcttaacatcgtgcctcttggaagtgatgtcggtccattctttaactccctcttggaacaaactgaatgtacgattggttagtaggactacaaggtaattaacacccttggtttccttagtcctaaccagcttaccaaatacgtcagaaactgaagcccaaattaccttggtgccctgagcgaccttattaaacagatgaccactcttgggagtgtatgtgacgactccattctcatccttgtagtcatactcgccggtgctctgtttcttctcaatgtcaagagttaccttggtggcctcagtgggtttggcaggggctgtaactgctggagcggtaacagtagcaacaggtgtagtctggccaaatggatatgaaggaccgtccctacccccaaacccataactacgtatcactgatttccaatgattctcttccatgtagcacgtatagtactcctcttctaaacttacaattattttacattcctcctcgttatagctcgcatattttggataaacttgaccatcatcacgtctccagacacaattcccatcatgggtaataaattcacattgaagaccctttaggtcatagtcaaagtcatcaaactctttctcaactttacatgtggatgaatctgacttagtggaatataacttaactttatcaggtgattttacaccggaaagcttcaaaagggtaaatgatgaaatatctaagggcgaagataaaggagttgccttaggacctgccactggagatttaactacaggggtgacagcagtttcagaaactggagcttttaatgtgggtgctgccacaggagttaccttggctatggaaacgcctttcttgacatgtacttcctttgattgatctttgagacttgtgacaatgaactgatctttaactagatcgagataaaaacccctcaggtatccaaactcaggatcctcagtgtgactccaaacagtcttaccctcatgggtgatcatcacacacctggcaccttctttaaattcgtacccatatctagactcgaatactgtaggatcgtagtcattcctagtgagctcatgatagtgggatgtaccctcatccaaggaaaacaacttgattcctgagaagttgtgtaaaaatcctgtttcgtttttccatggtttacccaaaccctccttgcaaagaagtacaaacccgccactttgcagcagaatggatatatgtttctcacctaaaccagaacccattaacactacctttagtccatgatcttttggatcggctttccagacctcaaggtttttcttcacaacactctcgattgtcaaattggccttaggattaaagtgaccaaatcccctagtcgatctatagtcaaacaggtcattattcgaatttttattgatatcaagaataaagccagttgatgagacccaattcctgccaaccctatgggcgtgtatcactttatcattttccaggaatacatttacgttcctaatacttgactccacaccgtagaccaccaccttgctagaacactcactgtcagtttttgcatcccaaaaaactttatctgagagacatccagacttacaacaactagaccaacatactgtccacatccaagaacttttgagaaatactttgtaaaacatataaccaggtttagccgtgaaagtcctcttctcaccatcatggtgaaagtcatagaaaatggtactggaggtcttacttaagttaagccgtattttgttagaagcagggagccacggtttattacaaccacccttattgaaatgtactatatcaccgttcatcaggtacacactcacattactggcactggtacaggcaccgataccatcagtaaaaaccttggaggcatacttggtaggatctttggtttcccaaataacagtctctgaaccacaacacgcacttccacaacaattaccactggtcttaataatctggtaaaacactgaattacccttggcagtgaaaatcttaatattcctgttatgatccacagtataatcgtagtcttcagtactggccttcccactgaatacttcataaaaagtatcgccttggacatcagtgtccatagggacgacaagagttcttttttttcatatcatatgatatacataataacatatatacttattgataataattaaactgtttgattttacgtttggagtattcacgcttgaagcttgaagaagatatagacaaatcgttatccttttcaccttcttcgcgcgtccaagttgctatataaaggcttccgatatttttcagagtatatttatactttctaactttacctgaagtaataattgaaaaaattttagttattacccatttttagagtagatggattataaaatacgttagaagattttttgagcttatttttatccaggggatatgccctctcacttcccatactgtcgtcgctatcggcaacaacgtcgtcgtactccacttcattggcaaagttttcatcagtatttggcctctcagggctatttacctcaatattgtcaattatattatcatactcattaaaatccatgtatattttcagaaaaataaaaatttaaatgaatttatcagtaaccatgtattgggtgtgtaatagttagaatttttattttttcaacttctttcacttcttcatttttgttttatttttagttgtttttcatttttatttttgttttaattttatcctcagatgacaattaattcttttgacgagtttagaagatcgttaaattctccgattctgtcaaggtcgaatttctcatataatctcaactccaaatttggaaacaactacgatagaaactttggtaaatacaactccagtctcaacaattgggacagatataataataatttaaacacctttgataaatacaacgcacgtgataactttgacaaatttgactcgagatttgacagtaaattcgattaccaaaatagatacaacaataactatgaaaatttcaacagatataataacgacttcaataactacaacagatataataatgacctaaacaactacaaccgatacagcgacttcaacaatgatttcaacaactacaatagatataataatgacttaaacaataccaagtataactatgaaaactacaatagatacgacaactcggataggtttgacaagtataacactggttatagtaagaactataacaacttgtacaatagtgatgatttgtttgacattcccaactacttaaaaagtgttgatcagtacagcactccccaaaataggtataacaattacactcctaataaatggaatgatcctaagttcgataattataatcctaataaatggaacgacccgaaactcgataattataattctaacttaaatgtttctaatcgctttgatctaaataatgataaattggataagattaaggagaatttaaattctttaaataagtttgacttgaacttttctaataacagtctcggtttgaacttttcaaacaatttagatttaaactataaatcttacgggaatactccctataaatccactttacacgaccctgggtacagatcaaccatgctggatcctccttataaatctgtttcctactatttaccttacaaatcaaacagttacgatccccttttcaaatccaatacccatgaacctctttttaaaacaaacacctatgaaccttataaatccacttcctacgaacctccttataaatccacttcctacgatccatcttacaaatcagggtcttatgatcaaccttataaatccagttcttatgatggcccatatagatctacatcgcataattcaagggataaaccttacagaagtagtccgtacaatgggacttcatacgctgaaatgaggcaaagatcttcgttatcgaatatggatatcgataagttatatcacagtgccaaggaaatgaaggagaagttactgtcgattaaaaactaatttcatctcttcttacgctttatcacatatatctcagtgttatttagcaagttatttatattcttcctcttgactcccctttctaccttacacttcacaggactgatacgattctttaccttatccactttaccattctgttggtttaatagttcagccttaatattcttataattagtaagtaatttatagtctttctcctcagattcttccttcttaggctccaatttagtcttaactgcggtatccgagtgtgtaacatcaggcttgaccaagtcgttagcgatatcaatgagagaaaacttggtggcaatggttacttcaaatttgtatagtttaaggattaaactatttttcaggctttcaaccatgcttaaatctgattccgtgagtgagtaattaatttcactgtgatcgtggactgacaccacaccctgggcgattttaatgaagctgactcccttttctttcaagtttaggaccatgtcattcaagtaactgaagtagccattagcaccgtcaagttcaactttgttgttaatgtggactagagcgttatctgtgggattatatacgacgttgtagaggaatatgttatagatatttttatagtgtgatagtagttcttggtgtggtaccttttcaggtaacttgtacttgccattaccaactaaatattctaataatgtttcaatagtttggtattgtaacatcagtttacaggctacctttatgcctattccgcctatgtgatacttgtcgtcgtaatcagtaccacttaatatacatatcattataaacttatcatactctatcagcttcagcatattaccatccaggtcgtagggtatatccgcaaaatctgtttccttgccttttttcttattatccttatcatctttctgattatttttatcactactgttgacattattaggcttatcaccagtagtgttggtaaggagagtttgtgttttcttggctggtaggtgtactaatttattctgtttattgaaaaaagggacgtttaactctacacctttcccttctttattcaacttgaatataattttagggcatccgtagacgattaaatcactgtcctcactaatggcaaagtcggcaatccctacacaaattaactgaatgaaaactaaccggttcggcagaggtatgaaatttgtgcatcagcttcatagggcgaaactacaaccgaaacgttgactttcttacatattgtgataactcgatgaacaatttcaggtgttatctggatcgcctgcatacattttctcataatttcagtattgattttgcccttgttcttccttatcatctccaaagcctcagctctagctttgtttctccgctcccttcgaatagaattttcgttcttttttgccggcatttcgtacccatcaaacactgaaataatactaacacaattcaaattcttacccatgattggtgtgatactgagcttaatcagtagttgaagcattgaaataataaatttcatatatttatcacaaatttcattccgaacgttggccactgccgatgatattagaccacggtggatccaacacatggcgtcgattgccgctacacatccggaatatttctttatattaacattcttctcgttggattttaaatgttgctaaataattattaattattatgtaagggctaataatgaatttttgtaccagtagattcgttactcccatggcagatacggaactatcccattactaatatattacactgttaattattattatattatatatacacattaaatcaatttaaaaaattattgtttactatatatttaatgatattcaccacactattgtccaacttttcaacgtcactacgaatcaactgcaaaaccgctgggggacgaataggaacggaataaatatttctcctaacgccgtttttaaatttgttaatttcataaattgatgatttgtaactgtatggtgattttacagattccagcctctttaacatctgctcatattttacagggtttgtgtatctaaccaacgcgcttggttgtttatatattttatttaaatatggaaacacaattgactttttactatttctttcatcaaatctcccattattcattttacttcttaagtacctctccagtatactcatttcttccaactcaggcccttttccattaatttcaccattgttcaattcttctttactaacaattccgtctttattaattatattatccttggaaggagagttgaaaatttttcctttattttcctgggaagttaagtcaatggttgtagaatcactggagttatgttttgggaaattcttaatcctagaattgatccactttttaatttcatccttggagtctatagttttaccctcttcgttttttacatgttttaatttgtgtatttccagaatacttagaggggcgctgaagttacagttttcgtagttacaagttatatgtaaatcatttatatgatccaacaactgcttttcattgttaaaatacacattgcaaacatcgcaaatcgtcttcctgcaaaaattaaattagtttaaacttaagataattttacgttaatttattacctgttatagttccttccattattagtaaagttgttacttctattgttattatctattctgttagaggaattattatagaaagtattagtgttgaaattagtgttgatattatagttgtaattattatacaggggttggtagtagtaattggtgttataattaggaggataatagtaataataattcggattataataatttatattattcatcattttaaatataaacttatataaaataattattaaatttagttttccttttccccactcatcgcttcaaattatcttttattatttgttattatgaaggaggtgttggcatatatattagaggattcccatagaattaattctaaggtaagattccacagtgatattatgttaattttaggaattaactgagagattatccaaacttaaatcatgtgaagaattggtaatttccattaaaaaaacacttgtttctaacgatattaaccaaatttacaagtgttttaatgttttaaatcatcttcttaaacttaaagctcctttggataaacacttggacgacattgttaacattttattacagctatcacaaaatgtaagtaatttaattatataaaaattaatttttattttcagaacagtgaactgattaacctacacctcctcaatttgttgtataatattgtagtatatttaacaaaaaataatgcaaattacaatttactaaatttaatactgaccaacataactagagttaacggccatgatttactaaagaattacataatagttaaaatctacacctgctatgcctttaataataaggtaaaccaggttaatttaaatgttttgtacaatattctaaatgctacaaatggttctgtcaacacttctgatgaagttagtaatgaagattacactaaattatctgttgaatcactcaaagaagaaatatattctataatatataagattaacccgttggatgatttattaaacagtgatataaactacgttttatatctgtttaaacagcttaatactcttaaaaatgttagtaatcgcaagacatcctacacaattaatacacgaaacatatacaacttgttactcacactccttaataataataaagtcactgagtcaactaaagaaagtgatttcaccgggatcaattcccccagtaaggtggtaattgaatttatgaagcaatttgttgaacttttgaacaaagatttatttttacttcaaatcaattacatcttaacaatagtcaatacgctactcaagtaattctttattgtaccccgatagctacttacatagatgtacattattaatattaacatagtgatgggcatagtataaggaactgtagtggagatgtatacaagttattgaaactgattaataacaaatgtgttgattttaacctcaagttaaatgtcgaagaattaagaaaacttgcactcgcacctgaatttaatgagttattatccaattccagtaagggcgaggacattctcctattatatgtatacacttgtaatgacgtgtgtgaaattgaagaaatggttaagaaactaatggaacataacactaaattaagaaatgatgaaatttaccttgttttattaaacaaatacactagtgccaataactttgataatgacttactaatgcaattttttgactacattaaacgggtcaacgttagcaatgaactcattagaaaccacttaatcaattcactaaacaaataattttatactaatatatatatactgtaatacagactatcacatatgtacactataacactcaaaccactatacatataactcgtgtatatgaatgaatatcacattagttattgggattaaagtaattttcccagaaacgtaatggaggaaaataaataaattaaaccattatgaaaaaatcctgtttaatcaaaaactaaaaatatccagaattttataatcattttttggcttgaaatgttgagaatcagaatagacttggttaaccaccaaaattaaaattaagcatatgaagtaaagagcttaaggaaaaattcatgagctccaacacccttcctaaccaaagccttgaatttttcacctgggagcatgccgtgaacgaagtcaacaagttcttgtaagttggtgtagggggtccatttccacttaccatcatcagtcttaacacctgtaaaatacaagtaagtttggacagctccattccaaaggccgacgagaacagcgtgccatttcctgcagtctgaaacaccaaccatctcggtcatgacttcacctctagaatagtctggagtcagattcctgtgtacaactggagtgtgtagtagagggcctgaggctacaccgtcttcaaggtaagatttctgagcagtagttgggaccatatacaagtatctgacataaccttcatcagccatgcctgttcttgtggtttctctgtacgaggcatgggtgagggtagcaacacctgggttccgtttagtcaaaaggtctttgttgaggagtaatggtgctgctgacactgagacaaatgtgtataccacacacaaaagaacagtcttcatcattggagcttcaatattccttaactgaaaaaactggggaggtggaagaattaatattctgatgtcggaatcaacattaagtggggataaatatcattcaataaggattcggtttttggctttctcttcccaaatttagccttcctcaaagtatttctaattttttaaacactaaaaaacttactttaaagtattcttaaataatttaaactattaaacttgtatattttaactcaatttctccacacaccataaaaattactacaccaaaatttcaagaaaactcttacaatactttgctacatcacaaataaagtataatagtataatagtggttattatattataattgtccgatgtatatagttttatcatttgaacaggaggcgatgattggtatgttagggtgtaattgtgcatcatttacagtgcctaaacgtttttggactaaatttagacaaaatttacctatgtggcctggtaattgatatagaatcttttcatccacagtgtctataatgtacacgaactgatctgcagatccgctacagatcactgaattcctcccccaatgactcttaattaagttcttttcactattatgtttgggtccgtacaatattttaactatgcgattgttaacaccgtttttattatctgcgtacggtaaaatattccaaatggttaacttgttgtccattgaatttgacaacaacagtgaattatcttcgtttaaatccaaactcgtaatagaatccatacaacctttcagctccaaatacactttattatcatttctcacatcatatatctgtaccaattatactattactaaacttggatatgtattattactatatgttatagttatataattagtgtaaaatactctgatgatattgtctagtgatccggagtatatgaaattatggtcgggatcagtagtgacagagagaatttgaaaatcatgtgaaattgaattagcataacttttatctctggaatcccaaaccttaactgtgccgtcgtcggaacccgttaccaggagtccatttatcctatttctcgctggataacagctatttacgataccactatgtccctctaaagaaaattaatatattgttggaaacttacttaatttgcgtatccttttagcataatttacatcccatactgatgcggtaaaatccgctgagcatgagtacaagaaatttgaatttttattccagtgcacttccaaaactgcgtttttatgtcctgttaatacaccaaaattacggcattctccaaaggcttcatatagaagaatctgcctatcttttccaccagaggctagaaattgaccatcttgtgagaattctattgagtaaatctcactttcatgtccagttaatagcataactgggaaattgagtacattttcctcatctacattcattatcaaaaatgactgtcccgaattcactcacatggggaaatacaaggcgcgaagctctcataaaatattataaaatcccaatatatatatttaattatatataaaattatatatattgaggggttgaaaaaattaaacttgttcatatgacaatgtgccttctaattttttattctccgtaagcttccttgccgctttaaagaaatcctcttcaattatgtaatccctcatgttacgtatggcgtgtataccggcctctgtacatatatttctcaaatctgctccattaaacccatcacataatttacatatgttattaaaatctacaacatcatatatcaactcatttatttacttatttaactttatatttatttattaaactatatatctttcaatatttggattactgatgggatattgtatatttaatttttgtgtatgtatttttaatatctcgattctagcggtttcatttgggagtggaatctctattttacgatcaattcttcctggtctgagaagtgcagggtctaacacatctggtctattggtggccattataattttaacttggcccagctcatcaaatccatccagatgtgtaagtagttccatcaaagttctctgaatttcacgatcagcacttgtaccctgtgaaaaccttctaccaccaattgcgtctatctcatcaataaatattatacaaggttgattatcctttgcatatcctactcaatttgtaaatcttatggaagtgtctaatggtttggataactatactattatacataggggtaacaagataccaaacatttcacgtataattttagctgattcaccgatatatttatcaacaacggctgaggcaacaacttttaggaaattacatcccaaatcattagctaaggctctggccaacagagttttcccagttcctggtggtccatataataaaacacctataataacagtgttatctaagtaaaaaataccttttggtggttttataccgatgcgtttaaagaggtatggattttttaatggtaattcaatgacttccctcatttctttaatttgtttatttaatccacctataatcagatttagttaattaattatagtacctattgaattatatgtatccttatccttattatccttggcgttgtcgtctttatttaacatgttgtatattattggatcaacttctcttggtagaactttcataattgtgagagtagtcatgtcaagagctactctggtaccacttttaagcaaattcacgtcaatgttcaccttacaacagacaacgtaacgaggaccagaactagccttaacgatgtacttgttatcatcgattttccggagtacatttcccacaatttgaccaatactctgcaaagcctttaaatcgtcctctatcttagcatccttcctattcagctccaccatatcagctcgaactaatcaataatcaacattatggtattatattactgttttaattaaattattataagaataaaatagttaatcaaatacgttgtttgagtttttgttccaagtcacgatgttctttaacttttctaacatattgaacaatcacttcacggttttcgtccagaacctggtttgaaggactactgttatcgttggtttcaggaattacctcagattcctcagccattattacatttaaaaccaaaaacaacaaaataaaataaaagttacgaagaaaaaggaaataacaaaaaactaaaattaaccttgaacaccacacattaatcagaatttcaacccttatattaacttctatttaaatttataatttatcattattatcgcatttatttattaatgtaatataatcaaaattagtagcgtagtatctttttttacttgtattttcgcactttctattttgtttacttttaaaccctgaaatctctttaattcatataatttaaccgagttgttctattatcttattgttagggtgtataaattttatttttaaatcttgtttgctaaacccatgtcggattacttcttttggcattctatcaaatggatattctaacgattaagagtatcaagaacggttcattaacccgagaaaatgtaaacaaattaataaaatttgtacaaaatgtggataattctgaagaagattctgatatttcgtctgaattaccaagtttgataacttcttgcattttaaacacgaattcttcaaatatcaaactaattgacaaattaattaagaatgttagaagaagtaaaaaattggtaaactcaattaatgatgattttttgacagtaattttaaacacaactcacaatgattttatcactgttaactgtgattcctcttcaaattctcctttaactaaacttctgttagatttgttaaatgagaaatatgaaaacatttcatttctcaaactaataaaatttaaatcaattgaagacgaggtggttatatctgagatagtcaggaaacttaagagaaataataatactgtaattcaaattttaaactacattattaagtacttgccactccaaacatatgaagaaatcttgtttctactactcaattatcagtttaatgacaccactatacacattattgatcaggtttctatacgtttttttaactcctcaaatgaagaaaataatgtattaaactcaaattctaatgtagttttgctgtataaaagaatattgaaaaggatattatcgaataataatagtgaaaagtcatcaattatgttatcacacattgtgtatcatccatattacattgatactgatacacaggaaagtgacttaacaagtttagaattaaacttaaaaaactcgatgtcatcatataacgatgtgatagaggagcatttgggtgtgattgaacataattgtaataacacggttttcccaaaaatacaagagaattttatcaaatttaccaccaaattatacttgatatcggggaatactaagttgttggacttactaattaagttatatacacaattgaatattaataacactactattgtgaatcatataattaacattttctttaatccgattaagcaagtagatgtatcttatgataaggagtatactattaatactccgaatttactctcactgtacaataacatccaaaacaagaccaagtataaattattaatggttgaagtcagttatctcatgatgagattgggattggaatatcaaattaacgtaaacatttcagactttttaaactcacaatatcatctactcctgctacttcacatatataataatgagattttgaaagtaaatcatacctttgaccgtgaaaacattttagagtcctttattcatcattttacacatcccaacgaagaattcactgcccactataacatcttattaatctacaacgagcttgttaattcgaagaactctttagtcacgggtgttcttgatactcatttatcagcgctgtcatacttggatattgtgagtttattatacgtaatgtcaacgaacaatgatttgataaataagaaactggtatacaaactgtatgaaggtgttgttaaggctaatgatacggagttgagtttgttatttttgtttgttctattaaggccctatgaactatcgcttggttttctacagttaaaacttgagttcccaaatatcactaataaggattataattatattgttaaatctctgtacatggttgttgacccaagttatatcaagaagtttattaaaatattatatgaaaatgatattacagtcgtgttctttgatgacgagttggttcaaggttatttggaagatttatacaagaggtttgagctaacagtgcaagaggattatccttatatatgcaatgttaattttaaagataagatagaggacgaagatgtagatttgagtgtactaaagaatgtcacgaaacaggaaattgaacagattaaattaaacaaattgaagatcaaattgagattaaagctaaagctgattaacaagttattgaatatttattcattaataatcaataactgtgataaagtctcatttgaacccctatttaaccagatgttaaattataacaagttcccaattttacaacagtttaacaaaattttatataaacacctgtttaaccatttgtttaaaaatgagaataagtgtagaagggacaaagtggcagtagatgagttggtacagttcattatgagtatatacaatcctgatgtttcagttccagacgcagttaacctgataactatgttatataatgaagtgaaacttgatgaggttgagtatagaaatgaaaaaatgatcatattgtcatttctactcaatagagttgagtctaagctaacagcggaattcctgtatgatattattctagagatgttgaaaaacaaattctattaccgaaattacatattccaatacattatcaagtaccatgaaatggttgttctgaataattccgataagcggaatagtgtggttaaaattagtgatcttgtggaattgctggagaatgtagttatggatggaaatttgatatacttgtttcatttatactttgtgataggcactgagtcaatattggatatcgttgtcaaatatatcaaagataaagggatccaaccagagtatttaacaagtactaatttgccatacattcaggttaaattggttacattcctatccttgtttgacttggtcaggttattaagtagtaaagtggaagttgaagtggatgaaataatgaaaatatatttatgctacaagaataacatgaaagtatttgtgttgtattttaggaaaaactatggaatattaagtacactgaggatatttaagagttatattgataaatgtggttctttagatgaggttaatcatttggaaacactattgtacaatattgttctggaaaccgatatttccgtcctgaagtcagatgaggtggtagcaataatttcatatcttatggattggaataactttgaactcatacagctaatgaccaataaaattagtaatatggtgattttacagaatttggcaaagtttgttgattctaaagagagactcggagataatcaattacacattactgacatagccaagttaatattatatcaaaagtgttctgattcaagatatggaagattgttggaaggtgtgttagaaaagttggaacacaaaggcaataaacatttagtatcaactgtacataatgctatactgaatgtgaacaaatcacatcagaaacattgggatgatgggccactcaatattccacatgaaacaagggtaaagttcatggataagttttattcgttgagtttgaatgacgggaattatatgagtatatttttattgcttttggaggatgactgtgttaataagtacatgaataagttggtagacttgattaaaccatatgataaagataaggaatttttaatttcaacaataactaatggtctccaaatgccagaaaataactctgacttaagtaccccaggtgatgaagctgagaacggacttaatttaatgtgtcaaattgttctgaagtataagaacgtaataaatgtgagtgagcttgttaaagtagtgtataacgatattaagtatttacacatttgtaaattcttaattaaacagattgatgataaggatgaactggtaatgtacttattaaccaatgtaaagaatagtgagaatgagatattgtattataatctgttgatttcgaatcatctggtcgaagaatatgacttgaaatcttattttcatcaaattctcttaatagtaaacgagtatattattaacattgacactaagctgaacactttggcaaagggaatagcaagcaacctgattaactttttggacgttaattccatattcttcaacattaggaatcagttgtacaacacatttacaattccaaacaataccaatttagttagcttgataaattcagtaacaacatcactggatagcaatattgataatagacacaatggtaccgtaggtagtgaactagaaaataatggtgataaaaaaatgagtgaggagattgatatatatttgataaattatatactgaagaaaagtttgaatatggtcggtgtaaagttaaagttgacaattatatgcaagtacatggttcaggatattactgactattcgcagttggacaagtattataattttgtgctagatttgctgttcaatttgatatacgacaatgaccaggacatttttaacaatatactaatcataatcactacattttctagtaaatatcagttattctctgaaaggtctgatgctagaggggttagttgtaatgaaacacattcttctaaatcagcaactaaaaacttaaatactccgattggaagaagagagtttgtcgatttttcgaaaacaaatgagaagaaaactgagaaactggttagtgagagtgttgagaaggaaaatgtgttaatttcaatatatgacaaagtgatgagcgtaaagactgagaatatgaatgatgtatgtagaaagggaaatatactgctaaatctgctcatgtatatgaataaagaaagtaaactaaatatatacgaggatgtattgaagaggaatgaattagaggtgttggtctttatactatacacatgttattcggtaatcgacattgacaatttgttatataatcttttcacacttttccaacataacaaacaagttgacactgtcaagaatattatcacatcgctgatttttatctcaaacaacgttggtacggatttcgtcaagacaattgtgtatcacattttgtacaacttttacttctccaaatatcctaactccgaacaaactaatttatttggttcagaacaaagatatgatgttgagttggacaatttggatgatcaagcggatataaatgatgcaaaagctttgatgattttggaactcatgaatgtgatgcttactgggaacatgaggtcacactacccaaacgtgttattgtacaatgtagaaaaaaaggaattttatccaactccatttgagaataaagttgatgacaattctaatggtagtgttgaggaaaaagaaagaagacacgaagtgaataagtatgtaaaatattatttgtacatatataataatgcaaaagtgaagattagtaatgaattaattgacgtaatgctggataatatttaccataacaccatgaggaataagttagtgatagttaactttttggttaaaaatttgaaaaataatcagtcttacactgaatatgtactcaatgatctgttatcaacgagtttaacacaggagacaaattataataaagtaaattctcactacagcatagttgaaatatcaaattatataaggaatagagagtataaattgtatgatcaaattgtagaacaattagatgttgtggataaggaggatagtgttgttagtgataaggattactcatcagtaacaagttcatttgataactcagaattatcatttaagaattcatccagcaaatcatttgaatccactaactcgtcagaatataccactaatactatcattaacaatactactaccgttaattcagttgatggaataataatgggaaagtgcatgtgtttgtataaattaatgaagaatgatttaataagtaggaaattggttgaaaaagtagtttatttcttaattttctgtttaaaacatggcaatacagtaaggtttgcgatggaactgttgaactacatcaacttcaaatataaaactgagttatcaacttcagataactcagtggacaagacagttaagttggcgggtgatgagaacaaattagtcataaacatattaaacatactcttgatgaagttaaaattagatggagccgattttatcaactcgcagctagaagtttctgatgtggtaaatctacaatcatctgatcctgaagcaataatatataacatagtcaagaatgaaagtggatactttgggtatgtgtttatgaaattattgaaactgttaaatttgaataaaagtgaggagaaaactttaaatttgttgttgaaattgtgtagtttggaccgaagttcactgttactcgagaatgtagatttgttattgttatttttgacctttattaataagataacagatgttggatcaattgacagcttggatgagagtgacttggtaaacagatttttaaacagcattcatgagaaaaacatgtacaaactagtgttcattctttttcaacagattttaacaaccactaacaataccactaatacagttaatggaaattcacacattagtaaaagttcacttaatggagttagtgtaaacacaactgtatactacatgatcctgtacaagttactaaactacgaaatcatactggaaaacttcatacaggagtatgtgcagtttatattacacacaattagttctacacacaattcagccttcatcagttttctactgaataaaattctaaacaagataatcaatgtgtataaaaacaacgaaatcacattaattgacataatttataatcatataacccaaatggatactaatgaactcagtagtgataggactaacggagaagtgggtgaaagtgaggttaatgcggatttgataaaagtgtgtttaaactacttaaatagcgataacgacattagtataagaggtgtaaatagagcattttcaatattgctgtatttgagtaataaagggatgaactcattcaaacattgtgtggaaagggttttaggtataatgttaaggttcatagttactgcttcagtacatagtgatactaagaattatattgatactgatagatcctttgaaactggaagaacttctgtagttggagttgataattctgtaaataattactcagaagattctgagcttaaccttacaagtgtattttcattaatgagtaaactgttgaatttaagtgtaaaatattacgacaagttgtataaacagattttaaccgttttacttcaccaactacaggttaacaatcaagtaaattgtactaacattgtcatcaattgcattcataaattaacttcacaaaatagagaagagacgattaacatcatcaacaatatcataaccagagccaatattaacacattcctcctattgttctcattactacacaccatcagtatgttactattactattactattactatattattattaccatttttatagtattatcaattatcctactatcactgttaaactattattatattggtattacaactaagttatataatgtttatgtgctgttttcaggagaagatgagatcaaaatggtgaatagagacactctggtgaattatttagttgacatgaacaagtataatttaagtgagaaagttgctaaaatttgtaacttgttagtaaaactaaactatataacaaatgaagaacatcttaacctcaaacagcagctcatataatttattgtacactaatatatagtatgcatagtacatatagtatataatattacactgtgtataatatattaatacattagtgggattgactacgttggtaattgtttaagtgagaggaaattgagcactctatcgacaaatctgagttttaaaactgaattaagaggagtgagctttagataggagataaggttgggaagaaattcatgaaataagaaatagaagcccaaaatctgaacaatgatgccaataagctgaatatacacaccaaatttattatttaattcgtaaatgggaacaacaataagagaaatgccaataaggtataaaaaggtgccttttctcctctttaaaaagaaaataacgaatttactggagccaagtaggaagaaaaaaccagaacttataaaaagattacaaaatagaagaagtaaacgatctaaagcaaatagaactccaagaattcctaaaaaaatcccgatccataaaagagataaaccaatattaggcctacttttcattatgaataacagtaaaatctacattataacaaaaaatatcaatacacattattaatatattacaaaataatttatacaaaaaatattaaacgttattaggtattccgtcactatctacactcagggttttattattggggtcagattccggatcaaaggtaataattagcccttttctcttcaaaggtccaggttgatcgcttttcattacaggatgtaattccgctaatttcgtatcaatatcgtaaattcttttccataaatattcgtattccagttggccaccaattgttaatgtattatcgactttgttaggcgctgaaaattcattaatttgctctaaaatctaaacttacgattatagaaattattcgtcacaaatgtcgatgtatctcccttatgatgtgaagcatctgttatacattattaatacacatattatcatggtataagtatagtatggtatagtgtaacttgtgatatataactagagtttagcagtacctgtggtatttttaatattattgtttggagttgactgaaaagtgttaaaagtgttaaaaatacctgcatagctcctactgggacagcatctttgaaacccttttcagctgtttggtaattattcgtggtcgtagtgttgtttgagtttgtgttattgctcatgttcccactgttttcgccaaaagtaccactttgggcattgtttgaggctaaattccccttaatctcatttttcactccaggctcctcaccttcctgttccacctcttccacatttgccacttctttaggttcattttttggcacatttcccctattcttagtcatataagcgtaatcgagagtggcatcctcaggtaaatctttactcttgagagtagctagaatgggagcagtaaaaatcttacaatccaccaatacaattgtagataccaacaataaaattctcataatatttacacgtttaacattcaatttataattttatcaataattgcaggggaaatggaataattattacagctgtaattgtaatgtgtaagaagagcttgcgacacattaagttaaaatattgtgtaaaatatgtaaatacattttaaaactgaattaatttgagtgtgtaagtgtttagagtaaaaaatactgaaaataaggaaactttatcaaaatgtatgtcgtgttgagggggtttaccattccactaaatatgatcagattccttacagatttatattttttaaatcatttttaactttatttgtgtaaactagaggagaaattggatttaaactacaatgtaaaaccactccaatgttatattctaattctggataatttttcatcacactttttatttttttacaagaaaattttttcacaattaatatctattttcaagactattttacagaattccacccctttcaacccattccacagtgatctattaattactcaaacaccattttgtgttgttgagttaactttgaaaatatttcacacattttaccaaaacccttttcagactttaaaattttcaaaatgtaacatacacacctgataatatgtaaaaaatacaatttaaacctgttattattagtgttgaatcattatcataaattttatcataataaataaagttttggactaatgatttcggtgtttaatttagaggaaacttgtttggaaacgcctaaaagattaaaaggtgaaaaagaagactcacatttaatcgtaaccggcactatcgatgacccaatttacgtttcaagcgataattctaaaactactactccaacacagacaccaactcattctccaacacatgctccgatacagttaattaatagtccaactaataatctagagatatcaaaattaacacccataaatacgccgaagacaaataaaagagtggaatcgtattataaacacaagttcttgttaaagttaaggaagaagcagtatgataataatttcgacttagggctttattttctggtcaggtttggtggtccaaaatcatcaatgggtgcttcaattttaatggatgacgagttattggagtgttctgagctctcaaagttcagggataagagagacttgaatgaatggtttgattttcagtataaaagtttatacaaaaatttaaggaaacggttggatttttctaatttacctctatcccaagtgaataagaggttatctagagaacttcctagaaaacggtggttcacaagagaaaaactatataacaaagccattgaacaggagaattggaaccccttctcaatcttcggttcatcacttccatatgttagtctcaatgacgtattcaatctcgaatccagtaaaaactacgtaataggctctcttaagcactttctcatcaataatactattaacacaaataatggtactaatacgaatggcaataatacaggtaacactatatactagtatatatatatacgtctgtagataatgaagacgaaagactatttaattatttgagcgagaagtggagaaatgagtcgcggaaggtgacggattggaacagggatccccttttgacatctgaggttttatggtacataaatgcaacaaataaatatttggacaaatcgcaaaatgtgtgtattcttcaaaaatgcttctgtgtaacacctgacccgaatataaggtttaactggaatgatcctcggtgttcagtctggaggaattatgacggtccaagaccctcaatgggtgaaattctggccagctcaaactacaaaaacagcttagaaaggtttaacactatcaaggccagagcagagcagtcgaatcatatttcacaagaagatgatatcaaactcaaacattactacaactatttcaatctcaatcattactaacttcttccatactactacacaattttattattattattttaaaatactatttttactcttttaaaattatataaatcaaataattaatgaaaattaaatcagttaattattttaaaattggttagtagtgtggtgtggtaaaaaattaaaaatattgcagataaatggaataatatttaaaatgtgttaaattaaatgaagttgtggtaaaattcccaatttgaattgaatgtgtaaataatggtagtaaaatgaagtggatggatttacgtcacgcatattacctgaaatcgtcagatttcatggcaatgctttcgattcttcacgtgctaatgttaacactgattggatttggagtgttgagggtctcttttgacattggtgagattcaggacaacgcttgggctttaatagtttctacggtactttttaccacttgcttggcaggttccaggcgtaaaaatgataatacttatggtaaattccataaatggttcttacctctggtactatttattagtttagtaatgatgattacactctcagcttatcatgggattattacagtcctagctttacatcttgtactgatttccttttctcttacaggctttccttgtgtttttttaatcctcatcaatttggtgggaatctcatttggtaccggatttcacgtgattcttgtcagacgtttatattctaaacttgctgatgatgaagtcgttaacaaatatcctgaccttattaccacttacggttacggattagctactaaatcttctattgtgctggttgacatggctattctttatcttcaagttttaggtggaattttattttatagtagattttggaaattagggttactaatgtcagagtggcgatcaaaacccagctattatttaaatgatttcccttttttaattaaacttgaaaaactaatttttggtaaatctctctttatggagtcgaaagaaattaaaatacttgaaaaaactaaagttactgatccaattcataattcacatcgtccagattttgacactaaatcaccaaattcacctgtacctaaaaataaaatcttaagttcacctttaaagcgtaaaaatttaagctcacccgcaaaggataaaaaattggaatccgatgaaccaactttatcttggggaattataaaggaacaagatgaggatttagattcatctaaaaaacttgatttaaacctcaccaatactaccactaacaccagtgtcaacatacttaattctcttactactaccacgaacaccgatacacccaacccattcagtaattctccaaagaatgtgaagaatgtgagagaatacaattcatacgtgactgaagaattgaatgatgaggtatggatggattttctgagagaaagtgagggtgagcctagtggaaaccgaacatattctcaagaaagaatcattttaaacaatcaaattagtaaccaaaagactattgaggaatttgatgaaagtttgattaagaagtttaccaagaatttacttgagaatgaggaagcaatgtcacatttaggcgatcctcttttaaatgatgaactgacacttataaaaaatgtcggaacgcaagacaatttacactccaaattagttcagcaatctgatgattctagtgaaagagaatttatgtatgaacataaaagaattgaaaccgctccattccattataaacatctcgattcagattttaattcacagtatcctcatacgatagttaaataatattattttagctatattatagtacaattatagttaataatatacttaagacaatattatatgatgttataggttatcgtataatatgactagcataaatagtttggacaatgtgctggtaactgataagattttgaatatgaatatccaaataaataatcctcttttgaagatgacatacctcataatgccttcattcattaagaagttaatgaggaaaatgttcttacatcacgaacgagtgctgaggaagcaggaagtgattaattctctacgctggagtggaccagaatcactccctagatggaactttctacacatgttctctcatgatccttatgagcttatttatgtcaagtggatgcattgctttaataaatcgttttatagtatcacaatggttgaaattattctcatcatcttctatagcctcatcggtatcacattccccaacgggcgttattatatacccagttatactattgctataccattatactgttactttactgtgtaatatcaactactcagtggtacaataatgatttaggaagttctctgttatgttatagacattatttaacactgagtaaggtggataaagagttatttgtaagtaatatcaagggtttaattaccatatctttaaggtttatcctgtttccaatcatttcattttttatcattattattatactgtcaatgggtactccatcaatcactcaaacaaaagctaaaatgaaaaaatcctccactaattcggaaaccaaggggctcgatacaactcaaactaagggtatcggaacacttaatactaagggtatggaaaccgttaaaagtaagggattggaaaaagttgtgaagatttattggataatgatagtgttatgcttagttgacttcataggatcattatttgatgtgtttatatctttgggtttaaaaacaccgccatatccagtccacaacagcttagtgatgcaatttctcatgacaaaaactgcggcgttcttacccttaagatttcccactcttttcctactctatatcgtatactttatcggactttttacttgccaattctttttccatcacattcaagccctccgatacattaccatgcaagtcacttgtcaaattgttattggtatcggaagctacgctttccttattaaacccattgatgttaatcgtagaaggattttctctgaagtggtgctaccttatattttattacttctttccaaattccacaagaaatacaaacccgtccactactaaatttaatatttcattttaatctcttttaatttaattcatcatcttaacatattttaatttgtttgttgttttaatataatttgttgtattttaatgtgttgtttagtatatgatttatattttgtatataataatttgtggattggtacttggattccgtaatataaatagtggaacatttacacatttgaataagaatataaatttcaagtatggaaatctaaattgcccttatagaagcactaaactattttcaaagaggtttgaaatatatcgattgagaagacaaaaggagatttatgattccttcgaatcgatttttaccagacgtattttccacattatttatcgttctataagattatttagcttcattttactgttaattcactattaactaatgataatttaatttattttagagaggggacttcgtattgggaacaacattagtccagagttaattcatgggattagtgtcatggaagttaaacttaacagtgactgtactcacgctgatatttatattctcgtttccggtgactcttttcaacaacgtcaagtattttttttactagtttactcatttaccaatctacttatttactaatcaactatctttccctcactagtccaagtattaacaatataatttagtgttattcatggttgaatcgtaattctaaacgtttgagatacttgatgggtcaaatgttaaaatatcgcaagaacgttcctactatcaactttcatccttacaattttgatatacgtactctcttatacacttaaaattttcattttctaacacataatttttcagacgatgatgaagatgacgaagatatagaaattgaagaaaaaacctatgacgagaattttgggggaaattacgaagaaaatcttgacgaggaaaatattgaaaacgacgaagaggatcaagaaaaaacacttaaattaattgaaattatctaacacaccttaactaaaaataatatattttctctaaaaataatacaataaacgtgatataacttatgtgaatgatattgacaattaaataattgttgtactaccacccttcatataaacctcttttgtattgtagtaccatatctctatttccaactgagttatccactgattctctagcatttgtatgtctgttataggcagcaacatctaaactgagtggaggagtttgtagcatgatcttcccaagtctgcctcttctgaagtcatttaataatttactgcaacaactggaaagattatcgccaaaaaaccattttgtcattttatccaaggaagcactaatattaaattccatggccctgtctgatacgttggggttaaaattgtcaaacaatgacttcagcagcatatgcttattaatgttatattcaacgtactttctattcattgacatggtttttagtatttgtttaagtatcgcaatggccgcttcatcatcttcatatgcacactcacttattatattcaagccgctgtaaattaacattagattgtccttcatttcccctatcaaatttgtatgcactatccccggtgtgtcaattaacaacaatctcttattcttaatagtgttagacttcgtggtggatttgtagatattaatattcttggtgagaccagggacgttgtatgatttagtaacttttctaccaagtaatctgttaaccagtgatgatttccctacatttggcatacccattaggataactctaatttctctaggatttaacccttttcttagtctacgttcattcactcttctacacatcctgaaaatatgttttcggagataaataatctcttttaatccattaattgcgtcgacaaacattgatctattcaacactcttttctcgctagcattcttgatattgctattataactgctgtgcacagatcggtcaatagtccgatagtagttaagccactgtgccattccgagtttcggcaatttatcagaatgcgtaaaaactgtaatcctcggctttgttgggaattcactttcaaacaagttgaagaaatagtcatctggtggtatgtacgggattctaccgtctctaacatccagaattatatcagacattttcaagtaatagtgcagttgtgataaacttcgacttatataatttggaaaccacctcactctttgcttacctactactggacttgtctgctcagatagtattgaactctcttgttcattcttcatattatcaaatctatcaattattgttgttttcaccagatattccttactatcagtagtttcagatgcgttccccaatatattgtcggtagtttcagtaccaaatgtgttatcactatcgaatgagttatcgttatctcgttcattttctacagaattattttcctaagtattaggaatagtagtattatagtattaagtatgtatattaccattactgtcaaaagaattttccaaattactttcaaagtgtacgctggatatattttctacagagttatccactatgtccacagtagtgttactactagtgacaggagttgtattaacactagtgttaggagtagagtcgttagaactgaagaatcctagttctgagagtattgatttggctaaatcttctttggtgacatctggctcttcaactaccttatcagttggatattcaacaaaatatggaatttttatcttcttttcactcttaatatcctttaagtcgtcattgctcattaaatcccataaaacaatctgttcattttctgctcctttcgcactagaatttatatgtgtgtggttagtattgataaatgtgtaattagttttgggagaagatttaaaattcaggcagtgaagtttatgggaaagtgataaaaataagtagaatacatttaaacacagtaatctcattaataatggttatttattcttcttctggagcatgtggatgtcgctctggtggtctctcgttcggatcccttttcggctaaaaatacattaattaggctcaaaaattataatcttagtatacaaagtgtataaatagttattataatagtggatagtggtgtacatttggtggatttggtcttaggaggaactttttgtagaaaaaattaccgcaaagactaccagtgaatccaactaggcagaggaagaaccaaggcttgaaattaagcgtgaatcgaattggaagaacatggtttgagaaaactactccagcatccttcggctaaatattcatattagttacaaatattgagattatgaataattgttggtaaaaaactcacagcctggatttttggcgattcatgcgataacttttttaatgacaaaaacatttcaatggattttataaaataattatttcaatacaccctcactccccatcatcctcaatcctactagtaacacagaaaacactatcaatcctactgttaacatggacactaatgttaatatggataattttagtagttaatgagtaatgtgtaaaaaattgggttaatgaaatttttagagattgtttttaaaaattaacttcattgaatatgcgtcttccttatcgtgaaaatattccttcgatacctcatcaacgctattcatcattattaaattaagtatactattaggtacggcacggaagttagtagaagcataagcattatagtattagggatagaatagtgtaagacttacaagtatcctaaatatttgtacagcgaataagcagcccagtttgtaactcgaacatacaaatacgtacaatcacaatcatacaccttattcatcgcattatctaacacaattattaacacttaaacactaattatatagttaataataataatggtataactatagtgttgtattacgagtttgtttaatgactttagtggcgatgcctaaattcctaaatgatcttaatactcccactgctgtaacatgtccagacttattcttatcctcttccctaaccacatatattattaccatacattaagaagtgttaattagtgctaataatatacataactaagtatatatagtgttaagaactgagataatacaattttgacatggaatatccacaaacgcgtcctctgttgttggtagtgatattagtgagatgaggccatgagagaagatgataaaagtaatacttcatttgatagttctcgattacatttaccaaattacaatcacttaggctcactaaatcataaatattcgctcttctagagtatatcatcttccacacgaataccaaaattgtcactaattttacataattttacaaatctccataaaacataaaataaataataaaaataaaaataatggtctaaaaaatattgtgaattagagaaaaaaattatggtgtagattagatggagacttcgacttcaacaccgggatcgagtggaattgaagtaattttcctaacaacagcactggaagaatgaagatcaatcagacgcttgtaaatcctcatctcaaaacgatcccatgtattagttcctacaatcgttattataatatcatcaaattattattttaaccaatgacatgaattatgataaattgtattaattattaccttctccgcaaggtgattttctggtcgttagtttgagttttctgacgggcatcctaactggtccaataactcttaaattcttctccttagcaccagtaattatatcacgacaagctaaatcatcattaatataaaataattattattatattagttagtaagttgtcgtaacaaccaatttaagggagtaaaagtaaaaataacaccacaaatataataatataataatctttctcttaactactagttattgatagagaatgaacaaattttagtttttaggattggaatttacctttttcaattgatttcagatctctagacactaaggtaagtcggattttatggatgcgattatcttcatcatattcgcctggaactttagagtccttatccatttttaagttcaaccaataataaatcgtaatagataactaaaagattaaaactaaattataatagtttactgtcttggctaaattaagaaaaataattttctaaacaatggggcatataaattccatataatataatatacacattgaaattattctaatcattcacttaacatactagattcatttttattatattttaagactccaatacgtaattggataaattccattattttagtactattttatatgtattagcatttatacagttattttagctatttttaggatgtttaaagctattttattattttatttattgttttattggtatatatttatggaatctttatctttattatatacttcgttaatgtgtaaaaatcaaatcctatagaatacttctaaaactcatgtaaaacaattataaaatatgttaaatggtaaatttgtattaaaatatttaatataatgataatatttcattaatatggagtaaatgtgtatattgtgtgtggtatgatgttgatgagatagtaatattaccagtagtatttacatgtaaattcagaaaaattgttatataaataattgaaaaaatgtgtaaaaaaatttttaatggaaggtgttttatgattctgttataaaatcgttaaaggcactcgattgcgcattgacatgcacatgctgtgcattgttaaattagtttaatttaccacaaaaatcatagaacaaatcagttttttaaattatctttgagtcaaactttatatttaaacgtgtaattacacattttttttactattaaactaatttaatactaaaatgaattgctgtaactctgataacgttgctaacgaaggacaattagatttcaaagaaggtaatgtcagactcattaataccgtcgctgatcgttctagagctcatgaagtctcttcaagagtggataggcaatgggtaattcaattatttaccgatttttaaactatttacacattcctacacattcttacacattttcaacaatttttattattttattcattgttttatgaatttccatttcctttttatttttacaccaaatttacataattttacccttaattttaatttaaccaattttttctcttatccaaacttagtaaattaacgcatatcaacaacaactaatttatttataggtcgccgtaacaacatatcagcctgttgataccattaccaagacaattgaaatcccagtaattaaaaccgtagagcgtgttgtggctaagcctgtgattaaggaacgtgttattcatgtacctcgtgaagtaactcagattgtagaaaaagttgttgaagttccagatgtaaaatatgttgacaagattgtcgaagtgccacaaattcaatatagaaacaaattagttcccaaggtggagttggttgagaaagtcgttgaaagaccacaaatcattgaacagtgggttgagaggagagttgaagtgccacaagttaaggaagtggtacgttacaaggaaattgaaggtactgaggaggttatcaaatattaccccaaaggccatggtaaggatatcgattgggataaagagtgcgaaaaacacaatattaacgctccaaaatccgcacgtccaaactatactcctgatgaaactcctaacgcatgctgttaagcttggttttatcgaatttttaattctatcctaaatttaatgcaatattgttataatttaatattattaaagtattattcaattatatattctcttatgtgtgttaatttagtttccaattttgtgacaaattacatgacataaatattattttgctggtaaaataattttataaaagtaataatttaatacacatttaaaaagcaaattattaaaatttgcctttaattttgaactaatttaatgttaaatttgactgataaaaaacaatcaaaaaaagttctggaacaaaaaaattgaattgtcaagggttaatattgctcagatctaataataaaacggcaaaatgcatatgcatgagtttgatatggttatatcattatttgtgtgggctttctgggtttgatcgtttgggcagttaaagatccagttaattccaagtgatttaccaggagaaatcaagattaaaattggtaaatcaaaaggattaatcctttttattcccccatagatctgaaaatgtgtaaatagctatttgataactgatgaaactgcaatctgatgagccatatttgtaaaattaagataatatttacactatctgccataatattgacagattggtgtatatgtgttgaccacgtacttgaaattactgactatttcagctttgatgtacaaattagtgattctgtcgatgataagggtcagtatatactctacctaccatggggtgatacgaacgttactaaagttaattttgacggtgtacagatttggcacaataagggtggctcaatgcgacttcggtttgtacgatattactacgctggacccgacccaagaatagagataacccatggaccagagggaaaagaaactgctttactatatcgtaatatgggcggtatttggaaatgtgtaaatcaagatggtggctctgccactgcatcaaatgtaggtgcaccagaagctatggatattgatcagttagattttagtggattatctatcgatgatgacaatgacaacgagaatgacaatgacagagatacagatacagatacagataaagacaaagataaagacaaagataaagacactgttgatgattcaggtaaggaagaaccaatttatgaagaaatgcgcagtatatcaactgtgcccaaaacaccagatcaacaaactccaccaaaggattcaacagatgatcagaaatcaaaagattcaaaggaatcaacagaagatttaccacaagaacaagatctacctgatagtgatgaggacgaggatgaagattctgaagagcctatttatgagtcaatggacagttttagacctcaaatgcagagtgaagcctcaactcaggcttctgtaactcagcctgaaatcactgaggaagaaatgattcagcacatggtaacaacagatgatgaggataatgcagatcgcgaagaacaacttacattattaagtgacgacaatgttttctcggatacctatattacgcaatctgcaagacctgaacctcctaaatatgaccctaaaactagaggtttaacaacaagttcaaatacttcaacttcgagtagtcccgctaaatctcgatcaagttccgttcgaagcagccttggaaaatactttgctcaacctctaaaaagacttagaagtcatttaacatcacaaagctcaggaactgatacagaccccaattatcctggtgatgaaagtagtaaaagtaaattacccagtgattctgattctgatgttgatgttgttgttgatgttgaaactattgaggaggaaccacctgataaaaaagctgagaagcatacgaggaaaaaacttaagactcgtcatgtaagagatggcgacggttcgtcaaaaccaagtccaagaccgtatagttcactgaaaatattcaagaaatctgtaaagaaaaaagataaaaagaaaaaagacaaaaagagaaagaaagaggagattgaaccggaggttattagggtggaattaggatcagatgaggaggattgtggtgatgacgagcaaccctcgactgaaggtcctaagaaagacgagttgaacaagaactgtaagatatcttaattgttccttttgacaactgtatcataaacttaccagtgatttggcttggatgaattttaaaatatttttaaaatcatctctgattttttattttactaattttaatcctaggtttaatatttaataacttttagcttttttcaataaattttaagattttaaaataaagtgaattacttttcagtaatttaataatttttaacccttaatattttaaagatctatacactccattattttacatcgtttttatttttgactcatttaattagtttaatttaagggtttattctgtgttagatattaaaactaatatttattacatgcgttataaggacattttagggttttaatagactatacacactagactcactactacacctgatcatcccaattctaatcacatccctaacccattctacactaatagtatactactaattgattaattatactatagtaatatactgctaatattataataccacttataataacaatagttatgagatatactgtaacagtatattagtgtgttaatctattaaatcaataatttgtatggttaaagttttagactactagcgtcaattcctaatttttctaatctatttctcaataatcctgttgctccatcaaaacattctaatacttctcccaactgtattaaatatgatagattatgtaacattgtgtatatcttggcccagaattgtgcaaattgtgtcaagtcatcttttaaattaacacagtttggaaacactttgctcagtccttccaaactgatattattatcttgtaacaatgtcttcaaaacaactcccagaaatgacggtttagtgtaaaataatggcaattgtgggttaagaggatcaaaaacgttatttctcaggtgtgaaaacctgtttatgtcactcagcagcaggtatgacaaacttgactccgttaaatagttaattgacctttttagaaatttaaccaccatgttaaaggaggcaatatcgaaatcaattttccccatccaaattctcgtatccaacgtcacatttgacagtgttcccaatctgccaattaaatttaccatgtgctgtgttctcttatcgtctgacttactatgttgcaattccggcgcatacggtacatctggcggtgattcaaatgtatctcctgtaaataatccaaatttcatcaactctaatatcaacaaccctgtcattcctaatcctgaacttgataatactcggccaaatgccgttgaccccaattcattagtaaaatatcccaaattctccaataacataaaatacaataacacactcaatactcttatatcttctcccataactccattaacgttattcacagcgttcatgctatgactattagtgctggagttggagttatgcgtgttgagactgttggtatgacttgacagtaggtgtacaccttggaagttatgccagttgagacagaactcgatggtcacttgatgtacgttttgtctcttcatttctacatctaacgattccttagtgatattccaattttttatttgacacgtatttggtatcaataacttagctgactgtttcattgggtgcgttttcattaatgacacgtatcttgggtaccttatttgttttgttctaaactgatcatccaatttcatcactaacaagcctaatgctctacattggtattctcgtaaatctgacaataaatctctaaattcaagagaatcggcattttgatttggctcatccatccattctcccagtgctaatgcaaatggtagttgtactgatattaacccttcacttaataaataatatagcggttttggcaatttgcagccgacaattttatggtagtcggacggaagtgtctcagatttagataaattcgtcacctcaccactcaatgtcatcaccaatgggtgtgttattaacgacttagctatacagtatccatcaatatattcatttattctgtcacgcgttggcagttgatataaatacttaatcaggggagcttgttttatatattctatagcgttagaaaacgaaaatggctgcgtcaacagtgggtaacttaaacaatgctccgttcctgctaataaacaacaatctatgaattgctctttatctattgaccatgttgataacaattcatccaattccacccattcaaatgttccttttatcaaatccaatcccatgatcactcttggcacgccaaacaacaatgttgatggcggacctaccactgcgtctattaatccttcctgcataaaatataccaactgactacttgccaaatatggcgctctgattatttcatatcctttcccttttaaatatgacattaataactgcaatatatcctccgaatattccttatatatatgttgtgaaaatttactcaatgctaatgattcctctccttttacgtacgctgcccagccgtcatgcattgtaaatcctatcatttgtgccgacagtaacatgtgtgatttcggctgcattccttgaaacacaaacagaggctgcaaatccaatgctagcatcaggttcaactgttcttccaaacacgggatgaacgacggtgatagtgatgcgtacgcgtcgctcaacggatcatttaacgatttcaatgatttaaaaaaatatactgcatctattcctaatcgcattcctctacatactgttaagttgcccattcggacacatttttgctcacgtaaatatgtctgtaaattacgaactctcatttttttccagagttgtattaaattatacttttatgttgtcgttattataggcattagatcattaaaattttgattttaaaattcagattatccaatttatcttccaaatatattactcaatatccaaatttacggctaaatcttcgaaataaattaaatttccagtaaattatccaaaaatattcttaaatttagccaaatttaacgaaatctaaatcagtaacaaaaaagagaacaatctccaattaaaagaaataaaacacggataaaaatttgttaaaaaaggggaaataaagtttaaaaacgaaaaagtatgaaatcacgtaaaaatacttaaaatcgtctgtggtgttgattctacccttaattcatcagatattactcttagcactaatttaagttatgcattacagaatgttagtatttatcgcctcgaacgcttagtttattgaatataatttatgattgggactttgatccattataaatccggatttatttgtaatactggtatttatttataatattatatgtacttatcatatctattcctcaatttaccctattttattcattaactattctattattttacatttaataccatttatactatactaatcatacacatatactgaaaccaacattagcagccttaatagtggatcaataaaattcttgcaagttttccgccagcgacgagagcatttcttcatcgaaaaagctgttaatcgacacatcttcagttaaccccttccttctacgcgtttttaccagaaattcgcgtgccaaatgtggtactggcgctggttccagtgttcgtaatactattgactaaaccaatatgagatggcgttaattagcaggattaatatatagtaatgtaactaatgtaagtaaaaaagacaatcctccagtatgtgataactaagtataaatgactgaataactgagtaggttataaaaagcactgtaacgtactttatctagaggatctcctggcacaatattccaatgatcaaacattgataaacagaatgcctgtccactcgtatcaactctacaacacacattaatactggttatacaattggaatcactattaacaatattatttaaataaataacaattaaacagcactaagattacctaagatccgtttcgaaaccgaaggattctatggctggtaagtaggcatgaactacataaaatggtgttcctggctttggcatatcttttagtacatgcccacgtctttttgagagtattttataggcttcagatacacaatcagctggacaatgaatctcactaaataatacgggctccattaatcgtggtgtactcaacaaaaacgatgaataacacagtctcctacaataataagtaatagtgtagttaatagtgtagtatactatggtaatatagtgttgtggataattacctggtggctggaatgatttgtcctggtgttatattaatgtattcgtttgaaagttcacaatttattaatcgaaatttaacactcctgaagatcaataatatgtaatatggacaagttatttaaaaaaataagtaggggagggataactatataacctagtaagtcgtagaaaatatggtaatgaatacctaattggttcttctattaatgggccttccttaattgcccaattaaagccttgaattactgatgattttactcgatttaataaattctgatcgacttcacctggtattgaatcattgattaacacgtctggtataccttctccaccaaatgaccatacatttttcacatccaatctatcccattctgatagcactcccatgccatcaagtgtatcagcatcaacaccactagcagcatagttaggattcagatctaggaatgagctgacactctgttctaacggttgcgagatcattgataacttatttttcatgttattggtacgtgtgaatgagatcatagaagttgactcagtgatagtttcggtaaatttaacgacgggatccgagaccttaatttccaaattcccatacaaacgtctcaaatcatgtagcacacagtctaggtaaagttcaccggtgccaataacaacgtgctctccactttcctcaactttaactaatgagcctggataacttttttcaatacttcttaatccatttaccattttcggcaattcattgggattcaaaggttctaatccaaccttaaacactggtctcacacatggtaaatatgatgctattctcatcaactccacagtgctattagtgttctcggttacggtagtggttttatagtgtgatatatcaataccagataacatcacccaattaccggcacacatactcgtgacttcaactctataacgtgcttctgatatccaaacacttccaacatctcttaccaccatatcctcatcatcatctaatgtataggctggacccaatagtttaactttttgaccttttcttattgtgccactgaatattcttccaaataaattgaatcctgcatcaccagaattataataattcttagttataaatattactaacggtcctgacccatcacagtttttcacactttccactaaattactatctagcgttccactgtagtgttgtctgaacctatttatactattttccagcggtgatggaattgaagtgaggactaaatccacaaatgccgaggcgtctgtaaataactgtgaaaatactttccttaatattcttctcgttgttaacttgtagtctgatttgctaagtttaattgacaattgtgctagtatagggtctaaatcttccttctcatcacttgctatgtgcgatattaacttatacaatggctccaatataaacaccacaaaggttctctccaaatctacttctcctataacattgttaaatatggcattaagtatggttattagtattaagtatattatcacctgtgttatgatcatcaactccatttgcaccatttactccgttaaccactccattcacaccgttaagatgctcactaccatttaccattggactggctgtgttactagtggtaatagaattcttgattggattgtagtaataattaccgtaaagtagtttagagaattctgtaacattgtcattagtataaaaggtagcaaatgattttaatgtgaagaatatgccaaactttgccgacgcaaatgctacattattgttcaccgggttaaactcactaacttcactattcaataatttacacagagatgtaacatatctattaacctctgtcagtgtatgttgtattttcaaataagcatcattgggtggtaattttagttccaatattaatctatcaatacagtttaacaccaaacacatgtgaacttgatcgtgtacacattgtcttattatttgctcagttacacttgttaatcccatcagaacatcaatcaccaatacacatccatcacaaattgccaaagcgtgtacaaactcatccataaaattcacatgtcccggtgtatcaaatatattgaacaggtatgacttagactttggaaactcactcacgtcatttatattttcgtataatgtgttttgaaatattagtgatattggagtactctttatactcaattctctagcttgttcatccaatctggaatctgtatatcgtgtgaactcaggattcttcctagtatccaacgatgtagattggtatctgctgaattctattaacctatcaattaatgtagtttttccatcatgaaatccaccacaaatacagatatttctgataaattctggtttccttgtcaacgaacttaagaattgaaaactaaatttattttgtggcaaattctcctctaaaatatcaaaattcttcaccgttacatctgagtctaatctcttaatgtttgttactctctctacagtctcttcgtgtggttctattattggcacttcaattgtttgtgtatcctcttctctcacaaatacttctacgtccggatattcgtcatcagcttcttcgcctgtatattctacaacactttccctaagaatatcggcagcatttactgcgttaacattgttactgatgggttgaggggattcttgatcggaaagatcagaattgagcccattatcggaatcgtcttcaaatccaggtccgatataattcccaaactcatcatacaaattctggtccataccaataacaaactattataaaattttaatgatagttttggattagaattctactattgattccccacaggtatagattctatagatataattcaacacatttaataataaacatttccattattaatatcgttaatttaaccttcagattaccactatttggattccattaacccactgttaaacaggatacttgaattccacaattaaagagctattactataataaaaaacttgcttattatcaataaaatatatggttgagttgattgattgaaaaaattcgaaaaaatatgattttgttggtaaattagatcatgatgttgttccctatattgtgatgttacactttatataacaatttgtgaagatgtgaaatttgtaaaattaattatgaaccttttatcgcatattttaattaattttttattttttaatgtaaaattttgctgttttagtattttttatctaatgtgtatttctgttacttttggtacaaaatatgataaatgtgacttaactgttgattccgctatttgtattaataatactgaaaaaatcattcttccagacgccaaacgctttggtatcttctttacacattttacacaatttatagtagtttacacattttatatattatcctttgaataatctactaggtcgggtattgtatatgaaatttgatgagatatttcccgttgatagtagtggttatggaaatcacggtattggccagatttcaggtcattcgggttttggcggtataggctcttcagcatatttcagaggaaactttatacacatatcctcaagcaactcctttaatggagttgacttcacttatatgttttatatttacatgttatctgatgagaaatctgtacaaaatagtctaaaatataatcaatactgtactgtaatacacaaggtaatgtttaatactagttttaatctgtgataggggtataaaacggatttggcaaatgaagcttcacctgaaatcgcaattaacccatcagtaaccatatatacacagttaataaatttgatagactgggaggttaaaagtatccgtatcattacaagggaataaaactgttggtatgtacataatattcttaataagtgtttagagttaacgtctaatagtagacttcaacatcatcattggtatcacatagcgctggtccgagataaatatgatatacttctcttcatcgatggtaatatattatactattatataatatactctactataattaattttataataatgattaggaatattggattctaagtatgtaacgaaaggtaaaagaatttccaagtctagttgattttagctgttacaagaccaaatccacttccattgtatattggtggagcacccttcactactaattgtgacttcccatttctactcgatgaattatccattttctcacacgtaactccttcattcagtttactatttactatactattaatatattattggtataatgattggataggctgttggaacggatgaaatacaagctgaagcatcattttcattgggtggcattgaatcatcatatattaccatcggatgtaccaattgcaggtattacacattcacactgttcatattgattagtaaggaggaagcgatgagttcatgtcctgatggttatcatttatgtaataaatttgagctttatactggtatcccgttacggtgcttgctacactaacttagtcttacttacatatattactaacatactcaagtatatagttaggggtataaagatgtatagggggatatagagtggcaagaaaattatcattgactgttagtgatataatggcttctgcttcagccgaaccttcgactggaattggtctctgttgtaccaatttacgaaattaatttactgattaaaattatttttttgggttaaaatcccaaatcctccttaataccttttatcatctaatacacatatacattatttatactattatatactactaattatatatgtgactggtacgttgagtaattctagggattgttccatgtttaaaggctttctttctttaaggaaccaggaaacgtattctaatcttcggttaatttcaccagtgtcaaagtcactaaagggtaattccaatttacacttcttacaagcctcaactaactctggatctaaacaattatcaatatacacaaaacttacatttctcaaacattaataatacttaactatgagtaaaaactctgaaaattggtaaaattttaaaaaatagttaaatggtgtaggaatgtgtaaggtatgagaattgatagaaatgaatttttgtaaatttatttgttaatgaatttaaatataattttacttgatataattttaatatttgtttttaaaaagtcttcttttaccaaaagaatctcatcgcatagtttttaccctaaatcgctcttcatcaacaatttcagtaaaattaactataataacttaaaactatacaatgattccacagacaatgataaccaggttttacattctatcaataccttaattatttaataattttcttaacactttactgtaaattttattcatttttttattagaaggaatcttatgataaggcaattgatgaattttttatcaaaaatcgtatgattttcctttctggtgaactgaatgataaagtttcatttaaaatcatttcttccattttgagaattaatgaaaatgatccaaatttaccaattaaattctacatcaactcccccggaggatctgttactgctggtaatacagacattcgctctcattattttaactatacaattagttcttactaatgtgtatgatagggttagccatatttgatgtattgaggagtttgaagatgccagttgagactgtatccctaggtcaagctgcttcaatgggtgcttttcttttagcttctggcaccaaaggcatgagatatgctatgccaaattcacgaattatgatacatcagcctttaggtattccattacggtgcttgctaccgctcacctagtctagttattcactacttagttatatactattataatattaactaggtaatatttttatctgttatgtaggaggggcacatggccaggcgagcgacatagaaatccaagcaaatgagatattacaaattcgtgaaattcttaatacaaatctgtctcgatttactggtaaaagtgttcaggaaattgaaaaagactgttccagagataattacatgaggccttcagaagctcttcaatacggtctcatcgatcacattatacaaactcaataatatactactgtatatagcacagtatgatagtattagtatgtagaataatgttgaaggagattaattttgatcattattattatcaatgctgttggagttaattttgttgatgttgttttttttattattgataaagtagtttggagtattggtaatttcaagacgtctgatgggattgaattgggagcattcaataataatgctcaagataccattatcataacatgcacttgcagtattatccatggcattatttggaagtttgaaacgcctgtaaaagtatccaacctttctttctctgatttggatattcaaattctctccaaatttctcatacaactcttccttaggtctagggcctatacaagaatgttagttagctaaataaagtaagactaatacacaaactatataaccaagtaatcaggagggatagaggccgtaatgtgatacctgaaacaatcatttcaccatcaccgatattaatttcaatatcagaaataggaaatccaggaagctccatgagagtaaccaaattgttattatccttatcaaagaaagtgtcgacagtgggataaaaggtaattggatattccaaatcctttggtggtgtgatctcgagaatattattcggaggtaccactgtacttggtttatacattactgaaggtttctctacctatagcaagtcttacaaacaccgtaaagagttaactacataataataataacgtaatgagactatctgaatatctaataataatattgataatgtgttatcgtacgtaatcgtatgttttgttgttgtagttatcgatatcgccgacaataatttcgtcgttagtgtcattacactttaaaatgcaactcattttattatttggcttgttgaaacgtgactcagttgactccagataaaaagttacacaggaatagtaataatggaaaaaagaaattagtcacaaactaattactgaaattacaaaattttacaaaagcaacaaaaaacaacaaatttaattattttaattctaattctgagatgcaaaggcccatgcatacatttcaactgtgcaccatccttgacatcaattttacacattttaccttctcgccttcctttagactccaaaccttaattaacattgcatttgaatggttttaagtttattttttaaaaaaatttaaaatttaagagcaaattagctggaaaagattttacacgcttttatcattaaatttatttaatttccttaaattactttttaatatttaaaattacatatttcacaaaatttataataaaaattgattctttaaccttctcctaaattgaaatcaatcttccccttcttttcctcgaagctccaaaattttcttcttattcccatttaatcctcctcctattatcatttagttaatctttacttcatttattttataataaaaggcattattattctacatcgagttaatacattctgtaactagtgtgataaatagtgttactggtggatatggtgacggttcctgtaacaaagtctaaaggtgtttccatacagtcttcaactaacgaagacatttctgatactattctcaaaccctttcaacccattgtatacactactcactactactatatatactattatatagctatagaaattaatttttcaccaatcaacacttaattgacccgtttgtataattatctataggagagattggaggaattggggataaatgtaacggacataaataagttaaaagctgctgggatatgtacagtattgggagtaattcaaactacagtaatagtaaatctattattataatttgtagaagaaagatttatgtaacatcaaaggcttaaccgaattgaaagttgataaaatttcagattgcgcttcgaaattagaagttacgaactctttcatttcagcttctgaactctataaaataagaaaatctattctcaaaattaatacaggtttccaattacggtgcttgctaccgtgccgctagttactcagttattggcccctacgccatctcagatttaaacttaattcgcatttaacacattttaataatatattagggagtgagatgttgaatagattattgaatggtgggatagagacgatgtcgataactgaattatttggtgaaaatcgtactggtaaaacacaaatctgccataccatttccgttacttcacaaatcatcaatcctaccgaaccattcaaagtttcaactacgcagtctgttacttaatagttttaattgtattattaactatataattattattatagtaatattgtgatgattaggtatgttatattgatactgagaatacatttcgtcctgagaagatagagaagatttgtgagaggtttgatttggacccaatgattactcttgataacattttatactctaaggcttatactaatgagcatttactgcaattaatcagcaacattacttccaaagtacgttactgcgcttgtacactactagatatgtagtccctaatgagcattagttaatacactattaaccaataattgtgatatttcagatggtagaggaacgatttgtattgctgataattgactctataatgtcactatttcgtgttgattattctggcaggggtgaacttgctgaacgacagcaacgacttaataaattactatcaaatttattaaaaattgctcaacaatttaacgttgctattgttttaactaatcatgtaatttctgaaccttctggtgctttgtctttcatatccaatcctatcaaaccaggtttcaccgttagtttgcttgttcaagaggcaccagttacttatacactctctatattcttagttatataatcccttattatgtcgtttagctggtgggaatgtcattggtcatgcctccacatgtagactatcgttaagaaaaggtaaaggtaatcaaagaatttgtaaagtttatgattcaccaaatctaccagaatccgaatgcattttcgaattgtaccacaatacacacataataattagttatactactaacatatatttgaattgtttagatcagattcaggaattatcgatgttactgaataatgtatttattgtgaattatactttaatactaattcatctaaaacattattaattttattaaatattgttaaatttatgatatattgtaaattagtgtaaaaattacctaatttgtttaaaaaactctgatttgttaacttattaaataataaaggattgcaaattgttctcgtatataattcatttatctcctcaaacagctgtaataacagtattatgtgggtaaatagaactaaataacacctaaaactaagttgaaaattacctgtcgtatggtattagatgtgagattcatatcattgagtatgagaacaaattttaagcaggtggcagtgatgtacgcgtaaactttaaagaagtttaaaccaattaacgttggacttataaatcccaaatacggatcaattattgaataatccatcgatatctgctccgacactaatacaaataattagctcaataaataatatggtaactcaatatataatcaattgataactatcattaagtaatttattaagtgtttggtacataattctttaataatatcaagtgatgcgaaagctgaaaattgcatttccgactcatcaacttcagcaaatttacgactgaacacattctcatcctacaatcaacacattaccaattatatacaactggatatcaattgtatacactatctatgaagcaaataattaatggttataatacattttcgtttataactgataaaaaaacgattttattactaaatgtattcatatacttaattcatttaaattattatattattttttactaatatttattaccacacattcttcactcattgctccatcaaaccatttattatagtaaattattactatacattaaatttataatgacatgtacactattttgagaagtattaaatttgtgagaagatacggaagaagtttgtttttacaccaaaatttcaaatattctactgggaataacacaaaaataattttacggaataaaattccaaatcttcaaagattttcgcttgatgttgattcagattctttccttgttagtccttcccgattaacttcttccgaatacatctaccaatacctctcttcaggtgctttttaaattattttaactaatttttctttattttaattatttatattgaattttatagttttaacgattgtttaggcgtttcaatattgtttattttattatttattccatttccctttgctttatttttatatttaacatcgaaatacaggaatttatcccacaagtaagtcaaccaattcttaacttaatactatagcttaaatgaagccaatacaacccaatcaaatacctctaaaactctattttttaattctaaagtcaaagtgattaataattccaaatctttactaaacctacttgacactaagaaacctgtgataatttattatttttctcaaaataatgaaaattctctgcaaattaacattattaaatctgttttatctcagattcacacactcctcgggtaatccctaatcatattttaatattttttagtgatgagctggaagttgtatttgttgacataaatagattcgagggcaagataaatcctgtattaaaatctgaactaacaaaagcttcaaacaatttattccacttacttattccatcagattctgaacctttgctaacgactcttactccaatcacttccatttcatcattcttacactctgtcaaggatattctacagtcaactccctataaactaaagagttccagtaaattaaacaataattccaatcacttgattgaggaattggatgaagatttgactaaacttagaaattgtttatttgaactgacattagaggaaaaagattacaattctttaatttctcaaaatgacatcaaatctatgcttaaacaatgtaatacaattctaatttaatacaaacacaatttaatatacctagtttaatccgtaacaatactaatataatcctaaataataaacaataaacagtacaatacaatatattatatatattggaataagattaatttcatcttatttacaactcacttctcaacttcgagaaagtgctacaatacgtctttaaaatctgcaattaaatcttaaacattaacattttagtgttacacactacattaaaacatttacaaaatactgagctgactgtgaatgtaccagttgttgaaagtctatgagttataatgttgaccgtgttatgtttgaatgtgtcatgaattactaatgtccgtgtcatgagttactaatgtccgtgtcatgagttactaatgtccgtgtcatgagttactagtgttatgtgatgaatgcgttatgcctccccgaaatcttttagatcttcgggatctgtgcttctcttgtaaaatgcgtttaaaactccgaaaattatcgctgcggataaacatagtgatactatcattaatataacaacttcgtatgttaccgagtctttatcaactctacccaccttgtgtttcccttcaaatcctttagaagagtcaaattccggctgtggaattaccttttccaaccagcttcttaatggcggtgcaatgttaaatatgaactgaggacttggtgtttcgtgtgaacttccttccaactccactaactcactgttcggattagaagacaaatgctcatcaaatatctccttaactccctaaataattattcattcactagttttatctatttactatatgataaactaattatactattaaatgattaactgagtaactgggtgaattatgtgaagaaatacttgaatggagcagaggggatcacttttggagtggatgaatagtgttggtatatgcttagggtaaaagttcatgttctgtctaagtacttctgtagccttaaacaactcatgtaataagttaaaagggtaccctcttgaataataaaacccgtcctacacaaataattaatactaatactaaattattagctaacactaaaataatagtaaattatactagtaaaagttagttaataatttgaggataagttaggggttagtgtaactaatttaacaataatttaattaactattggcatacgttaagtttatgatagtcattaattttcatggtccaatctccgtatgcagttctttcgcattcagatttcggcgccagtaagctcatgaatgacaatgaaaacaaagaaatgatctttgtgatgtagtttgaaaatctttggtctaacttaagcattcctgacagtattataactccaccgattccgcgcattttattcagcttattaatgtgctgtaatgtttgcattactatgtttgctcccatactatatcctagaatgtatatctgccctcctctatacgctccgtccacttcatcaactcgaaccctaaaactatcaacactactgctgaagaacttgttagacctgatgatatcaatgaatttagtcaggtcgttgatgaagtcgtcaaagtgattcacgtaacatcttgaactagtcatgccttcggaatacccaaaggactgcaaatccatgccgtacacattcagacccgcattgttgaacagttcaaccatgctactgttgaactcatttctgttatagttatcaaattgagtgaagaactccgagtatttgtttttgtcatttctccaacttgtgcgctggatatttaattcgaaatcgtcaatcgaattaatgtttggaaatgacgggtatccaaactgttcaaaattccactccttgttgtaatttaagaaatttgacttgaaatactccctgtttccatgaattaatattatcgatcctctcaccaccgggtttgttgttttacacaggtaggtgcttatctttattcctttatcgtttacgaaattacttctcataagtctatcaccaacactaccactggcgttattacttgagttaccagtattgacggtcagtagttgatggtattgttgagatgtgattgctttccaatgagaatatttacagaaatataaaaccttagaattattattcgacttgatgtacagtgtcatcaggtgattgggatccaccatattaatatcaatgtatgtacagtactcgtttctgttgccagaccacactttaccattattggatgtgatgctagttagtttataacctggttttggactgattttttccaggtatattttctcactgccaaatttgtgtttgacgaacttcgcgtccactttatcaacatttaattcaactttgttatcgaatttctctaaatcaattccaaacaatcttagattttcatagtattcatcttgcggtatcagactccactgatcatttgtgaagtgatagtaatacttcttgggatctgcatttgagatcaaacacattaaaggagtttcagaattattatatattgatatgtataaacagcgtttacttgtagatgacgccgaccagacaaatctgccactatccgtgaccttgtgtactctaacagatacatttggtattatgataataaatgggaaactctccacagtattcacgtaaaacaagtgctcatctaacgtcgatgagatatccaattctatactctgatgcaccattcttcccaacacgaactcgttaaagaaattgtaaaagaacttctcgtcacactttaaccactcctctccgctattaatcatgtacattatctcatagcggtcctcagtgtgctcttgtgcttgaggattattctcgttaggtttagtgttctggtgatcatgagattgtttatgttttagataatgtcccctttccttattttgttgacgattttccataaattcatccaatttcagtgattcttcgttttcctcacttgctccctcattctcaccatttacttcaccgacgttattggcaacattactggtattggcagcattactagtgttatagtttacatagccatttttgttacatatgatcgtgaggaaggtcggtacgttgtcatcatatgctactgtcgccttagtacaaacctgctcatttgatgatgcccaaacattgtgtaaggattccagaacatacgccaatttaaagcctgggagacatctaaattgtttaatttcgatttcatgcgggaatatagtcctaacttctataccctcgtttacgtcctcactgatatccaaatccactccattcaaatggaagccttggtactgatttccgtagttctgggttagaattttcgaaccttccacacattctaataatataggtaatatcagtaatttcgcaatataatacattacattaccaaacattaaatttcaactaactattctatttcattgttattcaactatttatccgattaactgactaatttagtatcattattattacattatggggatatcatgaataataattattaaaattacaactaccgctacttccaaaaataatgtgaaaaatatattggtatgatattacatgtgagaatttcgtgtatcatgaggtttctgagaaattccgaggtgtagttggtgaagctgaattctcttcccattgttatgctcttggcatactgacacaggaataatccacagtcgtatgaattttgctggactggcgcgtaaggttcagaatggaatccgcttctaactttccactcactgacgtcgcttagtgcacaatcaaatttatctttatgttcatcttgcaggtattgtcggatagttttgaaaaagtgtgggttagtgcctcctaaagagtcgaataccattattctgcgccactttctccgcatgtcaaccactcctagggcccagtgtacttttgatacatttattggtattaataataaatccttttggaatatattaatcttcttccttcgtgtccaccgtcgtacactactgtagtcatagctggactcgctgccagataaccgttcatagaaaaatgtgctaaaataataacaatccggtacaacgccatctacaatattattatatatagtttggtattagtatagaaattagttataccaatagtatggtatgagttaccatttgtgtcttgtagtagttgtaggtagaaattgataatttcatcattgagccaattattgctgaagagacaactaatattagatttagttatttctattccgaatttatccaccaatactccttccatttccctaactctcctcaaagtctcgactatactgcccctgacactaccaatactattcccattcataccattaacagttttgttatagaatagtatgggtatatagttgagagtatcaacatcgtacggtactgcgagcgttttaaggtcccagatatcgtgatccttatcaccgatttttggaaagtagtcatattcctctgctgaaacttttaatttatttagcttttcctttaacttattatccttttcacgatattttcttaacacttcatttaatttatttatctcctcatctcttacgctaacttttaaacctctaaactcgtccagtaggtcctcaactcctccatcctcgctattaacaatatcgactgcatcgctagtattgtcagcagtgggagcatcattttcctcaatattccctacactagtagtatcgccatcagtggtagtaggtttggagttgaaggggtttgaaatgagtttaattttcttgataattttattgtaataaccaaaaaatgaaccaagccccttcaaatcattcttcatctaattattcattattaatatataattttagctaaaatacaactgaattgatggtaataattatggtaagaaaaatacctgagggatgtttgtggttgagttttgggtattgttatccgaattcttcatttgcaggcatgataaatattaattaatattatacagtgaaatgttcaagtgtaatgagttaatatagtacaaaataaccattttacaaaaaaatttaaatgttgaaatattaataaaattaaatcattgctaaattcaaatgcaggggaataaattaaggaaattcggtaattcttgccataattaccattaaactataataacattactaaggaataagtgtaggaataattcaccataagaatcttgggtaccaaattctccaactaagttatttccgcttaatttacttttattatattttgtctttattttacacattttttccacgaattttaaattctatactatttcaagaatttctctttttcatcgcaattcttacaccatattgttgttactcggtttttattatattttaatgatatttccccgattctttactattgattaacgatgagttaaaaatatatgaaaagttgtacaaaagatgtggaatttggcggtaatactactattactaaaatgtgtggaatccttccgcaatcctatggaacacagattccacctattattaaatacagtagacagtcctaacagtataaataacaatgctttggaatccaagcaactcagagacaatttcaagacaaacgccacaaatcaaaaaaatatcttctccttaacggatctcattggtactaatgaaaatgagcataatcctcatgatttctccatgtgcatgatcaccaatactgggcaaaccgcctacaatcccgtctcaggtaccaaatatttagttacatatcatatacatagtacactagttatttcttctttagctactcttcattttacatttttttacattatttaactatttgtaatatttcttcgtaaatttatctaattgacccatatcgttgatataataatgtgtagataacgattttgtggagactaagcatgacacgaagttaatgatgatgggtaatggaggacacgtgtttaactctcaagattacacagacaaggcatgggaggcaatcacttcattaactgaaattgcaaatgagtttgactcttcttatgttgaaggcgatatgttactatatgccctggttaacggcaatgacgatgtggttacaagggtcctaactaatgttggaattgatcctgaaaaccttaaaaaggaacttgaaaatcatcttaggaaacaaataagaatgtcaggctcattcggtgatcgcaaaatcctaggcagaatcctcgaaaatgttctcaacatctccaaacgatataaatcagaatttggcgtatgctttacttatatttatatttacactagtttcattatttgcaatttttttgtcatttacaatttggagattattttccataaaattgattgaattatctcagcaacatacttatatgttttaggacaaatatataagtgttgatcatttattattgggattggcggctgaggatacgaaattctttagaccttatttgacaaggaataaagtaacacttgaaaaattaaaggattccgttttgtccattcgtggtaaacgtaaaatcacttcaagaaacaccgaaaacgtatctcaacgctattcataccattgttattaccacatgatgataaaactattatcatatgattcaaaaatatgatattaaaaggcgaatctgatattaactagacaattttattcattgtataacactgcttaactataatttaattattaagactaatttgaaaatttagagttacaagttgttgaataagtttagcaaagacttgacggatatggccaggaatggtaagttggatcctgtgataggccgtgataatgagataagacgtactattgagattctcagtagacgcactaagaacaaccctgttcttctcggtgatcccggtgttggtaaaactgccattgctgagggcttagctaatcgtattgtttctggtgatgttcccgattctttaaaaaatcggaaagtcttatcactagacattgctgcaattgttgcaggtgagttacgcagttttctatctcacttggttttacatttatgtgtatactttttacacagttattcactcctttttccattcccccagttacccctgattttaaaatgaatacttaaatattaatcagtgccgccgtataataatgagtaggtacaatgtacagaggagagtttgaggagagattgaaggagattttgagtgagatagagaattctcagggcgagattgtcatgttcattgacgagattcatactttggttggcgctggagagtcacaaggttctctggacgctggaaatattcttaaaccaatgctggcgagaggtgaattacgctgcattggtgccactacacttcaagaatatagacaaaaaatcgaaaaggataaggctctagaacggagatttcagcctatttatgtactgcattgcatgcaggcaattcctgctatactcacagttatttatctacactatttttacactatttttatcgtattattatagtattaattccatgtttagatcgatgagccgaatatagaggagacgataaatatactgagaggattaaaggaacgttatgaagttcatcatggtgttcgtatcctcgactcaaccctaattcaagctgtcctattatccaatcgctacatcacgtatcacaacacggatgtacttattcattacacagttttatagttattaattctaaaaaatagttaaatcatatttactcctgtaaaattttttgtagtgatagatatttaccggataaggcgatagatttgattgatgaggctgctgcgaaattgaagattcagttgagtagtaaaccacttcaattggatatcattgaacgtaaactactgcaacttgaaatggaaaagatttctatactcaatgataacgataatatcggtatcacactactgccttctagtttcgtagttatctctatttttttaattctaaccaaatttaattatgtataattattaaatacctcccttacattttgtaggaatattatctaagaatgagaagaatgacactttgaaaccgaatgacaaattgcgattagaaaatatcgacaaactcgtcaatgagttaaccaaacaaaaggttccacactcttccccatatacatacttaatacaataataatagtgtaataattccttaggatgaattgaatgagatgtggttgaaggagaaatcactggtggataacataaggaatataaaggagaggattgacattgttaagatcgagattgataaggctgagcgtgactttgatttaaaccacgccgccgaattgagattcgaaactcttccagatcttgaaaatcaactcaaaaccaatgtcaacaattatgaaaattacatcaaacaggttcgttaccaggcttcatacccggggatttctttatacagttaactttaattaatttagtattagtacatattagtactaatgtgtgatacaggtgatggagactggcggtaatatattattaagggatactgtaacgaaagaagatattgcaaatgttgtttcaaaatggactggtaccactttactaccaatattctgaactagttatttattactcaagttatttaactatttggaatcattttttaccaattatcttcgccacagtaatagtgtggtaatattgcttcaggaattccattgaataaattgataaagagtcagaaggagaagatcttacaactgaatgatgaattgcataaacgtattattggacagcaggaagccattgatgccgtggttaatgcagtccaacgttccagagttggcatgaatgatcctaagaagcctatcgctgctctcatgttccttggaccaactggcgtaggaaaaactgaactatcaaaagccattgctgaacaattatttgattctggtactaaattactatcttctctattccctccgggggtcttagttattccccccggagtccttagttatccctacgggggtatttagttacatattaccccagttattccatattttttaactattttttgcctaaattagttaactatttaaagaataactccttataaaacattttagaggaagcgataataagatttgatatgagtgaatacatggagaagcacagtgtatcgaaattagttggtgctcctcctggctatatcggttacgaacagggcggtttacttactgaagctattcgtagaaaaccctattctatcttattatttgatgaaatgtatctccattacggtgcttccaaaaactactcagttacttagttatatacagttagttaattagtcactaaaggacacccatttatattctcagttacatactatttatacaccatagtagtggtttagttaactacataatactcccaacttaatataatatcatagtgagaaagcacatagtgatgtgtataatatattattacaagtattggatgacggaaggttaacagattcacttggtcgtaaggtgaatttcacgaattctctgatcatctttacttcaaaccttggcagtcaaagtattcttgaacttgcaaggcatccagaaaagagaaatgaaatgaaaaacaaagtcatgacctctgttcgacagactttttcacctgaatttcttaatcgcattgacgaattcatcgttttcgattcattaactaaaataggtgcgttacccgttacggagcttgtaaacgaatagttatatagtttcttagttttttactttttagttttgtagttattcatctatctactcctttagttatttatccaccacctattagttatacacttccaccagttatataccattacaatactatacaactattataatgttgtagaattgaagaagatagtgaatatggagatgatgaagttgagtaacagattagcggaaaagaatataaaactatcaatagatgatgcagcgatgagtcacattgctgatattgggtatgatccagcatatggtgcacgtccactaaaacgcacaattcaaaaacaaatcgagtcgccaatcgcagttggaattctctccgaccaatataaagaacatgacaatctactcatctcatacaaagatggaaaattaaccatactcccacaataatctcatacacacatagtatacataaactatgttgtatcatatacatagcactatgctgtattatgtatatagtactatgtttacatcagttacagtattgtaaacctggagtaatatacgtaatatgctgatactatatacactatacaaatactgtaaatatactatatacctatactactatacgattacactagtaatataccaactatactactacaccttgtatacaaatagttctgcacctcatatactaatactagaaataaacaattacatatactatacacaatacacacatgtatatagtgggttgatgaaattatgagaagggttcgtataaatcttcttggcgcttcttcttgcgattggacttcttaggggtgttgttgctaggctgagaagatctcctgttgagcaattccgacaccttaatgtagttgggagtcagccactcaggctgaatgttcatgttaccaacctggcatctgaaaacaatgcaagcatggcgagcgtcagcaagagtgttgtagtgtcccaaagagaagcccttggtgcggaatttaccgttttcacgccattgacaacgccagagcttacgagaagcatcaaagtaaacaccaataggtaaggggcccatgggaattagcatgtcctgagaaccgtaaatctcagttaaattgctaactgaaggtctgctggggggcattctcttttggacatactttacgctcttcttgctggagtcactgtcctcgttgtaccagtcttcaaattcacccttgtcgcttaaattattcatgtcgtaaatgtacatgtcgtcagtttgcgaaaggtccctggtgcttctgcgactgcttggcaagttctccaaactacttaaactcctgtatgctctcctactcctgctcgggctcttcctcttgttaaacatctttggactcgctgaactcaccgacgtgaacgacgacccgtcatcttcgctcatgatgtcgtagtttaaatactggtcattctcaaatgtgctcctcacactatccactccaatgtccaggtatatcaattcacccacagtgtcctctagttcctctatgatttccatgctatccaaatgcgactcgtgtgatctgttagtgtgtgattggtgtgatggagtgaatgaattaattgagcgacaggtgccaaagggcggattaatgtattctagtccttgagaaactgatctttgatatcctagtccgtttgaaccctgatatcccagaccaggcccctgcccaactccatgactggaaagttgatggctggatccgttaccaacaccttgactggagagctgattgttgggagactgtgtgaaaagatattctccaagtctgaaggttgagagtagagcaacgttaagcgtatcaattagtggcttgtagtcagagctgattttctttttaatggcggacccaacttccaacgctgttcttattgaacgtctcaggccattaactattctatcatctgattctaaatcactgttcatagtctcaaatgatccaactcctgacacattacactcacctgataacctaccagtcaaacttcttcccaacccaacatctacacaattatcaataaaccaatattcgtatttaaaattcagtatagcattgggattagcaatagtattgtattatagtattagtatagtattgttaataatagtaatacagtattactaccagtataactatttaaaattaattgtgaaattaactgtttattacctgttgtgtcaattttatcctcagtatcaccgcaactgtcaccgtcatgaagaattctcgtaatgtttgaaatgtaattaatacagttggtgcagaagcaaggtagaacttcgttggcttgcgtgttagttgagagatcagtgggtgttagggtttctcttgatgagttgaggttaatattggatttggtgctaaagtctgaagaggctgaccgagttaacaggtagttagctccgttggtgtgctttttattctttggcgtactcgattcttctttcaaatatgaacgtgtgaaacgtcttattcccatcgattcgtacctgccattgatttcaccttcacccaacgtgttatcatccacataaaacctccaccagtagggcatgatatccattacacgctcttccattaccggctcaggtgctacatcattaacaacatcattaacaacatcattagcatcagcggtaagtaacgggtcagttgagtcactaattatgttggtgttgttctctgtagtatctccattagcggtgtcaggtatgtgtttactcgtgataacagaatctacaatattattaacattgatacaagtaacagtattattaattttaatattcgaataatatagtattaactgtataatagtgtttactgtagtatgtagttaagagtgttaccatcatgggttttaaagtcgtcactgacaaccacaccactgtttgtggtgtaggagtgggtggtgggtgagacgttttcagaattggtgttgaaagtgtttgtattactgttactgacgctgttcggatctgaagaatcaacaatcttagtctcacacatcttcagtgatctcattatatcgttgctcgtgatgtagttattcttgttcggtgacggtgttcctatctcaccctccaacaccccatccacatcaactgcgttatcggtgtccatagcgttacgagcgtccaaaatattagtattctcaactgggtcatcgattgtagtagtgtccattgcgttggtggtcttgctggtgatgtataatttgatgcgatttagcaagaggttaaaggtgtgcagaatagtgtttttcgagagtaaattcggctgtatgagttcgtgtagaatgacgttctccttattaatgtaactcatgccgtaaattgtattttgcaaactattcaaatcacagctgtactcaatcaggtactcaaaacacatgaagtgttccaaaaaccttattgagatgttcagtggcggctgacagtatgaattcagctgattcaccaaagaactacatattgaattcaactcatcacacgccttctcaattaaactctttgcatattttacacattccgctacggtgtcaggtccaaacctaggagaaatagtaggatccacaacaccagcactaaaattaccaccgatattaccagcattaccagaattaccaacattaccagaattaccagtaaaattgaaggtaagaggattttccatattttcatcgatgcttctcacagtgctgctaccactagcgctattactgatattaccaacactattaacgtcgtcaaggagaatgtcacagtgtatgacgttgatattgtcaatatctgacttcttgccattattagtctgtatgagaccttcgagaatacctatggatttgacggagctttgtactttatcgataccctcaagcaggtttggcacacttgagtgctccaacagtgttaggccatacttgttatcctcgcctctttcaactatttcgtaaagtgccttttggacctgctcacgtgtaaattgtacgttttctacaactttacactcattgcagttggtcacatttccaccattcaccacatttgcgtacttgcatgtggataaatttgagtataagtacaagtgattattgtagattattgatatacactgtgatgaggtaaagtctattatcatattattatataatatttcactcagtatcttcttcacatactgtacttcatcacattcctcaggtagggtgccatggccagcaccattaacaccaaatgtgttaccactgaccaagtaaccagtattaggattccccaaaccgttattttcgtcaccagcaccaccaaccgtgttattatgttgatagcagtgacatttgagagtattggggaacggttggatcgggtgtgtagtttcgtgtatccagcagtggctgttctgataacgcctcaggttattgacaacagttaaacgattatagtacaaacttgcattcttcttgttattattcaatatttcatatacattcatcaaacctcttttcaactccattttttcaaatctgtatttaatttactacacttaatttgattactgaactaaacagaaactgaatttgagtgctgaaattacgaaaagctgaatttgagagaaaaaagaactgaatttgacaaaatactaaagaaaactgaatttggagtgcgaaaaacttaaatagtttactgaactagaaagaaactgcataaagaaagggttgaaacttcattaaatattacagattattatacacggggatttcactacattaacaatgatttgaacaagtaatatccatgagactcaattaaagagataaatacacaaccaattattctaaacccgaaatcaaaccaaaactaaaccgagtcagccagcagtaagctcaaaccagatcaatcaccgctgagatttacgggcaaagttaaaattagcaataaatcagtgttaacagacgaatttaaagaataattggcaaaaaaatggtatgggcaatgataaaattgccagaaaagtcaacggtatagtagcattattagtaaagaaaaagtgtgaaaatgattaaaaagttattatttgcaagaaaagactatgtaaaaaatattgaaataaaaaattgtaataaaaacatattaaaaatattttacacaatttgaaaatacatacatctcatagtcgtagcccccagattctttgcattataattacgtgaatttgcgaattagaaagggcataaaaatcacacactcacattaataatacgaattagccggatttatattaaattaccataaaataatatagttggcgtcttaaaagtgtgtaaaactgcctacacatattatcatgcaacttaacacatccggcgaattccatccaatattttacacacacaattcttccgctcgactctcatccaactttgatattgatttaaataattattttacaagattctgttcatttttaaggtaaaattccttgatctactaactatataaacacttattagattccatgttgcattaactgcatgcaaattatttcttcacagatttaagctttttaaattattttattcatgattaacgtaaattattaacatgctagtcggagattaccctcaaattttccattgctggtgggcagcataacgaattactattcttattcacttaatgtgtaaaatattaattagacaattataatacacacggtaaatttaatatattaatttatcatattcctcaatatattatacatttactccagttacttccaattccatatataatgtcttaaatttgtttaattactttttttattttatttcaacagttgattacaaaaaattgtgtattttattataaaaaaccagaaattttgtaaactaaagttatcagctgttggagtggaaaaggttctgcaattgtccgttggtgtgtaattcactgacgatatcgcagcccccaacgagttttccattgacataaagttgagggaaagttggccaattactaatgttttttacacattttctcaataattcatgtgaaaacacatttatatacgcgtaatcattcaacttataattattcaagatttctatcaactacaacatcattaatatggtattagttatgtggattaaatagttatcgggagttaacacattttctaaggacttatataataagattagtacacaataaaactaaatatagaagtaggtaaaagtatagtaaaaatgagtagagtagtactttggcggaatatttgcattgaggatcttcaggggttcctttaatgaaaatgaggatcttttcagtttcaatggttttcttgagtttttcttcaatctcctaacaataaataaattaaacaaaattttattaccttttccaaatttacttcagtttcagttgaaaagaatcttttactccttaaactccctaaacaccagattatagaatactataacatagtgtattaaatatacaccattattataccttgatgtatataattgtgtatagtataagagttagaaattgaagtataagatggaattttaaaatttgataaaaacctcaaaaatcgaaaattcgttctaattaacctcataattatttacttatactcatgattatgtaattataataatttacaatttaattattctaatttatggttcaaagtaatagcaatattgggaatccaacaacacaattctaaccttaaatggcgtcaaatttattttaaataattaaattaattttaaacttaaatattattaataatttaaaattttattccaataatttgactaatatgcagtcaaccaaattctgcaactaatattcctcaattatatctaaattaactgggattccattatctaatttaaaactataaaataatattttcaaaatgaaccaggctatggaagcatctgataatatgttggaggattccacatatgtttcaccaattgctaggcccaaattggctggaaaatcactaatacgttcattgaagcttgtaaaaagagctttggcagttgaaaagcttgcaaaacagcagaaattggagaccaacagttctgaagacctggcacttacaagacttgtaaaacgaggagttttggacgtcacaaagtcacttcgtaagggtttaactggaattgtattactcgcttctgatgttcatcctgtggatgtagtctcacatgtgccagtcctatgtgaggagctatcaatttcctatgcttacgttgcaagtaaaagagtgttatctgatgtttgtcactctaaaaggccaacatgtgcagtattagttgttaaacctttaaaagatttctcaaacaggcttaaaaagttaccagaatatgataataaacttgattataccgaactgtaccataaagtcgattctaatatcaggaaacatcatccttatctttaatctcgtacattaacatattcactattattctagtattagtatataatagtatattattactttagtagtttaactgagtaagataacgccattcaaataacaccttttaaatgctaaatagttaactattaaaggattatggctacaataatagtaaatactagtaaattaggagtagaatacaaaaatttataaattaatgtgataagtaatttgaactataaaaaatgttaaaaatttaaaaattcaataatattcaaaaattaatcagccaattaatcgaaaattatatataaatgcatataaaataactatcagctgaaagaacagctgaaaaattgctactgggtaggaaaatagctgcataaatatatggctacttgcaatctgctgctgtttgtagattacttaaatatttcactaaatatcttataaaataattttaaaaagcttcagttgcgataaatttaaataaattgttattttagtttaaaatggaggttttagcaaggcacgaaagtaaatcccattctgaatcctcagtttggaaatctgtgttttcttgctttctttggttttgtctgggcattttagccgctttcggacttaaaattcacgacaaagctgcgaaagtttttatgttaatttttaagctcaatcccgctgacaccatatctttcggctttaattttgagataatatcagttgccttgtacttttcgggacttttattagcatatatcttctttcctgtgagtttaatttggctagaaatattactataccttactctttttatgtttttgggtatgattataccctcccatatgctggttaagaattcaactgccctttctcgtgacgggataaaatattttttttacatcacaaatgcaggtgctagtttaggtattggagctattacgatgatcggaatggctttaatcaccgaccgttttgttcctgggaaaacaccaatgaagttgatgttccaccttttaggatacccattgggtgaaattgcagccattttttcagaatttttgggcagattcacagtttatgatgagcttatggccggccttggggctaatttggccaagtttctgacttacaaaatgtcaattattctcgtattagttttgatgaccagtataatgattatatttttcaccaaattcaatgacagtgatcacaggatttggatgaagttcaatgctattaataaatccaggatacttttcaggggtctacgtcgactctcaggacaaattaaatgcatcattgtgttattaatttctagttctctttctggaattttctcagtagtttcacgtaagttcataatagttaatgtcccccaaggggaaccgcatttacacaatttacttggttttaactatatagtaccaagtatataataccaagtatataataccaaatgtatagtgttaataattgtgtagtactttatttgatgagtatatatactgctggagatgatgttttattgggtcgtgccaagttgttgttatttaaatgtgctttcgactttcttggcaggttggtttcaggtttagttggcctttgtgtggaaagagcgaggacttcgacgcgtgaaaaccaagaaaatcaatcagtggctaagaaagttatttgttgtatattttcaccaatgttgttagtttttatacttgtcattgttgaggttgtcataattatgatcactgcttccaaggcatctaacgatagtaatgccttgagtagcccttggttaagtcataaaactgggatatttgtttcttcatttgttggtctggtagccggtttgacagcctcacttgtattctctcgtggttcaaatgtcaatgtaaacaagggtttaattgacgatgacgttttaatggttgatgatgtaaatttggttagaagttttgtccttggggtgtttctactctttgactgtattacaatcatcttgatcaaaattttaaaattatacattgaaggtgtcgttcaaaatcaacaggctagggcaggacaacctcctacattagttccataattttaattaactcttatatttatgtatgatacatagtatatagtatatcacacacgtatatagagtgtatagtatattaattgaataatttgctgttgacttcagcggcttcatcaaacttttccttgaagagtttggcttgttcgacgtttgggaacttgagtgcaagttgttctactttagtttcatcttcgagagtgttttgtgctgtccagacccaaatcttatcacttccaacgttaggtgtgagtttacacatgttattagtctgccacacatagtgatttgctacaactttaaaagtcttttcctgccttagcaagaacctaatcttgcctgtctccttgtgacgtagtagcttcgattcacctagtccacgttccttccatactccagaaccgtcagtatcagttgcccaacggtacaacttcgatctctgactccaaaacacatcctcattctcctcacctgtctccacctttatctcctttacttctacctacgtcattattataaccggataagggtattaaatattactgttagggcattatcatactaatagcatctagtagagtactaattatactaatggtatccctgatagggtattattatagtaataactaagtagtaattgtgtaaacgaatactttgggtgctttccaatcaccttcgacaacttcctcttcttcaacgtattctggttctttcgaacttgtctcaggttgtaatgccttctccattccactcttcatactctcaaccacactctctaccgtactcttcaaactctccaacttatccactttattctcaactttcacactattagtatcaactgtagtagtagtattgttagtggtagtaagagtagaatcagttttaacgccactgtcaactgtagtactagtactagtttcgaggagttcattaacgttatgcttcatcttcccgaaaaaatcctgagctccgtcggagacgaagttgagtgtatccatcaccttctcaggcattttatcgaatgattcggtgactgagtctgcgactttacgtgcgctttgtgagacgtcgaaggtgaaattttccgaaaaattcttagtcttgtcagacacgagtgtaaacgtctcttttaccttctctgctaaattttcagtggctttatccgacttttccagcgcgctcttgaatgtgtcgaccatatctttcttcaccttctctgccgttccagtcactgaacttactactgaatccaacgtctctgccatttttataaaactcgctaattcttaataataatgttataattactaattaattctatctcaacccccacacatcagccactaatcatcctatccaatttttcgtccaatattcaatggatttcagcaaaccattaagttattattaaggaaattattatataatcagtaactgtgccaataatatgaattatgttaatgtatacaatttttatagaacattatttaaccaaatacttggttaaaatattggaattgatcaacaccagtcaaatattatcaaaaaaataaattattggtgaaagaagtcaaaattcgtaaaaaagtgaaaagttttaaaagggtgtaaagatattacttgaacgaggatttgagcgtttcagcgactttttcataggcggttttcgtttgttctctgacttgttcgtaagattgtgagaagtaatttttgagttggaaagtgacgtcgtcgactttcttcttcgtttgttcaaccaagttttcttcttcctttttgccgctgagcgtgtctgtcattttcttctctaccttctctgccgcgttattcatcgaattcactacagagaccatggtcttacttattctcactgattatttcaaataataattgttatgtgtatttcactaccccatacaatacaacaacataaccatgctacaaatataaccacggtactatatgaaatatgtaatagatgtgcatatgacgtgtgtatgagattaaaaattaaaagggattaaagtccactataccaccagaatcttaccactcatccctaacgacacacatcatagacttaatattcaacactggtactcatagcatagcatgtgttagaggggagttcgaacctagtagcactgggtattagattactgatatggtatagaatcatctagagaattatagggcctcccttgacttatcccttgaggacctctcagatgactccgatggagaatcatcggatttcttgtccctggattgtgagtactgctccttggtccggtctgtctcatcccttgaggtgaatgtgtcgcgtacacgctggctcactttctccgatgattcaacatctttcttgaccgagtctgatagttgtgtcattttgcaagtaggttaacagggggaataccgaattgacaaatttaatactaggttagaactgaaaatagagttaaaagaagtcgtagagaaaaggaagagtgagttatgtgtgtacccaacatgagagaatagaaaccttacatttgtgtgtatggtatacttcttgacgttgtgtccaattccccaatcttccctttacgcctttattaccatacgtgacactatatattccctacgtatttaaataattatattatttaatactacattcatcgaaattccccttaatttagctgaaaaattaaagaagtgtatatatttgtcacctaacccccccttatataaagacaaggaataatgtcagattctttccttcttggcctattcatgtcactccaccagttttgttgtccttttacaccttttttacgatgacgaattttcaggagttaattccgtgtattttttgaaaaatttaaaatttcacatccacacaccttgtcaacttatctttttctcacttttttctgattattttgattcatattgtttatttttattacggttacttgtttttagagctagtttaccacaaattcgccgtaaatcaaatttataaacaccacaccaattttttacttgagtttatcacgttatttacgtacacattttttattactcccgtcacatttatttattttattattttccacactattaatccaattaatagtactatttatcattttaagtaatattagtaacatgttatgggaaggttccatagatatatatgccattattttactattaaccaccagatatgctcctaatagtactaaaaataaatacgaagaaaagaatagtgtgataaaaatataataaatactaataaaccaaataatgaccaaataacgtgattaataataatataccaagtaataatagtgataaaaaattagaagactctgtttctgatgttctttaacttcttgacaacctctgcaacttttagatttaattgattcgcgacattgaacttttcatctcccagagccgtgaacatttcgcataaatctccgtcgacgatattttgtactgggaaataataacttctgaacatctgcacttctcttcctgttactgtgtcaatttggttacacagtaacatttccagatgctgcaaaaagtccagctcatccttactaacaaatggtatcagcactccaattgagcccatcagcgtggtgtacaataccacttctgagtgtatgggattaatcctaactctctgcaatgacgtcactatatcccctaggtgaaactggttatgatactcaaagtaattactccttacaacatcctcattgtgtggtactctagacacaaacaatgagtcaaatttatccccggcaatcacggtgctataatccagtaactccattgttgacagccatctcgggcctgtgcttgtggttgttaactcaaactctcccaaatcttcaccgtaaaactttaacctcagtaactgcacactttctctaatatcaccacagtatatcctacttcctaccactttaatatccataaatccgttactcgttaaacttctgtgttctccctttagtaacatttgcttccttcccagggcgtacattctcagtttactcccaattgcgcagagcaataacttattttcatagttattaaagcaccgtatccagcccttggtgtttgttacatggagcagcttaattgagaatcctgtgttacccagatttgcatagttggaatcatactcatacacacggatactgctttccacttcatcgttcccatcatctacaaaatgtgttcacactatcagttatttttatactattggttatttttatactattggttatttttatactattggttatttttatactattagttatttttatactattagttatttttatactattagttatttttatactattagttacagttagagttattttttactaaatagtgtaaaaaattgcaacttactgtatcactaaataactaagcatatcactaaataaaaaagtatacaagtatatagggatgatatataactattgcaccactgtaaaactatactatataatcaaactatgtataacataccgttattggatgggtatagatgtgcatttttgatggttcctaccactagcaattgttggccatttaatacacaactatatgctgcagtcgctgcttcattttctgtaaacaacaactttgctatagtttccatgttaactgggtttatgattcttatacatgaactccacttgcctggacccgctctgtaatttttcaattccataggttcaaaatgatctccttccaattgtattgacgtcatttccttgttaatctcttccacttgttctgtgttatatgaattgtaatctgactccactaccaacagtaacacattcaattgacctggcactggaccctgtggtactgccggattaactcctgtattaagggcaccctgggttaatgtgctagagggtagtaaaattaattttctcggtgtatattccaatgggattgtaatttcactgaaaacatcaccgttaactaggcaacggaatatcttcaaactatttcccaatatgctcacaaacccattcaaacacagtaaactattgaacgtatcaatgctatccactgacaacatcgcgttactgggtgacaatgtgacggttgcattagtggaattgatgtagaccgggagtatttcgaggttcccattcccactagttggataatttggcaccacaataaatgtcttcacagtcaacagtagcagacattgacggtccagatattggactaatttaagtcttaacggtttagcgcctagaaatcttgattcctgatcacttaaattcccagccacatcaactgtattacgtatcaacacaccgttattcagtccaacgtataaatataattcatcaacacctacacaatagatagtggtttaagtgggattggggtatgaataataccatatcaactatatacctaactatatacttaataatgtattaactatatattatcaatttattaaatatgactatggtattacttgtggtaagcaatgctactgattctggtaatgaattattccctaggatttgtgatgaacataactttaatgtcttgtccaacttcataactcttacaatattatcaatactaccgcaacaacagaactcagctttgtttcctgagacttgatgttgtactgctaaacacgtcacttctgtagataagtttcttctgcccacttctaccaactctaacacatcagcttctgtgagttggaaatatattacttcaccccctgttagcactaataccaattgtgtattattattatctgctaatttgactcttttcgttgtttgaactttccactccttaactacgtcacctgttaaatatctaaatcctccatcatgcacctgcacaaatattccaccacccacactgccactggtggagcccatgtggcaagagtgcagagttgtaattgaagtgagaaagaatgaatcagtgacttcttcaacagcctctccaattgataatacgagcgtattgccttgaaatgatatgataatatattcatcgtagttggactcaagtgacttaattgtaaaaacggctttcggtctacctggtaactcattaaatgctaactcttcagtattaaaaccatatcttaaacatttaagtcgtgaatcgtaccagcgcccacatgctacaaatatatcatagttgtttaatcccagcacatctaccactttcatatccactgccagtgccattgaattcattctatctacgacggctaaattctgtaatttcctgggcttaaaagctataattgcatttttagcgtctgggtgtaaacttgtgcagataacatccttatcgccattttctagtgctgtgaactgatatagtttatggtcacctgattctgaccctacaaataagtaccctgaccttaatatacacatcgtgctagccacatccaccgtatcaaagtacctcaccactatttcactcacagtagtatcatcgtgggataattctatcttatacaaatctccgtactctgataacagtagtatgaagaaaaaatccttcattctatgcactgaatagttaatgatcaataggctatcggtttcagccatttgcaaacgtcttgggtatgaacagaaaacatcagggtgttctaaatttttatacacaagataattttcacagcaaactaacacacctcctggtcctcctggcactggtaccaacaaatgtgctgataaatccactggcaatgttactttctttactacatggttcagtcctaaatccatttcccaaaacgacaatcctttacgcaataaatctgtttccatttcctttgtcaactttgtttgtatatccatctgtactgtgtcgatggcttcataagattgttctagtgatgcgaagatcggattatcataacccacttctagagctaccagatcaaaacacactgaatggcttttatgtgcttctagtggtgaactgattgtaagatttgcttttgaatctctgtttagtatgtatacaaatttctggcgttctactgcgcctatcattaacgctcttccctttggatctactgctaaatactgtcctggtactattcttctcactcctaaatacataatcaacagagatatccaatatctaagataagggcttatatactaatgactacagatcatatacatatatatcaaggggtaatacctgttttcccatacgtttcacaatgtaatcttttaaatgagtttgtctgtgttgagtactcgagaattactattctaccgctgtcagatgtgactaccaaataatctctctgtgctcctgtaagtctaaacgctgcgagggctcttacaattccaaaggcttcaacactcacaagttgctgcaatttcccagaagcgtttaaaccataaagttcaagcacgtgagctcgagcaactacaaattcctgtgccttcggagctgaaaaactccccggaacactcgcagtcacacccgtaggcttcttcaaagtcaaattatacaatactggcattttaacactttataaactatattatattatttattgggtgactatttgggatgaatacaatattgcgatgaggtaatatggtatgtatatgataattccataaccttgatggaatctaacaaatattattgattcaacaaattattaaaaaaaataattaacaacaaagctaaaacatagtaacaaaattttcataaaagatacttttataggcgatttcatttctatgatggggtacgacatccattcttatttctctcacttttttacactttaattaacacataaacgttataaatcagtgttatctcaatgataatattaaaaattgtaagattcatattgtaaaattcaaatgtgtaaactactcataaagaattttataaacattatataaatttggctgatgtttaaattttcggatgaaatttgagaaaataataatcattttctttttctcagtttgtagaattttttcagaatgtaccgaattgtttaacatattaagagaaatcactcttaaacactatggaaatatcgcagacgaacttcaattacaaagtaattccaaccccttattttcccttaatctacaacaattgatccttattttacccctatttatactatattttacacatttatataatattaattatagtattggagactaagattaaggactcgattgtgaaagcgagtgaaatgttaaacttggaaaactttgaatcttccgattgtgagcctgatttctcttcattttgtcctcaaaattgggtatcttaactctaaataattataatagtggtataaatatgtgtagtattatttgggtgacggcgtacactgtaaggcagactctggttataatggtccttgtgacagggtcatggacttttcagataaaacccctctggacaagttacgaatatcaaatgactgctcagttcaatggccttgtaaattaaacaaattaacatttattcccaaaaacatcttacaatgtcccaaattctggtatactcacggtatcactaagatttacaccaattacttagttatacacaaattttctaaaataacactatcactgatgcggatgcagaagaattgtgtgtaccacatgagagttatatgggagtttgtaattcaatatcattagaggatttatcaaaggacagggaaaagttaacattaaaatgtggtttagagtgggacaataacctattaaacactactaatttgtcagattttagtgaaaattgttcattgggttatactgggtctgaatactctggaaacgagttttgtgtcccagatgataaatacaacactaaatttcaaggtaaattatacttcaaagatcttcaagataaattctctaaaacttatcagtacaatttgacatggtataacaattgatatttcccgtcactataactatagtatatataatagtgattaacatgtgtataggaattttaaaactcgtaatgaggaatacttggatgaaaaatgtccatataaatggaaatttgatcctaacacctcactatgtctttcacctcctgactatcaagtaatcttaagctagttagtgtaatttgtagggtccttgtcagattagggttaattttacgaagtttgataggaaattgaagaacatttgggccaacgtttgcttggttgatttttacccaaatgagcagatcgcaccaaaaccaaacgctccaactcagaaattttacaaagatggagctattgagccggagcttaaaattgttaaaaagagccaaattaatgaactcaacactccaattgacgtgttacaacgacaattaaaagaattatacaaacttagaaaattgtcacacgatgataatttcttatcaacacttcaagtaatttgtacagagtttagttacgcatctaaaagtgtagttaagtatatagcattgttatattgatgatttagtatacaattgataaattggagaagaaaataatcggaccaagtttccttcaaatttcatcgaatattgttaaaaataaacacaattgtccatgtaccaagttatctacctattatttaattattcatcgagttaatatcgtgtagataattgggataagtatgagaacatatgcatagcaccaaaaagttatcaattttttgtaccaaattgctttaccatcattagtcgctacaatctcaaatccaactccacatgcagattacaattgtacattacaactatctattaatccagccatttaatatttaattatctatatagttaatagtatttgtatagtgatgagatgatggacgaagattatgtacgagagccttgtcctgagggctggaaaattgagcggaagttggatgggaagattttgcgtactatttgcagggctaaaatgggtgaaattaagcacaatttcactcaatgtggtacaaaagtggattttactaatatttctcctaattttaagaggatttgggccttcacttgtaacgctaagtttccaccaagatcccctgacacacaactcaaatgcaaagaaaactatttcaagtactttttacactaattttactattatttactaagtgttaatatttgaactagttttattgttataaaattagttttgttatttacaatttactccctacattttataaagtgttggtttaggaagtgtccttatggttggaaagaggaagctgaaagttgtatagctccaaatacttataatggcccatgtgacaaattcgtcaagcttagccaaatcgcaactccagaactgaagaaaactttcagtcaaaaatgcttagctttctgggactgcttagataattgtgaaaaagattattctcaagtattttttctaacttccatattaattattatcttactctttagtttagtattaactgtatattaagtatagccctagtaaatagtattattattgtgataggtatgtcctaaggattggaaatgggacaataataaatgcatagcagcttataaatatgattttccttgtaaaaatgagtttaaaccaccaaaagtgtacgtttactatttggaaacatgatttattagttggaatgaactttctaagcaagaatttgaattcacctgtcaagcttactggccttgtaaattataataccaaacacaccatacaatataaatactccaaataaatatatcttgtatactatatatatacatagtatatatatatataatattaaacggagaagaacaatcttcgattttcttttgagaaattgttaaatatgaatgtagaattgagttttgtgagaagtggtactgaaattgcgatatttaataccatcagtttgagtccaaaacttagatccaaatcctttatagcgttaccagtagagtggattaaatcgagaaacacaccaaaatatggtattaatttaaacctaaatgtgattggaattacgaaatcatgccctgctatgaaaaaggcatctttgggcttattgtgtccaagtcctctataatcaccgtttaacatctcatttccatacaaatatttaaataacattttacattttgagcctaaagttacatcaactttactctgcactctataacacaaattaggagtattcaatcctttcccaccctcacttgcaggactatcacttttatacttaattttattcatcaaagtcgtcttgattaggacgggatcttcgaggtaactggtatttaatttgtaattcaggtcatttgttatggttacattgcgggttccaaaagctgttgaaagtacgtatttaaagttacctagaagctttaaaaatcccaaactaagctcgaaatccttaaaatttccctccttttctccaaatttcatcttctctaagctcgctgctgtcacttctcttatctcatctaatttttttacgtccaatttcctatggctcttcaagccaaccctcatattccttaatccaattttatctttaattagggattttagtttctgtttaaatggtcttaaaaagtttaatagagatgtaatatcattcttgctaaacgacaggtttagtgttaaaagtgtcggacttgagcaatggctggtccaaaatgataaatcgacaacatctgaaaacagtgagagcctgaatttgtgattatactccaaaatttttaaaaggttaagttccgctaaaagtttaaacactgattttgtgtcgaaaaagttaatatttctgtaaattaagttcaaaacaggaccaccaggtggcagagataacgttggtgctgttaaatgaattattccatagtcatcaaaaaagaaatccaaatacacttcacctctatctctatgaatcacatattgtaaattctcgtataaacctgtgtgccttatcgattcaaagacgatagggtccagtttaaccatttttttatccttgaaaatctttttaaagaggtaattattgggaatttgtgtgtaattccctgaggggaaagttgttaaactcgatttaattacattttcctctttaatctctattactttattagactctgaatcttttataaataacctaaaattacactctggaattgatttttccacacactcaactactaattttccagactcatcgtattcataactttgtacggagctgttaaaatatcctttttccttataaacatcgttaatgaagtttattattgagtttgtaacgtttttcttctcgttttcgtcttctatttttcttaaaaggctagaatctattcccagttcattcaatttgctctttacaaatttagaaactgaacaattgtttaaaattatcaaatcagactctttccccttagttttaacacctagaaggctatttttttgcaacaaatttgtaattttaggtaaaatggcacacacattagggcttcgatccaaaatcctggaactgacacaaacatttatacatactgcgataaatatgaagtatataaaattattgcgattattatacattttcattgaattattatgtacattttgtttcaaggaattattggcagttctatcaagggttgtggtggaatcttccccaaaatagtcttcagatccctcttaaatgcgaatttaataaatgccttattcatttcctttccttttcccatttccaacagcacatttctcacaagtgttggattttttcttgacaaattaatgaaaactctgcctaacactttgtttaaggattcacatgttctagctgaatgaattttaatcccaaataagagtaattctgagaacaaagctctgtttactacttctttcgacacaatttccatgaaatccacaattctataatagcacttatacctcaacgttgaattcttctcctctggtactcctactacattctcatcctttagtactatttcttccaacatctcaaatatcatcatcaatctacaattaattggtgaatttaaagtataattttgtgtaaactattgtataaatagactaaattgtgaataattaaagataacataacacttttgaagactaatttacatcaaattatatctaatttaaagtgcaaaatacctgttttctatgaactgaaatgagttgattgcaattaatttaaatatttccaggagaattgtgactattctgaaccttttcaggcctaattctagggaatttgtgagacagtcccagatttcatgaactctaattctgaatatatattcacttttagagcacaaaatgagcgagcgataaagagccaaaagtgccaaatactccaaattactattattaacacttgtgtaatatctacacctcgttattattaacgttgatatcgtaagtatataatcaccttttcccgtctcgtcaaattcctttactttatcctcaccatcacagatctccttgtgatttaaattattattaatataaattaaaatgtagttaaagctgtaaaatatcctcaataatctgttggaaatattcgactctgtcaacgcagttatttcatcgaaatacttgcagaactgtaccgtgagatcaaaaattaccttcaaatcaattgaattattactgaaactagtcaatgtatacaccaaatctgggattatttccgtgtcaatattatacactatcttcttcactaaactattactataatattctaacatagtagagaagtccgacttgtccgttatttcagattttttgacataatttccaaaataattgttcagttcactcagtaacaatgctgaagattgcgacaacttaatgtaatctgagttatactccgggataatattaaacaataaattctctatatcataatgtgttaaatgttcttcattacaattcttcaacagcgttgttaataaatcaatcactctaattttatacattaccactacattttcaataaagttttcaacagaattgaacatattattgagttttaacgtggatttcaggttcaaaataacgtcagatgttacactttcaccaacttttgactcaaacaatacagatgtcaattcatttaaaagcgttaaagttctaagtttaatttcacagttatcaaccttttcatacagtgatatcagatttgaaatagaatctagcttaacctctgtagttaatttactaaagtacaacattgaaattgtgtttttctctgtaggtttaaggctaatttcgtcagaaaatgtatcatttgtgtcaactaaatacttcttattcactagtcgagtttctaaaacttcgctaaaatcaacttttaaactatttaataaaaatttcaacacgaaataattatccaatttccacgaaatcaagtcactgattatcaaaaatgaattgaacgttttgactgaattctcatcattttcgttaattgattttgttacaacatctcttaaaattagtttaaaagacactggagcagtttctaaactcttgcaaatttgagacttaatatcctcatttgtgatagagtccaaaattacacctgccaaggtatatttaagattatcatctaaaaactcgtattctataagatcagtacagaacaaacacactctattattatgtttattcctaaacctctttattatgtaacttattgattctaccgttttttcgagcaaatcatcatcctctttattatttattatataacttaagtcgttcaagttactagaatagttttggtttctactattcaaaaagtatttaaaccaaactgttaaacaatcaactgatttagaaaacagtgttctgttcaaactcgatactttgtttacaattcttgaaacaagcccagggtaaacctcaaacacgtttaaattacatggtataaactccaaagattccaaaatctcttgtataaactcatctgagtctgtgttcctaaaaatttccaaaataatatacaaaattttattcaattccttctcattttcgagtgaactgaatacatttaacaaaagcggtaaaaaatcactaaatatatccgaatttttactcaaagtttcagaatttatttgactagtatcatttgtacacagaacttccgaccatactttaaccagcgaaagtgatagaatgtcagatttatactcaaatttataatactttaatatgtttgtcagttttaaaaatattttaatgtacagatgggaaaattcggggtttaaatctcttattttcaagagccttgttgaaaacaggaataaaactctgcttaaattatccaaaaattggttaaaatcctctttaagctcattttttatcaaattacatccaaactcatctgagttagtgttaaatttatcaaaattgggactagaatttggaatgtttaatgattctaaagctgaatggagcaatttaagagaatttaattcatcttcaggtccattcaaatagaaaactgaggaaactgctctattcagagagcattgaacctcatatatatttaacattaaatgatatatttatcattgattgaactccccacccagaatcaaatttctatgtgtttaataaataattatgaataaaatttaaaatatattatttggattttaaaagcgctaaagctctttctctttcggaagattctctggataatctttcactacgtaattcctccttagttttacgctgtttatttttagattctctccctaactgggaatactcagtgtaagaaacctcattaaaatcattagaatccggaggtttcggcttcatataccaaggtgtttgttgttttttaaaatctggtgtgacttttgcattctcttcgtctacgtaaacgttaacctttctcggccccttaaaatcagagttataaatgtaatgaccacttttaattaagtgttctcttctcctaatactcgcctcttcagcttctctttcctccttttcgaaaaaattaatgtgccccgtttttttcttcccatcttccttctttatatcttcatttaattcagggaataaatcacttttttcacttttaaattcatctcctttatctttatgtttatttttatctctttttaaccttttaaccttaaacccacttctatcctcaactttaagctcagtttctacatcaacatctctgttttgagtatcctgtgcccttctccttaattctaccaaggaatcacttaacctttccctctttaatttctctttatcgttgagctttttttctatatcccgatgttcgtcgaatttgacctggtactgccggtcgtgcctgtaaacattccactttttctgtggaagtatgttcaagccaccgtgtccacccattttttaaaattataaaatttccggcctcatgtttaacaaatttctcgaactaactttatatatttggctcatcagtagggggttatctgatctgactcaaattcacaatttatattgtatttgaatagtttaatgctataaaattgatatatacatgaggtgaaaatttttatttaatttaagatgaaagagatcgcagaggaaactagagatttgactggccgtcgcatttacgtggacggcgttttcgatttaatacattggggccatcttaatgccctaagacaatcctacgaactcggcggacaacttgtgattggggttatatcagatgatgacacgcagagggccaaggggatccccccgatttatactgaccaggagagggctgaaatagtccaggcctgcaagtgggtgaacgacgttatggttggcgttccctacgacgtctctttggactttttgctgaacactgcaaagtgtgattttgtggcccacggagacgatatcgcaatcggcacaagcggaattgattcctatatggaaccaaaaaacgccggactaatgatacattttaaacgatcctacggtatttcattcagtttactcatgtttatatataaattatatactatactagataataaatctatgtatattacattagtatatgtagtatatagtaaacataaatctaataatgtgatcaggagtgagtacatcatcgacattgtctagattaattgaatcgctggagtatgaaagatttttacatttaactaacgggaatcacaggtcaattccttcagattttgagagtgaccttttaaagaacgagaacgacttattgaacgagggcttaactgaggctgaaacgataagatcttatgagtaccacgtttcatacccgaggtgcagattaaacttgaatctgctttcaaagtttataccaaacaaagaaaggccaaaagatgccagagtagtatatgtggatgggagttttgacctctttcacaacggacacgtgagatttctgaagaaagccagagcattgggagattatctgattgtcggaatctacgatgaccagacggtcagaactattaaaggctcaccgtttccattcaccaatatgcttgacaggtgccttgtagtttcagcaatgaagtacactgacgacgtcattctaggcgctccttacaaaattactaaggaatttatcaaggtattttttactcatttaacttgttttagaactacggaattgatattgtggcggttggaaagtatagcgattctaggcttattaatgttgcttcaaaccctttggaagtcgtggaaagcctgggaattctcagatacgtcgattctgggctgaaaaccaccagctcagaaattattaaaagagtttctgacagaatgggccaaattagaagaaatgtgtcggatcgctgtaaaaaagagctaaatcactacaaggattactactgatttttgtgtaaagcaatttcagcttccacccaaattcacttttttggacatataccaacttgaatgtaataaaataatgatataaattgtttttatatatagtatatagttttattgaccacctgaaccctaattatttacagttttttactaaaaatttccccatatacatgagctacttttttgccgacgttctttatttgacccaggcccttaaaatggctatataaagctggtggacatcaggattcttagtatttatatgtttgctttgtatgtatatggtaaatttgtaggatgcgctaagcctcgtgatttgttagtcttgaacattagccccttggctgaccattcttgttttatcaaagaatcatatagattcagggatgcgacatttcacatattttaccctgcctacgcctataaggttcaattacttgtttataatgatctaacactttgggactcggaagaagaacaaagctccggcttttgttacgcaattgtaaattatagatataaacacagaccctttttattttatcatgtgtcaaagacacaaaactactgctctttaaaaggactttcagtcagatgtccagatttggaatatgaacttaaagatccacatgaaagactaaaattggcatatagtcaaagcttaagtgttgcattagatagagcattgacagaaagaaaccaacgttttctagatagtgtaaacgactcaattagggaaagagttgatgctattgaagaaagtgttacaagaactgtaagaaacgatcccacgaggaattttcaatcgcaaccaataagagctcctccacttcgactatcgcatttatcaaatgaaattgtcataagatcctagtcaataaactatcctttcaacctaacctttcagatttggtttttagtcacgaaaattaatttctcaattttgtaatggcttttacccattagtaaatacataatagctataagggtacaattattaatattaaggtatataacataacaaggtaattataattaaagtaaaccagcctagtaggtatatatatatatatcaataagtacttggtcttaactctgaaaatatctgtcgataacatactcaacgaatatacgtttttacataaagagtcactaaaagttttattctcgactatttagaaacaaattcataagttagaatatgagataaaatatggagagggagtaaataatgttgtaaattgatgagaaactttaaggttcaaggatgaaataaagcagagaaattacactacttatattataaatttacaaataaacaactcaattatttggatttattccgttaataatttccccatatatctgttatttttgataatgtatcttatttaacctaggccattaaaatgcctatataaaggtgaaaggaatccaccttaatatagtttgtttattaggttttttcataaatcctggaattgcaggaagtacggattttagcaatttagctgtcctgaaacttgaccccttagaacaaaatccacgttttgttagagaaaaacataaacgcgaaaaagcagttttctatgtatactatcctgtttacacatgtaacgctgaacaagttgtttacaaaaatgaaatattatggtcttgggacagggatagaaatacctacttctgttatgccatagttaactaccatcttaagtgttcatctatgttagttcctaatatcatcaatcttgccctatctgtttccttaaatggtaatccttctaaatgtcctgatttaaatgaaaaacttaatgaaacttatcaaaatctgaggtcttccggcttaatttatcaaggaattgaagaagaacttgaagatcatataaaaaatttatctaaaagaataaggcgtcaccttacctccatgagtaacagagtttcagagaaattaaacaccaattctacgtcaagtagatctagatttattccaccaccaattcctgaacgacctcaatcccatactcatgaacaatcgcaatcaaatgctccagtaacaacaactgcctaagttaataacgaatgaactcgcacataatttattcaacatatttattttaattgggttgttaaaattaatgtaaattttaaactacatatatatgtttatgttaaacatttttacaatgcattttcgtcattccaaacaacaaccataaggtacatacccaagtattaattattattagaatacaaatatgagaatgaaatccctaatactataaatcaaaaaaataattgcaaaataaatgacattttaatacatttaatagaagaaaaaattcataaactttggatatagaataattccactctaccaaattctataataaagatttccctccacaaaagttcggaataagcccattgtttatttatctgaccaaaaacaactaaaagaacttgtaaaattatacgaggatactacggatataccagaagaaatcagttagtattataggatattatacctgaatatttgagagaatttccatcaaaacccaccaaataacattccgcatgagatggactacgtaaaagaattgtcagttataaggattatctcctaattaactctacctgattactgttcagttaagcaaggtaattaaataacaaaggtattctatatcattcccaccgacaattcacttatctgagatctcattacctattgcaatttcagatttaatttccccatatatatcccttggttttttagcgttcctctccaccgtaacagcccattagaattcttatacaaaggtggtgggcatccacctcaatataacttgtatattaattatccttctattttttaatttaggaaggtccatgaaatttaacaatttaggagtcctgaatgttcatcctagagcaaaaaatccacattttattaaagaactccatcattataatgatgtagtcttttttgtatattatcctgtctacacttttaaagtggcgcttgttgtttataacgatcagtttatttgggactgggattcttcaccaggtgaaagtttttgttatattatagttacctatagatataacaacgaaaacttattattcaccaacgttattctcttgtccagttttgataatgatcgtcaaaatgtacttcgatgtcccgatttgaatgacaagcttaaagtgtcttatgatcgtttaaagactggctatgaacgctttcaaggaatattaagaggccagagccctatggactttatttcccaactactaggaattacttcaggaacagatgaccaaacacaaacaccagaagaatcaaatcctgacacagaggtttcaacgccagttgatcaacatacaaccagggttcctgaaacattacaacctgaaacagaggtttcagcttcagaggatcgacactcaacaccatcaaattctgaggaagagttttcatcgattgatgaaaattcatccgaaattcaaagtgtaatatatccttaacacaaatacacaacattacaatgctgtatcaacgccttaaaaataatatactctaaaacatacacataacattaaatgctactactattgttaataagtattacctattcatatatagttctaaactaagatgaatactacatgaaaataaacaatccataaaataaagaatgaatgaactagtatgcgtatgaagaactaagaaaacggtaaaacaaggacaaaaacacatgcatttataatatttctagattgttttcataaataagtcttgtgaattaggtttataaatacttagcaaatcaaaagaaaaccctaagttagcaatgagatagattaagggggacataagaatgatgcagtaaatcgatagtcaactttaaggttctgatcccaaataacggcaacgatttttaattgaatctatgataaaatcatcgtacattcaagtggattttttatcctaatttcagttttatttccccatatataggtttcagtttttgtagtattgctatgtagtataacacgtgttattaaaatgcatatataaaagtggcacgaatccaacgtagtatattttgtatattaattatcctattttttaacttttgtaggtcgacaaaaattgacaatttagaggtactgaatattcatcccacagcagtaaatccaaattttatcaaagaagagcataaatatgaagacgcacttttctatgtatattatcccgtctatacttttcgaatatcaatgattgtttataccaatgaaattatttggaattggaatcagaatgcaaataaaaatttttgttgcataatagttaactaccgttataaaaacacagatgcattattcactaatctcgttcttgtttctaggaatgattatcatggacaaaatgtgtctaaatgcccagaattggaagccgaatttccatcctgttatagtcgtttaaagactgcccatgaacgtattgagagaatgatgcaagaagaacagagacgtttagacgaattttcccaaatactagatagctttttaggaacagatggccaaacaacacaaacagttacagaatggtcccagtcagaaacagaggtttcaacctcagaagaacaacaaacatcagaagtttcaaatcttgacacagaggtttcaacgccagttgatcaacaaacatcagaagtatcaaattctgaggaagagtttccatctattgttggaaattcatccgaaattcaaagtgtaatatatccttaacacaaatacacaacattacaatactatatcaacaccttaaaaataatatactctaaaagatacatgtgttatcaaaatatatattataattattgcggttaggttagtacctggtaaaaaccagaaactgatataaatcaaaagtaaacaagaaatatccttattaagaaatataaagaaaaactcaaaagtatgtgtatgataaaggataaatagaggttgaactcaagcattgaaatgtttcctaaaataatatcaattgaattatactctcaaaaagaacgtcgttattaggtccataatcattaaatcaaaaaaatcataaattagaaaatgaaaaaaaaatataaaaagcataggaataatgagtaaatcaattttaaatctcaaactttttctacagaaataaaggtaaagatttttaattgaatttatgataaaattatcgtacatttaagtggattatatatccttatttcagttttatttccccatatgtaagttcttgttctcggtatgttctttatttgagatactcttacataatgggcacttgaaggtggcaagtatcaaaagttttaaggcgtttgtaaccatttctctcctattttctaacctcgctggctgcagaatctacaacagcccactggttctgaatgtcagtcctgactctgaccattcatattttatcgtagaaaaacataagtatgaggacgcagatttttgggtatactatcctatgtacttttttcctgtagaaacggttgtttatgatgcgcaagtgctttgggaccgggaagaagaccaaaatgctagtttttgctacgcaattttaaattataaatataaacggaacgatgtgttattttcctacgtcgttaaggttactcaatcccatatagattttgataaattcccctgcccaaatctggaaggagaaattgcaaattgttacaaacgtttaaactttattcatcaaaaccatgaaacacttttacagcaaagactcgaagcaggtcagccggtggactcttttacaactgacgatcgactagaggtaatgcgtatctctccatcatcacgaatagaaccagtggttgaaactggcgaaacaactgtttctatagaagagaataatttatcgcatccagtagcaaataatgaacaatcgcaattagaaacggatgaacctacacagttagatgatgagcgtgagacacataatatacacagtcagcttatactgaatggactatatccataaaaagtacgcatagttgtgaaattgacactttaaatgtaatctatttcttaaattacacacatagacataataacaagttgatttacttttaaatatattcaaaatatagcgatttattatattttaagcttattaagatgacagtaaacttgaaggaggattcggaagttctatatttgtaaatttattctttaaaagaaggtaaatatttattttgtaactagtttagaaagacttagtatcgaataatgagaaataatgagaaaattccggaatcaaatcctcgggttacaccataataaataatatcctaatgacaatgcacttgactatatttggaagaacatgtataaattaaatgagagatgttctaaaaatattgaatatttaatatacatgatatttgagataaaaatgggttaaaataagattatttcatgttcctgttaacacctctcaaatcctaattacgaattttaattttgtatacttgtaaaatattctgaattttgtgttttatatattgcttcacctctacacactatgagatgtgtctgttttgttcgtgaggacgtaaatcaaagtttaaaacaactattctttatacacattttaatcttgcacataatatttaatttaaaatgacggaagtccttaaaaattccggttctgatttggtagtatcgcaaaataacgaagaatttgcagacatgcaatcgaagcaaaaaaactgtaatttggttgatttgaaggacgatctcctgattaaaaaactaatgaaacactctagaacagtaggttcatcatttttttcattttctggatctgttgatggttctatgaaatcagatgaaaaatcgccatatccaggtacacagctccaatttaatagatttttagtggttaatgaactgcttgaaaaaccagaaacttatgaccctaggtttaacactgggactaggtctaaactgttgatactaaacgacaaactgcttggttttgaacgccaaatggaaatacagtctaggcagaggaggcagctggaagaatcaaggctattaaatataaatgaatcgttgaataaattacagaatgctattacgctggaatctaaaaggcgaatggagacgattaaagcccttcatggagtgagtttagataaaaatatctttttcagattttcgaaagccaaattaattctgtacaaaacaaggtggaaaacctgtttatgcagaagctagaccagctggatagcgtcattcagtctttgtcagacagaattgacaacatccaaacctacgttaacgagaacgagtctaaattttcaactacaatagagtccaattgcatacttctggaaaaaacactatcaaatcttcaggtacctaatcctattaggtcaaaatatctatttagaaatgttttgaggaggaaaaactctccaggcaagagcgggaggagcaaatattgaagagtctttctgaaattgagctcaaaacagactcctcaataaatgaggagttggaaaagatcaattctgcctatcataacttgaagaatgaactttcagatttgaagaagtttaaacaggaatctgacaagaagctgaaatccaaaattctggatgaattctcgagtataaacaacggattagtgatggaatcgagggccagagaagagtccgacaacgacattgtggaggcactacatagttatgcaaaaattctaaatgactattctaacctcagtccatctcaattcaaagttaactaattttaatctgtaacatattttttgtttttatatacttgaattttatttcatacatttcttttcacaaaatgtaatgaatatctctctcacattactaggctcattaaacgaacacaaaggtttgattcacactgattttagtttaaataatttaggatgtatcaatagtattaaattcgactccactggagtctattgtatgactgctgggaacgacaggacagttcgattatggaatccatctaaaaagttacacataaagaagtttttcggtattttgtaaactttattaaagaactttttattaggccctcacaattacgaggttaacgacgtgtgccttagggaagataacaaaaactttgtatcagttggcgctgaacactctgcctttctctgggacactctggaggccaagatcataaggaagtataaccatgggggtaagaactaaattaaactctatttgcttatcatttcttttagggaagatttgttgttgtaactatgtttggagaaatgaccttcttgtaactggtagtgaggataagatggtaaaggtttgggataacaggtcgaaaaacccagtccagacttttccagacgccaaggatacgatatcatgtgtagatgaacggaattctactatttcggcctcatctatggatggtcatgttcgtcattacgatcttcgtaaaggcgttttgaaggatgatgttttcactcattcagtaatttcgtatgttttattcttaacaatttctcttaggttttcaatgttcactggagtaccagattgttatattttagcctctcttgatgacacgataaaactggttgataacggcactgttctggcatcttacaggggccaaacctacgataattacaaggttaactgtgtttttgacccctttgaaaagtttatcatttccggctgttcttctggcgatattttattctggcccattaataacacttcagaatcctgtgaagtactggtagagtcggctcacaagggtgtcatcaccaccttatcattttcaaatcctgagctactgaactccatgggaaagcttaaaaaagatgtggaaaaaaatgtccgtgaattggttttaagggaggacaacctactagtctctggaggtagggacggtcacctaaaaatttggaatttgtcctataactacctatattctagcataatacatttagatattgaacattaaatgtatagcaaatgtgatgatattatttttgaaacagccaagagaatggatatctggagccggccttggtactactatattcctcatcatctgtgtcggactcttgttctttatcaccggaaagctctgactgataccttagcacgtacttgagaggattccttcttatcttatcctttatgcaaattgcaaacttcaagtcctcatactcaatctaatggataaaatatggtaattataaaaaataccagagtgttaaagaaggaaaagaacccgaaataagaatcgtcaatgacctaaattaataattaacagggtacacatacttctgaagtccagtaaatctcgctggactctgaggttatgagattcctatcaaagtcaaaactcctccacagctttgagtttgagaaatacgggttttcgttgaaatagaacgtaacttcaaaagattcaacaatttcattcgagtcgaaaacctcaaccctgatatcgttcaagtattccagaatgtcataatccttctcagagatccataaacgagttgttttacagcccagaagagcatgtaaccagaattttggccaactcttagtggcatgttcaggattatcgacattgatgattttatcgggggggctggattttgtaaagatgatatcaaactcgcccgtgggctccctcgactttaatcttggaccattatcacaaatatctggcggattctcattatttatgctagttttattagatgatttaggattatttaaaatgtgtaacatatcatcggaaattaggtttaattggtcgttataccacttatataactcagacaatttagagttaaattcctcagataaatcagagcctttcagctggagtttcttcaaactatctatcactactggatcttgcattttgcaaactaattattttacattctggccttatctagccacacagtacacattccgttcatgatggagcctaagtatacatttgcttcaaaatttcagcatatttaaaaattttaaacaaattaacaaatacaaataaattttttagataaataaaaatgagaaaaagctaacctccagagagaataagccctacatctgggttagggtgtacatcgacggaggagattttatggttatttgtcccaggtttcgactgatatgacaaattatccacaatattaccagaacagatgtctaaaataaaagctttcgcagaatttccggtatttaggcttggaatcaccaaattgttgccatactgacagattctcctccaattcatgaacaggatctgatcctcactcataaagtcgagattaacgtcatttacataattttcatacataattttcctgagattcttacacacaaagctttcctcgtcacattcgtactcgaatgtgctgagaacgcttgtatcacccacagcagccatctttgatgttttgtcgtccacaatcaggtcccaaacgcccatttcaccacagcctccgtcaatagtctggagtggaacgagagaattggagtcccagaccctgatattctcgttgaacccgcaagttataatccttcctgggatattcaggctcattgaggatagaggagctacatgtgcccagagtgacaccaggggcttattccaggccttaaattccgctgaattttcttgggagctatatttattattgctagacattagcctgaggtcccagagcctcaggaagccgtctccacctccggtgtatatcataaaatcgtattccggagagggataaacacaaaatgtgcctcctatatatgtatcatgaattgttagcagattgttgtccttatttaagtgctttccaaccatgtttatggcgcttattgttacaaaaccgtctgatgaggacacgtatacgcatcttcctgaattactgaaggagaagtcgcataaatgtggcaaattcatgtcattttccatgaaaatattctccaagtatttgtggtttgagcttttctgtgctttcaggtccatcaaccttatatatccggaggaatctacagcgacagccagggaatcactcctttgaggcgagaatcggaccctggtcacacaactattcacatctcccttaaagctataatatggaaacataatatatactagtacacattttaaaaatattaactgatgtcagattactgtacactactttgttctccaccacagtccgttagtgatctgaaataaaaagttttttaggcaaaaaaatttataaatttctcttataaatactaggaacttactttgacaataaatttacatacttaagctcaaccttgttcagttcacgttttgacagttcttccaaggagtccttgatcagattatatttatctatattttggacaaaacagcacctaaacagcttgtatatcagcatacacacttatgtatcaagtaaaatacaaaatatgtctttagagtgataccaggcaacttgagtgatgacttgagttggtgattccttcatgatagggatatatttcctcaaaagatgatccacagtatctgaacaaatgaaaatattgaagaataccttctttgttaaaattagttctctttatggcttcaaatatttgagcgtgggacatgggatcaatgtaatcgtactcctggaccctgttgaagcactcattcatgaagtcagaatcgttatattttagctttgatagactccacataacatttgctaacgccatttatattaaaaaacatcttaccaagctcgcgtacccttattgagggtaaatgtttccttaaattctcaacaagttctatatatacataaagttattaaaattccaaacctcttataactgagtggcttctaatgtttagtctcgccattgagttcaggcaattggctaggttttcatacttcatcaggtgtgagaactcagaaatgtagtcaaaaattaatgagaaagcagagtggtccctcacgttaaatatcgataaaacgtacaacaccagtggtatcaggtgaggctcgaaattctccttatttatatgcttaacaagtcccaataactttggaaacagcacctcatcgaaaatgttcaatttggcaaatgaatatagaattaaaacagaatttgtggcagaaatttctgttataattctatcagttaagcacattttagatacattgttcatgatgctcttaaccaggttagaatccacaggaatctttcggttcttgagcaaaaccatagtttgagagattgttgccaagtctatactattagcttcatctattctttcaagagcaattggtaaaactttattataaaaactcgtttccttcattcccatcttgcatacgcctgaaacaaactatataattaagtgaaatactgttaattaatggatataaaaagtaaactggcatcatatacgatctttttaatgtaaaattcgaaattgtactggaccaatcagggttcttctggtcaggaaacatcccagttatgttataggctattgttctcacttccgcaaccgtgaactgatttatccccctaagaaaggaatcaaccgattttttacatctttcgtaatccaaactcttattttcagagtgtaaccttgaacatttctctgcacatacatgtaagatagagttagggattaataatatctaatctaacctataaatttagcgatatctgctggagtttcaagttttttgtcagcattcacactaccttgccgtactatacaaccgatatttctgcgataaatgaggaaaattgatggaatccggaaagaaaacatatccggaaattcctatcaaaaaatacattttaaatttatattaaagagaaacataacaatgaatatggtatgtttaatatttttaaactattttttcagtattttgactccaactattggaacgcatactatgacgggtaagaatggttcagaattaaatgttaccaacaattttagagatgatgaaaatatcgaatggtatgactcatggactgaaatatctaagaacattcctttgaaaataaatcctgattctaaagttctacacattggttgtggttcatcaagttctaccttttacttacacattatttactttagccctcggaatcgatttatttaattctgggattgaatccgttatcaatgccgatttttctgaatcctgtatcaatttgatgagggcaaaatatcctcatctcacctgtaaaattctctaatcacattcctgttcagatattcttcttgatgctcttgatattggaaaaaatttttctgaaaatttctttgacctcattatagacaaagggtgtttggattccattctggtaattattctttatttacatctcgtttagtgccatgaaaattaccgggaaaaggttcaaaaagttttagaaaacttctacacttgtttaaagtttattttctatctattatcatctaaatctacaaaatatatgaaaacttttaacaaattcatatatattatgtatgtaatggaattttagagatgaaggatatttaatagtaatttctggagggaattcagaggagagactcatgtactttaacgtatgtgtgttctaaaatcaatttatttagactgagttgtggaaggttgaggttgtaaagatgaggaagcagggcgtggatttgttacggaattttgaaaatgaggaaggtgttgaggaaattccagatataaactatttttacacatacatatgtttgaaaagatcttcggattagattaatagcatgcgtgaatcagttatgtgttaataacaccaatggttcatgaaaatttttaataaaaattacatgttaatattttaaaatggtatcttatttaccaggtagggaaaacttctgtaatgggcaatcacacacaccttgccatagaattgttcaaaatgatgaggaaggttccgagatagagtttgagggttggattcaacttggtaatccagttcgggagagaaaccggggttgtattggaagttgtcaaagatcatgttcgatgaattctccaaacttacatttttcacataatgataataactgttggtccaataatgatgcaattaatgttttgtgggaacacactcccaaaagcggctgtaatcactcatgttctcacaatttaaacccttgtaatcctgttagaagggtagttaggtgttccgagtgttatggaaaatttaacggatttgacaaacagcttagaaatgaaaatgagatatattatgtgaacaacaggcagaatgctccctctgttctcgttcagaaaccacagactgttgttgttaggaataaatccaggcctcctattgtcgttcaacagcctcctcccaatgttattgtgaaaaatgatcctcctcagcccatttatgttcagaaccctcctcctaacatcactgttaagaactctgaacccacaccttacagaaattatccttttcagaacgccagaattgagaggggaatacatgaagaaccttatattaggcaatcgacctgcggtatgaatagaggcaatcaaaacgctacgttttctcacaagaggaaccactgcatatatcactgcaagcatccttgttgtgcaaattataatatgtaatttgagatttaaattcatgttaaatagtacaaatcatgttttatcagtcccatcgatattgcgtgagcatagaacagggtcactgagccaatggtgtacagcaaatgtgagagttcgataaattcaaaaactccaggaattaaattaggttttcctgaagagtagaccaacccagcacagacagctacgatgtaagtgagtaagaagagtgatgctggtacatacatattgttctttagataactatacagaagaaagttggtacaagtcgtaccaacccagaatacaactactctaaaccttctactggtttcaataaagtccatgaacagggatacgaaagcacctagaataaattttaaaatagggaatcttaccagcgaagtttagtaacgtgtgaaacatcgataatataacatgtgtatcattctctatgaagtaaacaaatgagggtaggaaattagtaacaatttgcacgaaaatacctaaatttattgatgaaataacaattacatacttgcatagtcgattctagcatacaatgacctatctataactttacatgaacttccgtggtaaacaacacaaatcaaggtacaaaggtagaaagaaataaaataagttgaaaaagttagtttggttaatttatcggttttattttggaatactgtgtatgcgagtaacggctgcaacaagaaattgacactgtacactcttcctctaagtattggtgcgtccttccttttattatacagaaattctaagttaatctttagcatttatcttaccaaaattctaattttcgaatctacaaacaaaaactcattttaagaaattgcaatttgattatgttcaacattctcggtttaaattgagatgctatacactcaaatgatttttccattaaatattattaaattaaaaaaacaatctaaaataacatatttctttctctacaatatacacccttgtcgtgtcgttaccacttatgataaatattaaatttctaccaacacatataattaaaatatacaacaactgattagattaaatttgaaaactcactagttcttgaaatcaaggccatatgggatgtattttagactgcagaaacttgttgaacagttgagcaccaccccttttgaacagcaagaagttcgaaatggatatggttataaaccctaatatacaaaacacgtgaaacaactcgtgaaattcgaatacacccgggactaggttcggaaacttcgaaccgtaaacaactgctcccatcatgtagaagactccccccaacacaaacaagaggaaaacttgggtgctcttcagtgtgaacagaatcttatatgatacaaagtaatatggtactgctgccaatacgtatacgatagatctaacgggctttgaggtatagcagaagttgaaaatcaatgatgaaaagactcctaaaaattttacttaaattaaaaaatacctgcgaaaaggagtatatagtggcagactgctagaactactgtgaagtcgtcgttcataaacacagcatacactggcaatccgcttccaccaatcatcagaaatattcctaaatcattaaattataacaccacttacctgcatagtcgattttccttaatattgagtatagttcttggtcccacattctgctgtggagtacgatgcttgagaggtaattgaaggctgcacatgccaagaatatgaaaaaggatagtttatccaaaactatatcatacttgatgaacaagtatgatacgaaggggaacactaggaaaaagaccatgtttatcttaccacggaggagcggaaccttttcctttcgtttagtcacgtggaccttgtcaattatatcttcgcgttttgacatttttaattatttatatgtgtttatatgatcaaataagaatcaccctttaattaacattttaagtgaaaattttataatttgcaccgcaaatttatatataatacaaaagaaattatgggtataatactttgaaaacaacttaaattattagaatgaaaatttactaaatttctgagtttgatctgaaacaagaaatacggacacttacagaaaaccaactgccactatggggaaataactacaatataacggcgttttaataatttacatttacttttactacattattttgcctaaaccttcagaaacattagtttagtgtgtagaatgacataaaatttccgaaattcagcaatcttaggcctttgtattttaatgtacataatttttaatatacaactctttaaatttatttaacaattatatttattaatttctaaatttaatcttataatttttttatcaggtagtaaaatatgtttctcatgagcataatcattttttattccaaatttaattaacttttcataattatttaaaattttaaaattttttatactttttaaattctaaatatttctagaatttcaaatgaatccactgatctatttcatgaaataaattaattctcaggtatatgaccaatttatttagaacgatacttcgcccaaaatatcttactaaaatatatgaaaattcatgaaaatacagaaatatatgggaatattctttaaacccgtatgattttaaatatagcttataagatcctttaaaatttttattataaataacaaatctcccctaaatattcacggtttgtatcatttaactaatacaatataaaaaataatttctaatattgtcaatggaatcttctaattctcattaacgtttccaaaatttattacgttatgggattttttgattataatttacacattttttatttaatttttgttaattattgaagattcttttttctatcaggtttcctagtgttaatggtgttttctggcgtatgatcttttaaaactggtttagtattacggaaatgaacgattaactaacaaacgaagagtttataaccaaataaccgatatttaataaatatttaataaaagcacgaataatatattaaaattttacgatatttaaaatgttttgatttggatctttccaagggttttaattaaatgagaccataaatatttaaatgcttacatgactcttaaattgccacgcattgaaaagtaatttgctataatcatcagtaagtgcatgaattcatgatgttcgaagatttttgggatgagatttgggaactttgacccgtagcatataccgcctagtaagtaaagggaggctgaaaataaaacatcccataaaattaataattccctcgatttatataaagctacagttaggtaatggtttgcaaagccaaaggtagtgaatgatataactctgatccactttggcatcccgcaaaaatcgtatatgagacattgaaagaccactgaaaaaattgagaaattaaaaacttacagcaaaggccgattccccaaattcccaaggtataaataaccgcgaaattgttctttatagtatgtaaatacaccgggaagtagcatgttagaatgaacaagtaaatgactgaaaaacatataaattatggttacaaacctgcataatcaactctcttgaatacgcttctttgctcgaggttcaaatccctattatgataaaatgctgttatcaaagtattgcaaagtgaggagaaaagggatatgaacattccgagtttaaaccaagtatgggtatttttcccatatactttaaaatatccgtataaaatcactaaaaggttaaatatgtataccctccctctaagtaatgggacctttttcctaggagattcaaaactagagaatttcttgttcaaccactcagcacaatcatttaacattttgagagttatagtacaagattgcgttattgaatcatactgtacattttgcgtgccaagaaattacatctattgaatctgctgtcttctttgagggaaatttccgtttgaatctatgggggagtaaaactgtaaatattctctcaaatttaaaccaatctacacattttcttgactattgagaggtattattcaaataaagttggtgtaggtttcaatacctacacattcatttatgatatataataaagttgaataactcaatttatacaaataaccccagtttatcaatacatgaaagtagaataaactacattatgggcgtgaattagtggccttcacggctttaacttcgttaattgaaaattaagaaagaacgatgccataaatgcaaaccagcagaaaacatgaaacagttcatgaaattcaaaaatgccaggaacaaggtttgggctttctttagcgtagaaaactgctcctgttatataaaaaaatgctgtaaagaatcccattaaggcggaatagtattttccatttactataaatttgtacgccagataaacatatggagctccgaaaaatgggtatataatcgatcgaaaggactttgatgtgttgataaaattaaatagcaacgctccaaaaacacctaaaaattcttatttatgtaacgacaaacctccaaatatgacaatccagtggattaatgatataaataacaaaatcgaatcgtttttaatatagtacagaattgctgggaacgcagagcttcctatcactagaaaaatccctaaaacaaatttatattagttccttatggtttatatagtcgaatacctgcatagtctagccttttaaacaaggaatcccttgtactatcccactcctttaaatgtaggattgaactggcgaaaagattaaataaacaacaggcaaagaatatgaaatacgccgctataatttgtgtttcatcgtgatttttaaccacggatactgcgagaatgggtaatgatataatatttagtacatggattctaccccttagaaacgggagattccttttatttacaattttggtgatcattttgatactattttacaaaatatttgctattgcataattttaactttatttatgggcgaaaaactcaaatgtgtaggtgattcaaaataatgtacatgccacaaatgtgagttccagtgatctggctaacagtaacgatctttaataaagtttatatggacgaataattttacgatatattaaattagaattataaattaaaaaatcacgaaaaacaattatacttggtgaacttaaaaaaaagatgcccccattagtgtactgactcgatattccatggcctcgcagactcgaaaaattcctccattagcattctagccttcttcgcgatgttatactcggggaaaaagcaaactcttgataatttaacatctccctaataaaaattattaaataatgccagaaatggctagagggctactgtactttaaatatatacctcagcttccttaaacattctcgtgtaaggattctcagttaagttgtaagatttaatttcgtgttctccgacccttaaaatattctcgactccgtttaaaactactctggaaagcttaatactgctctggtcggttggatcacactttactataaaatcgagcatgttcgacattaattgcatacaagtaccatcccctaaaaataaaaaattatttttgaaaaacattttgttatcccagctcaaccattatgctattttagttatactagtttagttatgctattttagttatggtagtatattatatatgtagaaaagtatatctgggtataatctgatattgacataccgagatgatttgatttagaattacatgatattatatatcctatttgtttacggttagctttggaaaggcaagcacaaattgcgtaggccgactccactctaacgctgtgatccaaatcattctggaaaacatcaactagagatttcaaagcatcagagtcgattattgcctggacctcgctatcagtttcacaggctaagtttccaagagtgttacaggctctagccttacatctagatgtcgtgactgggcaatttagcagctttacgagtgagtcttgaacatcaccatctattaatgagagtatctggttatggcttgctgcaaaggccatcttactaatcacagagagcgctccaaatgagatttcattgaatgactggtcaacgtttgaatttaaattgggagaactaaccatcagcttttgaggcacttcggatttcatattccccttactttccattgaaacacgggcttcgtgcttgtttacaacaacgagggacaattccattatctttttaagtcctccagactctagaagcaagtcaactccgtaggattgttcgcagatggcaaccagagtattacaggcaattgatagaatttgagcttcctgggtcctgtggaggactgaaaccaaataatcaacaattcttctactcaactttattgcaaaggagagatttgattgaggtgatcctggagataaatcatcagggtcttctgatttgaacaagattttaacaactattgcgttgcacagctggagcgatgactcatcgacgatattaaaaaaacagctaacgatcctattaagaagctcattcgatagatgaaaacgagctattagatttctaatagttgaaatacatgaattccacacttccgtattagagtttatgtcagtactagcgacctctgctattgatattaacgtcattaagagttctagtgtaaaaagtttgccgtatatttcaggcgatagatatgaggatgtagcaaaaattaactttacagattcctttaaaagttcgttatagtattctcctgcgattaggggtttaactaccttttcctccagtaattccgggcttaaaatttgatctaaatcgttctttgataaaaacggacttctatcattaagagctgacggacttccgtaattgactagcactgaatttagaattactctgattgatttgatccttttcgatacatctgagaatttttggagaccttcgatcacttcgttcaataaataatctctgactttaaatttgttctctaaatttgtaagcaaaacagacattgagacttctgagcagtcagaagtgtcttcattgcacatatccatcgtttcactccctgttttcgaaagatgttagtacaaatattttacaaattgcagcaggacaaattaccatttatagcaaatttaaatattaaaattattggtacaattacattttaatttataataaatgaacctgggatggggaagaggcaaacaaccaagtattaatctgagtatatactttttttaatgtaaattaaaataagattcttttattaataattttaaaacacacaattacacatttttagatatgattaaaaaaactaccagtttaaaatgagcaacgttgactcaacgtcaacacctgagaatcctaggtcgttaaagaacctatttcttgatctaaaggaggaattaaaaagtaggtctgaggtaaattttaagtcaaggaagaaattagaggaatgtgcagcttcatcgtccgacgcttcctgtaattcaaacagcaacttcgacgaagaacttagttccttcttgaaaaacactaatcagaacggaaacttgttggatttgtttaataagaagtatttcataggttatgctataagtgaagcctttagtggcacagatttggatgcatatactctgtttcacatatggaataccaagagatcatcgcaaaaaagctgtgccttttataatcattctttagtatcacctgaagagggtttagagttaacaaatagacctgaacacttttcaaaggaccagtttgtagtattttatcaacaactgttttttagttatcaatcagaactagagttgatagatcgcacaaggccaatttttaaaattcctccccaggataactcacttgtccacgctattgaaccaaagactactactttgattttgttaacatatctttacggcttgaataacgttaaattcattggtttgaggaatttccccgaccactccacagttcctggcccttatttgagtctcttgaatatcgactccaagtctgactttattacctgtttaaccaagttcaacgagctgatttttaaaaatgccatgaattctgacaattcttactattttaacttcgagggttacttgaacttgtcatattttgtctacgaacttgactttatttactcttacattctcgttgaggagaattgctactctaagtacactgagcccattttactaaagtcttttacgaaccgtgtttttgggaaggccagcctagctttaaatttataccgcatgagatctagatacaaggatttgagtatttcagaagtgctatctaggtttgactcagttttatccttaatttgtaaaatattttttgaattcaaaagtgctccgaaacaagctcctcttgacaagaacaaccctaaggttttcaatttcctctgcttcacctgcatagtttactcctacatctactcaattctcagcattcctctgcaactgttgccatgggaggtcttcgtgcctgacaaattcaactcaaaaacagaaaaacctgataaacgaagaaccgcaggaactgaaaatggaactgaggaaactgatgataaatcacaggactctactcttcccaatggtgtagattacagctctaatgacgatactggcgagttgaaggagaattttaccatagttgacatgtctgttcacaacgagtttgctgagacagccgctgattccacatgtattgagaacactagaaggcatgataacttgatgacttacataattggactagtgaacggtgaagggaactggattaaaaagaaggagaaatttgtggacctgatcgacacctataagttgggcctatcttggtacaggcgtccatcttttagtaacaccctgtataataataattcaaaagcctggccaatatcaattttttactataatcttcttatagagccctgcggtagggcctttttcgtctggtactggaagaacatcgaggcctggggaagctcaaatatctggtcaagtcaacctaaattctccaatcagaaaacctcaatctttggtagatttctaaataaattgtccagaaaaccccagttccaaaccgactcaaatcttggactaaagcgtcttgtttctctaaggctaagggacactgtatcctacgtctttgacattgaacttgagctgaaaaaggctcttttgtactaataatatttttaaaaataatacaattgtgtgatatataatatttgtatgagtatcagtatatatatgcacacatacataaaaatattaaattccacttgttataattgactctatcagttcagttttttcatgttcttcaagactcatccataaattggtatcgacagtatgaaactccagagcaaaattctcaaaaatcctctttatcactgcatttattccactaggtctcttagtgtcatttctaagtggagattcaataatatttatgactttatttccgaaattttcatccacaactagaaaatcagctgggactggtgacaaaaacaaaggtttaaagaactcagaggaatcaaacttcgagtatattttatacttcccagataaatcatttattactttacacacttcatcttctatctcatgccttgtaaaataaaccaaaagccattctcggaaacctaaatttcaatgcatttaaacactaattaactataaactagggattataaataactaagttaggattacatgggataatgcaccgaatgtgaatattgtgtttaaattctggcagaactagcatgtgaaagagccaaattgcaaacactttcaggggttccttctcccacaatgtgtctgatcctattcttctccacacataggaaagaaggtaataatttaagttaatttctttgttcactgaaacgggttccaactgattatttccatttaaactagtagttatactttcatttaatccagtggttatgctgttatttttatataaagaacttgagtgagttgaaataactgaaattgcaaaatttatacatgactgttcgtctaaagagtctatccgttcttctaagtagagagacgccctatctattagagaatggattaaatgtgtagatttatcgacagttgcgatatcgtaaacagccttacagagagtattaatgtccagattaatatcattgaagccggacattgaaatttcaatttcattaataagtctttttgcgcaaacatcccatacttctctaaagtagaggcccatttttgaaagagatgacaaacacatacaaagctcttgagtactgaataatttattatcttcacttactctccttgcaacgtagtaaagcaccttgtcgtgcgttttattaaagttcaaatggtttgaaaaggccactgagagccaggtaatatcagtggttgacaaattaactttgttgacagagtctgatattttacagaatattccataatcgtaacttttaacaactgcgtaaagcttgattatgtatgaaagtagaagggagtgttcttgatcaattaacatatttgataaattggtcttaaataattcacttaccactttgttgtataacgggatttcatagaaaccgctactagcaaagcagtggcatgtttttaagagcagaagaccaactttattaataaaagtcggtgtttgatttggaaatgagacatcaagaattaagagtcttttaagtaaaccgttgtaaagtctatagtattggtggcctaatgcatcaagtgtaatgataacattgcaaatagactccacgtccaacttgttcttgttcatatacaaatcttgcaaaagtaaatcatacctataaatcaattaattatacagtatattcataataattatcactcaataatgtagtacctttcatctcttattattgcgtcccttaggtccctgttatggtgataggttgttaggtactcttcattctttgggtcttcaaagtgccttattatctcccactgggccttgttgattacttctttctcagtttccgagaagtttgactggtcaatatccgactttttagaaggttctttttttctgaacacgttattatatccgagaaataattcatcacagtctggcttatacttgttattaggttcattttccacaaactgtctcaaagcattcattactgtaataagattatgaaggtacatagcccctaaagataatttgttgtttataaattaaaaatacctctatgagtaacaagcagatttagtacttggtcatgattagtgcaggtgtaaatcaactgatccatttgcatacataatggattcatataaagggaagagtgttcagtatcattttgtttttgtacagtaatatgtgtggaatgtgcgatattctcagttgtgagattcctatttgaaatatgtggaaaaacattctttaaatgatagaaatcggctctaactattgtacattttgataaatttgatattaaaagagaagatagccgagaattagaaaacattttaagtgaacagaagtcagttgggtgtaatgatcataaatggaattatatattaaatgtgtaagaaaataaatgaaaaataaaaatattacacttatgatatttaaaatgtagagaatcatgggaaatcttaaatcaaaaacaaattaatcgtaagaatcatcctaaggtataaacgttaatggaaaataaaaaaataattaataaaataccttgggttcgagatcattaaattcccaaacgtagtctgaaaaaaatccttttttgaggtgctttcccataccaaacttggataactttgacttatccgaatcgccatcagcctcagataacagcttcgatcttctagttgcataagtatgggctgttccaacttcctcatttaagatgattttaggagaaggtggaggtttctttttaacggaggggacccttggaggtctttgcggaggtttgatggcaggtgtatccctgctcaaaacttcctctagtaaataaggttcaaatcctttatcctcatttttgcgatgtttatctaggtttctaaccaattcaagtgcggcttttgactctattccttcaggttcataatttacaagtggttcaagaagagctaaataagtttttagaactttattttcggaatcattaaaattaatactagaatttaaaatctgtttccagtgataccggaagttaccttggagatcaccccaagagggaaatatacaattcaaatccagaagagcttcaaaacacgtgtttgtcaaatcagaatttttattttccatttcattacgttatactgctaaaatattcgccaattatactatacatattaagttacttaaaagtttaaagagtaagtagtgtcagttcactacatttattaaattaataaaaaatactcaatggaatttcctgagaagttgtatgaaaatctagaccttctagtgaggggattcttcatagtatccacctttcttcttctgttaactggcagtagtaaaacattattttcttacacactatatggaaaacgactaacaacgtcaaatcgctataattattctaaattcctggtcccaaagtctctattttcgacattttacgtcgtgggattaatttcaaatggatttttattctacaaggtgagattctaactgaattaacacctaaaaattcaggaacacagagagttctttaacatctttcgagtgatgtttattacacatatactgcggagactttttgaacaagtgtttctatttgctaggctccctaaaccatcaaaaatgcatcttttggcttacttatttggactaaggtattaataaatgcatgatttttagttattatgtagcaaccgcattcgcagttaacaaccctaacaattacgcaccaataaaattttgtgtatttttaaacatgtttgcccagggtttacaggtaaattaatctctacaaattaaatattcagttctactgccatgtcaaactgtcaaaactcagaaccgacacatctgatgccaaggtctacaaggttccaaagggagggccttttaactttatcttatgtccacattacttggctgaaatcttaatatacgtatcactttgctgtaatctgaacatgtttgtttctaaaaactcaattttttcaggctactatgcctaatatttgtcacggtagaactctcttcactcgctcataccaacaaagtttggtattttcaaaacttcccaaaatcacaattacacaccaacaaggctctactgccctttgtattttaatatagctaatagttcaaagtaatatattaaagagatgaacacaatttgttgcatttatcctttgcaatctgtgttagattttttgacaaatcttcctgaggtttgaaggaatgacaacacattccacatactcgggctacaaaatttaacaaataaataagcttacccttacaatctttatctttacaatgcttttctataaacccagacccagaacagttgaaccaaagctggtccaaatatttttgaatcatggaaaccttttcgtcctgctttgaacactgttcctcacacactgattgggcatctttatccatgtaatgggtttgacaacagaagctacaaaagttgtgttcgcacgcctctagattctcgggtgaaatcttcccacattctgatctccgatccacctctaaacatttcttggttccctcctctctcacaccttcattatccaatttactaccagcatcagtaatcaagccttgattgtgcttataaattggcttaagagaaatgttagagaacgcaactcctgaacaattcaggctggcaagtccaactgatcctccaggcttaagttcatgagctgtcctaacgtttaaaaagatcaaatcagaaccgaccgagccacccattgaaacagtgacaaggtcgtcattgaaagtcacagacaacgaggtccactcattgagtgatacccctctaaggttagtttcagtgattgtggtaagggtcccctgattcatctgttttagtgcagagtactttggtgagatctcaagcaagagaaattccccagcattatggaacctgaacacgagccctgcggtaccaaaatcacactgcatgagaatagaggccgaaaatattccatacgtacaacttttgtgattttttagcactgaaatcgtcgggtcagtctcctcctgaactcccaaacttaacgtgtttgcaatcacattaggctcacccattaaatccttttcaaacctccattcctaaatattcagataattttgcgaaattccacttacccccttggagttgtaaactgaccaattgtgggagaaatttgagaggaaatcctctttaaatatgcctaaagtaatattataaaacattagtggaagaatgagtatataattgactgagtactaactgcaaaacggcggctccggcggtattggtggcgagtcgtacctgaggcaagaaagtgcctctacgttgaaccttttaaaatgagcgaaagaaactttcccagtataaagcgccactgttccacttgagtgagtcgcatctatcacgtcgataacagcatttggagtatcaaaaatctcatcctcaccttgaaccaccgatatcataagcctgctctgccttgtctcaattctcacatgataccaaactatattatattcaatgatatgtaaagtgttagtatgtttctagggtaataattgtatttaagagtaccttcctcgatatatccaccatcttcaactctggcaagttcgtaaggttctccatcaataaccctaattagtctcttaaaccccccattactctaaaagcataaaaacaaaacaatataattacctgcttcatttgaagtagatagtaattattcatatcaaccattcggaaagcgagtccgaggcttccagtactcccggcgtacactgaggctgagaatatgaaatcgtagaatttcttatccttaagcaccagataactgcctgcgattgtgttatttggaggtataatctgggacatttgagatattgtcaactccgtgctgttcttaacgttcagttcactcatcacccaggtaggataacctttggttgcacttgtcgtctccacagtaaatattgaaaacaaactctcctgacttgttttcaacaatgaaaacgactcaaatgaagaatgcaaattcttttccctcattagctatattttcattaacacactttcattataagttataagcctatgtaaagataagtagataaatactttgttgattttctgggccatcatttgtcttttatatgacaattgtgatgcgataagtttaattgcgcttcccatatgctcaactctatggtccaagttaacgaacatgctctaaagttccggtaaaaaataaataaagtacctggcctggtatctttttcaaatcagccttctttatcaggtccctcgtgttggcaagtatctaatgtatcaaatatgattaattcacttacgagtccggtatgatctctgaaaagattcaaaaaaacaggcgagcccttagtattttgggaataaatgtgagtaaccaaagagtgaattgcttcacctgttgacatttcactcggcatcaaatgataatgtttactctttttgggtttatttacttcaattattggaggaacttcatctaatttattctcggtttcttccaaatcttctgatttatcttcctcctggttatcacctttgttggtaattttactactatccagagtgggctttttatcattctcagccttttctttttctttagtctcaacattatctttattttcctctttctccttgttctcgtctttatttttgtcatttgtctccttgttttccttatctgtttcctttggggtattaattttgacagcattgttgatattattgcgattaagtgcattagaggcaagtttcattttgaaatgtttgatcactttctttccctttttgaacttgcacttgttttccatcctctttaccttaaatgctgattctccgagtgttgtcgagacgcttgcactattgattccgttttggaagaacccatccaattccccaggcgatgagactatttcaacttgtaacccagacttattatcatactctcctgcatgaactgcagacaaacaaacagaactattgaacgaatacaatccgtctttacctccttcaacctcataattttcatctaaacacaaatttaagaccagtcaataaaatttatgtactcaactaaataatatacaaaatgatgaaataagatacaagtttcatgacagttttgtgggcatttgacattaaactttgatcctggctttgttggaaggtccgaattgtcagtgatcctggaattacatgccaaagttggaatcttctcaggaggccgcacactagaaaaattagtagaacctattcagaatataaaaagttgaataacttacagataattcctgacatatccttatctctgccatcgaataactcaactccctccggagttactccaagaatgtttccgtctttcaggttctctaggcttacatatttcgagacgtctgcagccagatcaagtgatcgcagagaatctccaacctttactgctactggaattatggtaccgggaggaacttccattgtttttagcatgactgaaagggactctaactgcttttcatgctgaaggtgaaaagggtgtagtccgtactttgagcactcgtcaataacatttgacaagccaatcagtgtatcatcctcaacagctaaataaaatagtttaaattattacttactagaaacgtagtatgaggaaccagtgtacatgtcgcagtaaactctaagtttttggttgtaacattgaggcaatatatcgtaaaagccactaggcttgttctcacccaaattttttatataaatacaatctgaaaattctctttcatccgacacagcaggcttaacacttgacaaatgaacatctaaagaaacaattaaattagtgtggtatatatgaaactagattaggaaagaaactaaccaacttgggacaatttttcgagacttgatctataaactcgtttaagttgttcaactttattaaagtaactttcatgcctatttttacactttgagatttttgctgttaacttctcaagatctgaaatctttccctcaattgtgtttacaatctcttctattcgtgcttccgcccttctaagtggaagtgttttactgagatcaacttgataaacagactccaggaaatacttatctctagcatcctttgagtttttcgcagtatcacatggttccacaatggtttttagtctatttgtgtaggctgaaatattcgctattccatactgcacaaatccttcaatatctctaaaacacccattaacacttactacttaaaagtaattattatataaataagtaaaaaaaagatacccaaagtcgggatttggagcagttagttgtattttaatgtactggacaagtttatcatttaaatagtcaattgtggtcttcaaagtgtttgctccaacgttttttgctagtgcccattctgtctcatccactcttgtaaatatgttataactcaaggctggatactgccaaacaatcttaagagtttgaagcttataactatcctgtaggtctacgataaaatccacaactctttgttcgttcactttgaattttcttgaggcccaaaagctcttagcgtttccatccagagccttttcagccgcgttttcctccatgttcatgattgaaaagttactttttgcgattttattaagtgctacatttgccatgcctgccgatgagcccttctgtgataagcaaaggtttccaggccttctgagcctcatttgattatttgacgtgaaggtccaagaattcctgccgtcactgtaatcctcaccgttctcgtttttacaaggaagcattctaatagatcctccatccgtctcaacgttgtcctccagtgtcatgcacatgtttgatatagggttataaatctgccctaaacattatttataactccatgaacacacttttgttattatatctccagacatcattgaagtcaaacctcgaaattgcagttatacaactatccaataccacttcattagtgctatctatttgtaaacacatgtcctataaagtggattattttgaattttatctataaattatatatttgtatacttcgaatgatgttattcccgattgtattctgaaaattgggttctcttcacctatgaattgtacaaatgtaattccaaaatatccattaacttgtcctttcatctgaatccggactcgcttagcccttacttttctgggaaatattaactcttgctcttgctcaactaatttaatatattgtgagtagaaacatactgttttcgcaggattgaaatggtaaaacttgtacaaattggtcatcttcatctttagaaatccaaattgaaactaggtttaattttactgtgataaacaataccgtattgaggtaaatattgccaaaaaatcttaatgcctcttaaaacagcgtcagttttgagcgttgcagtccatttaacaatgcgatcgttcatcaggtcatgttcactgcaccaatatcctccacccaaagttagggcgtttgatgcatcgtattttctgaatcctcccgtaccaactctataaaataatttacttatatccaacttacgccttaaaggttgaatccgcctctgcgtggactcctcccagaagaattttattcactattattccatcttgtatatcatttggattaacattattattactgttattatttgcagtgctattaggaataatagtagagttaatgtcactattattattttgttgcaaaccctggttttgggttgattgcgattgaccgttatttacgggtatattgcttggatatcctgtagtcgacccattaactggtgattgatgctctaaacaatgttatatcctctcatatatacaaatgtgtgatatacattcttatatctataacatattttaacattaccgtttggattttctaaataccaaatacaatcagctttaaattttagtgttaaaaacaagttaaataatataagtttatatgtaattttcatattttacaatgaaggctaaaatactcatagcctttaatacgatgtcgtttatttatcaatttacacattatattatgtcacggtatgagatataactacagtcagtatatgaatacatagatacaaatataaacataacaaaaaaatattaattaaacaaatgtgtgggattattccagtgttattaacattttcgcttacacatggggatatgatattccaaatagtaccaatttatcataataaatccatttaattctccaattaaaatttacttaaattatgaaaattctaaattacaccaaattcataaaatttaaaatttaaaaccaaccatttatgaataatcttcgttatcttcagttaaccccttttgtgacttccttattattttactttgacattaatttataaatttaaatacatacattcctattcttaccattttaaataaaaatgtcttaatctaaacagctagctatccatgttactcaatttacattaattttttattattaattagtttctaaaagacattaatttaaaaaataaaaaatagacctaggaagaccaattaatgaatgtaactggtgagtaattcaacatttaatgatatattgtagtaatgaaaggtaatttggacaaacaactgtcaaaaattatgacttctttgtcgaaagaagttgacgtgattccgagtctatataagaacgtttctgattcggaagcgccaaaaagaagagctagatcggaggagtaagtgaactacacattttcaaatttgaattattagaaatcaactctataaggatgagtctgaaactgactcagtaggtgatgatgtcaatcctgataagttaaattacaaagaacttggatggttcggtttggacacagattctgagaattcgactgaaggggtggaaagtgattttttaaggccagtttgggaaaatgaaagaaatgaaaaaacggaatcacaaacgctcgatgataagtggttagaatctgaaattgaatctttttgtaatgacatggatagacagttgggtgaacccattaacgtttccaacagtaataacataatttatccaaacacatcaagtggaaatttagaggagagattggattctaaaaatcagatgctttacccatcaaataccaaaaaaacaaaggtttgatagaaatcttcgacattagatttgtgtgcaggagagtgtcaatcaaagtttagctgcgcatcagggaggagtcaacggctttataggtaatagttggagctgttcaatttgtaaatatttaaaaacaggtgcatgcggtttagagaaattcaattattactcgaaggaaaggtcacaatttcccaggagaaagcaattattattcaaacaactcagagagcttttcaagaaaaagaaaccaaaggataaactaatcgaggtacaacttgagttattttcattctttattagaaaataatggataagtcaagcatagaaaagctaaagaaccactccggtatcaattattcaactttttagtcattttacacctttaatactatattgtctccttaccaccctagaataaagtcaaaaactataaggctaaatttgattgtagaattgtacaaaataaactatatgagtttattggagaggtataaccaggtgaagagagcacattcaatggtagttccgaggatgcagatggttgagattcagaacaagatcttgtttgaaataatgagcaagatctattcagatgacgagaggaacttggaccttctaaaagagttcataggtaagttaaagagtcatgaaaatctccagaaatcaagtcgttttgcatccactcgataatgaagctagggtcagacctgggtgagaactacgtcaacatactaaacaatgtaatcaacgccaattccacgagtgaaatcaggtaagcttctaataactcatgagttttatttactaggccgtgggcaaaagtactttctggaatgttcaaccattacgacatgaaagtagacgaaacactaatccacaacctaaatacactctattcaatcaacaaaatggcacaaggaatctaaaatatcaaaaacccatcttttattagaacttaattcagtttaagtgttaaatttaattatattctaattattaccaagttgatcagaatctattaaaccaacataattcaaataaaatctctataaattatagagaccgtgttatgttttgaatgaaatgttgttaaaaaataattatataataattattatttttcaaaagacggtgtgtggataaaatatttttggaagacgtattccagggaaaattccacacattcagttttaattttgtaaaataatttagtttaattttttaacacaaaaaattgtgttaatgtgtaatttttagtttttattttgtaaaatagaaaaattgtgcctaaagggtaacattctactgccgattcctaaataatggtagaatttccacacatttcatatatttagtaatgcctcgttacagcgttggttttacaatacacgaagctgttttttctggtactaattcccggaaaccgatcgaccccttggtggttgtccgttgttttgataaagaatttgttacttctgttaagccatctaagacagtagttgcttgctgggatgagagtcatcaatggaataacattgaattgtcgcaaaagtactggagttctggagttatagagttcgagcttcagtctgccaatccgttttggaggaacgatactttgggctctactgctctgcagttgaagttaatttcaacatttaggaataacaccttttcaggcgctctcccactaactgcgcccaattcagtacgcataataggccatctgagaattactgtaaacgcctatgatttatcacatgaagccctaaacaatgcacagccttcacttactaaggaagttgaggttcaaaagactaacaaccttgaaattccaccactcacaagtcctctagtttacaggagtgcggtatcaactgaggttccaaagctctataaatacttccatctgtatattaatgtatacactctcgaggatgttgagactgagcttttcggattcagcccacatataacctgcgaatatgcagggtgtagattacagtcctccaaacccatcagagtaaagggaatcaccaacaccatgcgctcagatcctgaaatctcttcaactgaggataaaacctcacttgatataatcagtgagaagataacaaactatatgagcgctagaaccagtttactcgcttataacactgaggtcagaaggtcaaattacaccttcaaccagtgctttttaatgccagtgagtgtagcagtaggtgaacccactttggaagacaacattattctgagggtttggaagggcttctctatagaacttccaaccatcagcaaatctgatggcagtgtaactggagggatcagcaacaaattactcgcagaaggcaatttttcactttctaaactcagatctgaacgtcaaagagcaagatggtttaatttctacaagtcaactgattcatcccttatcaccactaacactaatgttgacaatgatgatgttaataatagtaatggtactggtaacaccgatgattgtggaggaataaatgaatattacgctggaagaatattgataagtgcaagtgttaagaggataaataaggcttcagatgtgttgaaggctcatgtggcatcatcacaccaactcgaacctctttcacctagtcccaccaggatcttttgtgacgttttcgcagtcgagtctcccaacaactttaccttctcagagccatttgaagtttgcttggagatctcttgcggtccttacaagtctactactgaatggcaaagtattttgtatcggaaggacgtttcagctgttttgaatcgggatttacagttcttaggctataatgatggacctgacggtcaactaaatttgaatcacacagttgataggataacaggttgggtgtgcaactttgattcagttcagggcagattacatcctatggagttacttgtttcctaccatcctgaggagcagtggtacatcttcattagagtaattgcaaggaggaagtctgataagaaaaacgtttcaattttaggttcttcaaagttcacgtttgacgacttaccaagctacaagccaaacaccgttaaggttccagtatggatttcactctttacaggatcaaataacacttcaaacattataaacaacactcttaacttattgaatgagcttaacggaccgaaagctttatcaagaacaagcagtattagcaccgctgacacagactcgcccaccgattttatcaatgttaacactggaattagtaaaaattcaggcttcttgaatgtattattgagtttggagaaggaaatgttttattcatccactttcaattcatctagtaataagcagttcagagtagcatctcatagcagaagaacctcaatggttcttatggattacgaactcaggtgctacctatatagcgcgaaaatggataaaatttacgataatataaccgtctcagtaacttgtgaaggaagaaagaaaactacgactccaagaaaaaacaaatcactattccctgttttcatggaatgccttaccatttccacttccaacctcactccagtcaacaatattctaccaaatgttccaattctaattactctaaacacaaagcacacagaagatagatactcatattctgacacttttaccaataatgctaataataatagtcataaaactcggttagttaagagaagagagaagataaatgttgaagaagtgttgtatagtgcagtaacaacttataacagattaataagttcttcaagtggtcatgatcaaactggtggagttcctaggtggctcaagattggaaattgtgaactccttttatttgttgacatggtaaccaaatctgaggctaaatcagttcctaagttccaaatgctaccaaatgttcaagacattaatgtacaattaggccttatcggtctcagaaaccttaaactatctcctaacacttcctctgataatatgaataatcttcctaatagcgtgaataatgtagtattaaaggccagtgtccaaaattacggcatttgtaccgacgacgagcaattttatgagataatgtgtagctctgagcattcaacagtctgggtaactgatggcgaacggaattatgacatttttgctgttcattctcttgaatttaagagcccaatgggtcttatttttgacccttatctagagctaaaactactaaatgatgatactggtgatatactgggtcactgctgtttccctttatataagaataataaggtgatggaaaaatacagttacatgaaagatttaagacactctttggtcccaaggcgaatgtttgaggtgtttgacaatcttcaaaaaagcgggaatcgaggctcttacgaactgtttgactccgttaagaactcttcaggccaggttgacaatgctctagctgaagttttccagcagttccataccactaaagagtttaagaaaatggttgaatctcttaagtttgacaacaccagtgttttagttcctcctaagtttctactgacgattgacggtgaaaaagttgtgaactcaagttctctaccctataacttggtttcggacagtaacattgaggaagttctaatcgacattccctacaaaatgcagcctttatttgtcaggagtggtggtggcaagaaactttggtccaaaaattcacgtgaactaatgcaacagggtggaaccaatgacgagagtgaaatgggcagtttaaaatactttttaaccgtttcggactctagcggatatcgctactgctcctatgatgatcggtataaagacatagcagttgaacctaccaagatgttccgcatgttcagaacaagcttaaaatcatccttgtttaagatgagactttgtctacttactagttccagctttccatgcacccaggaaggttccaactcctatcttgcagttgaaatcgcctcgagacaatctagagaactacttggagtttctgatggtcttatcagcaacatcaacaagagctatgaaagggaaattttccttcctgaacattcattaataaacttcaaagtcattgaatcatacaatagttttacaggtacttaatggtccctacgcgttatagttattttctatttaatgttatatttttctttgtaggggatactattgaaaagttgatagctaggggatatattgatgttgagaaccgctggttcagtaaatcttggcagaaaatgcagcgggacgacagtgttccaattgagcgcattttactctatgaaaacggtcatgttcagggtcacgtgaatgtcctcttacaacttgataaaatcgataaatttcaccttcttaagactattaacttgaatgtcacgcaaacttcaactgtcgaaatcaggtacactttactatacttattttcaaccaactagtattattaatacaactctaaaaataactgtaggttagtaatttggtcaattcgtgatgccaaaattcccttcgctgagagtaaaaaagaaatgctggacttgtttgtatgttctagtttagattgtcatacttattccggctcttattccactgaacagaaaactgacattcactacaactgtgactctggagatgctactttcaactggcgtgttgtttatcctgaggttaaaactcctcttggcgcttgtcaccttcagctttctctctatgatttctggaagattgggagtcccatcttcattggggatgttaatcttgaattgaaaagttatataaacactgtgtcaactactggcaataaagttaaagttagtggtgaacttcctctttatccaaatcccaaatctactcccactgggttcattcaagttactcttcaagttctcactcaatctgaagccaataccaacaatgtatttttccactttcccctgcaaacttacttattcctaattactcagtcaaatttctgtttaggttggacttggcagagaagaaccgaatcgtgatccatatttgatggtccccaatgctggtagacaatggaaagactggcttgcacacactggattatctattgacttctcaggatacaacctctacgtattatctactattctattttctaataattatttttaatagatatttataaaattataatttctttagatcaagatggttggttgtttcttactattagtttgggtggttgttatagctttcatttatcccgctatactattataatttttacaattccatgtatatggtatatatgtatatacatactagtacattaggtatggcatatgcataccagtatatgtacactaatatgttaattacatagtataatcatatggtacaagattaaaaagggtcaaattgttgaaagtcatcttctcgtttatctcttgagcttactactgatacattctccactatactattcactagtttatcttctctattttcctctttctcgctcactgtggtggtcttaaatgtggcactctctactgtaatacttgtatcaaataattcattgaatatatcagtcttttcatgtttaggttcctctttttgagttttctcaggcaatttttctggtcctaaactcaaaaactcgtcaactgactctgtatacaacgatggcaatgtatttgaaactggggttaccaacgacatgatattttcctgaattattatctccagctcacatgatctttgctgcaattctgggctactatgtctcttgaaacgtctcaaaatcttcctcaactgatctaccctgtttggcatcttagacactaacttccctatacatgtcactaaatactcacattcactcaacaaattcttggctattaatcctatacttatgttttctaacatttcgactatgatttcagtcccatccacatcttcctccttctctacatcatttgtttcgcccaagttattattgccagccaaactatcagtttcaagagtatttgccacattattattgttatatagtgagaacaattcgtcttcattagtgtttgtatcatttggttcattcggtggtgaagaaaggtccaagagaaaatcatcctcacttgacttatcaaacgaatgaaatccattaacgtttttaggtgttgaaaggtccaacaaattaccttcatcctttttggccagttcactaccaactgaattagacagttttccattaagttggaaactgttttcacttagttgtgggttaattgtaactaaattactcagttcaccactgattagttgatagtattcaccaattgagtacagggcggctttcactagcgctgattgtcccatattatatctcagcgttttaaccagttctagggtcgtttttgcctttgtttcctccgtgctactcgacaacaggtctataaagtcaaacagtattgcgtcctgcacacaatttcctgcgatggagaatatttttacaaacacttgtagtttatacgccaggtcatctgaatgtagatttacacagttgaatatcctgtgcatactctctctctttaaatcgtcatctgctgataatagaaattcatacaaatattgtacaattggtgccaaggtttctctattcaccaccttcaatgacacgtccaatgctttctttcttatcgatatatctctttgtttaaatgactggactattattgtccagttactatctccgtacttcatgtgaacgttatgtaacttctttattattccgagtgatatgtacttgacattgttattgaatcccaccataaacttttccaccacttgcttccccagttcattgaatctatcatctgcgaactcacactctattgtcgtcacacactcgtacaaaatcacatcgttcatgttagacctgagctctatcgactttatgatcttcgagattatctcatacagtctctccttataatccattagtttaacgtcatagtcatcacctaaccattattagtatatattcagtacataaatacattagtatataaatatattagtatataaatagtatgtgatagtgtttggagataccactgggatgatttgtattgtatagtagttttaaatacacttgtttgatcagtgagagtatcttgaccttgagaaatggatccgttgagtactgatctgtaatcagttgttggcttgtgaaggtttctgtattagcaggaatagttgctgagaaattagtactagtagggttcagaacttcattcatggtatccaatagcagtgtgaagaatctgtccaaatcacagatttttgtgtaatgttccagaagtacagacatgagtgacagtgccgccgttttaactccgttatcaaagtctgaaattaagggctcgagatacttcatgaacgagtatgccaggtctatgcttatgctgtccggggttaaattacgctgtgcagcttttctcagcattcttaccgtacagattgtggccttcttcttaatattaggcacattagaattgatcagtgtatcaatttcatactgtagttctctgagcatctcgtgagtgcctatgttagccagtgaccgtagagccatttcacatatgtaagggtttgggttattcaagtctatcttaatcgagttggtcgccagcattagcacttcggagtcttcagtcaaaagcaagttcagggccaaatatccaattcttttatctgaaaatttagagcttgctatcagttttatacactcaatttgaccaaaatttgtcggatgtcctagtaaattaataaacagaagctttgaaatgttctttctcctgtaatttatgttatcagtgttcagactactgcggatcttagcgcactctcgagccaaaactgctcgttcttcagaggctgttttagatccgcgtatactgcggatcaattcctttaatgatcccgtcataccaatacgatcatattagtactatttattcaggtataaatgtgtgaaaatttagcaaggattggtccttttctcagcagtataaatacagaaaaaggcttaaaatatggttataactcatttaattataattataatgttattttagggagagtatccatcagtgtcaataaaaaacaaaaatgggtaaaaatttagctaaaaagtgctaaaacaaattaaattatatatataaatattatacatatgaaaaatggtataaaaagttatatttaaaaatcatgatgttacatttctgttaacataggtatgggggattcaagaagaaaaaatttcattttactttatatttcacatcatggggattacacatttaactgatttttattccattccgttttatttttatattttttcctgaaattctcaattttacccaatcttccacatcttaccgtaacaccaacaattattaatttttaattatatctatcaacaatgttgaaaaaaagtaccgggaaggatgatgaaatatttgaaatgattgatgaatcggattccactgaagattctgatgacgaagattacaatttaggtgacaatctcttcactaatcaaaataaaagtaaaccaaataaatctcgaaaactgtccacaaaatccaataattcacgcaataaaaccaccaatatcactcctaaaactttaaattccgctcttaaaaacggaaaccattctctaaaatccgacacacctataaaaagtgccagtaaagaagtattagcctctcgcttgtttgagataataataggccgcaaacatgctcgactatcaagttgtctacaacgtatatacctatcactttcatccgaggataaatttgtaacaatagctgagattttatcgtttatcattgagtgttctggtttcacaccgaatcttgttcactactcatatcttgataattctagtccaactaaaacaaccaatgaaacaaatgaactggagtgggatgtttttaagaatttatataataacttgccaaacagggttaactttgaccaaatcactcagttaaccaacgaagacagttctaatggtgttaatcctcgtggagggaattctagcatggagttggaagattctgaagtatatgggagtagtataaactttgaaaacggacattctttatcacatacgttttattcagtttgtaatcgtaggatgaagttcttgaacaagaaattggattataaggaagggtggatgattgattttggaagtgtaggatttcatcgcttctgtgagtttttcaatgagctgattctccaagttgagctaccgtattttcaacacctacttacgttaatagaatacgtatttgtattaagtacgtgtcaatacagaggagtacgcctgttatccactgtggcatgtaatgagcttattaaatcactacttctgaaattagatgtattgaaaaaagaccaagtggttctgagaaaacaattattggtcgaggctgatttggataaaagggctgcaaccagattgggaggtgattcagctctatccaactctactgtagaattatataaaagggttaacttggtcaatatcacctgttccgccatagtgaacatggtcaaaacaagtttttacgtaaattattcagccaagtcttttgatattgtcggggatctaagagttgtttcagcctattacttagtagtccattccattattaatccagaattataccatcattctttatacatggagctagtaactagtttgctcagcaatatggatgacaatctacccctattactcaagttcatactcatcaatggagatgtattggaaaaaaagattatggaaagagtattgagaatatatacaggtgaaaacaatgaggtcaatcaactaattgaatttatacaccttaaacattcttgttcgcaaacttccgataaacttgctaatactgatgatactgataatactaataatactgacaaacttgatcctacggataatggtgttaaaactgataaacttgattccaacattgttgtgatagatgatgaaacagtctacaataaaattgtgaatagtaataacaagtatatcggctgtgtatatttattaaaagagttgccaaagtttaaggttagccttaagcttgacttgaatttaacgaatgtgaagagtaaataccaaaacttatttagtggtaataataaaccctatcatcaccatgtatacaactttaacacaggtaagggtaacagtggaggtgaggattacatggaaaacatgcgagtcatgtgtaactcaatgttaaaacatagtgaaaaggaaagttacaaccaatttgtgaataatttagtttcggatttagttgaacttaacttcttcgacccggagttttcctattttactctttcaaattatgttacgttcttaaatccaccacagttacacaccctatacaatactatcctactacaattactcaagtcattgtcatcaacaggctcaagtacagatttaggaactggtgtcactagtagtttggacgatttcataacaaactgtgatgagttatataaattaaataaaactactgaaaacaatttgctaacactgttgaatatgtttaatgaggtggtgaggatgaatgtgacaaaatccaacaaattcaaggtggtagatttagtattgaaaagtcttgattatttgttaaattcacccaatttgctgtctatctcactcaacatattatcaaacctgagtgagactggagaggaagctaaagatatctcttccaatactacacttaaaaataagattaactcgttttttaatacaaacttcaaccaactatatgaatttgttgtggacttaaaaagcgataccaatgttgacaacacagatgatgtaatgcgagtactgtatatcttgaacagtttaatgagtagctttaattttgttaaattggatgaaactaagttcacaactttgtttaacaaatcttttgacatgatgctgtctgactctactactggaagaactgatttggtggatgagctgatggtattttactatttggtgtatgaatatataatattaaagactataaatacagattactattttgattttctacctcaactccataacaaattattactaatgctgcttaataagcctaaatttagtaatgatactgagaagtttattactgtttccacagcactaagtatattaaaactgtcgaatattgattttttgaagaataactactcgttcacaatgagttccagtactgtaaatcaactactcaactacgtcacagacttatttttgtcattatatcaaagtaacaagagtattcttaaattaagccaaaagaagagtaaattaaacatactaaatgacgggtgtgtaacaataagttataaatatacaaattcaacaacttgtttagatacactaaatatcctgtacgtggctgagagtgtagtgtatcagtacgcaaaaacactgaataagtcagtgtatgacagtaacatatcaataataatactgttgaatagttgcagtgggtatgaacgtgtaagagtagcatcacaaaagtttcttgaaatactttctaagttagatttgacattgtttaacctcatttcacttcactgcatgacaaccttgtacgaattatcgcaattctcacttctcagttccgtaatcacattgtttaaccaatttgaaaacgggggaatcttgcaatttatataccatttgttaagttacattaaaaagtctcagtcgaaccataacctccaacagtatataaggccaatactgttagaaaatcccagtgttaagaccgccagcgatgaaaagtacaataacatactgaagctgattaaattactgaaggataaccaacaactctatttggtgaaatatatggaaaaattattcaacgtggaggtggatgacgattttaatgataatttattaacattgagacggaacttaaacgttaaatcagttgagcaattatgcgctaatatcctcaacagtatacctaaacaaagcaaatccacatcaaaacccactaaatccatctcagaatttttcaaacccagttctaaagtagataaaccggattcgaaactggataaaactagtttacagctacctgaactgggcacagaagtacataaacccactgcacagcaaactaaaccaagttcaaagcatctgaaaaacaagagaaagaggatgaaggaagctggcacaacgttattgccacatgatttttatcaatttaatgataatacgacacattcacttgattctaatagtgttaataaggaagagagttcgcctgagattgtgagaaactacaccaagagaaccctactaccgagcatgggaattaagaataagtttgaaccaatagaattaagagatgacgagttaaacttggaggatttggagacttttaatgagttagagccctttgaagatgttatagaagtcccagatgatctttctcccaccaaattaacactcaaaagctcaagtttacattttccttaatattatgctactatatataatattatgtatgtataatattagtatggtctagtgatgttgaatctaaaggttttcgagcgttttctaaggcttttcccatgaggtccacctccgccgcgtccttcacctgttctgaagcaattcatcaaattcaaatccacgccattcctatcaaacattcttgcctcacctatgcaaacagattagttataatttattagagtattcgattagaagccattctttgaatatatgtgataagttaccgagtcggtttctgaattcttgagggttatttttccaccacaaattcaacttcattccctcctctccgcttgcaaatggttgcctctcaaccatcacatctgtaaatacattaatatactagaattagacagaaatgtatgttaggaaaggattgttgttactttgttcaggtggtagatagaatggtgaatattttttagattccaaaaatttgagttcttcagacttgtatttgccagtcaagtgtttataataggcataaacagggtccttctacgttaatttagtttttgaaattcttacacggctgttttctgagtaatacactttccaaggaagccccagtctcattatacctattaataaattactattctagtataattaaaggtataactaagtatagtgttaacaatggtattatgcgttgtgtattacttggattggatttataaaagtacatgacatttctcatttgttcgcccatttgcgatcttagttgttccgggaaagtatttaaaatataattatcaaatcctccactactcgttatcgcatgtaatgctgcaaaacattatacacaggtacacaagtagtatatttaagtatgtagtaagggtgagtgggaaatacctgaagtggtaaccctaacgtttggaactgtggtatttaaaagtttagattcaaagtctttcttgaaaaccaacggtttaagcttaattctggtctttttcagggaataggatactttagtgtaatagttatagtcctcgtcatggtacagtcctacacaaattcaaagaatatgggagtaagagagtaagtagaagaaattgtgagtataaaactaaaatatcatctgattaacagcgaataatggtgttataattaagagaataccggtttgagaggaggctgaaggaggtctgccataggctttgacggggatgggatgaattatctggttcttcttaaatcctctacattgtccctttcctaaaaaatgtttataggtataatataaatcatataatatgtgatattcattggtattggaataataatagtataggtaatgggatggtaaatgtgtaataccgttgaagcgtaaatatttgccgaaaagatatggaaacctcggcataataaattattacatattttaattatttaatagtagaaatttgaagcattttagaaaattttacgtaagttgtgtaaatctatggtgtggaagaaaaagcaacacaatttacaattaatagtatatagtgatttaaatgtactatagatctcaaaataaacaatattaaatattaaatcatatgaaatctagtagaatccatcaaataagcctcaaatgtcatgaaaaaaattcatctgtgtgatgtaacatttttttaaagttttaaaatttctttagttttttacacaaatcccgtttaaaccaagtttctagtgaaattagtaaatttcgccgatttttggaatcggccgtggtctttaattctaggattctacacacgggatgcatgcattcataattgttgcattgtttttagatctttactgttctgtaaattatgaaacaaatcagtatatttatttccgtaatttgtaaaacttgatttaatgattatttataatgaaagcatctgatatcgcctccctaacttgcgtttctctcttcttgacagtcgccttcgctcacgttgttaaggaatttgtactcaatttgaaagctcgctcaaaaattgataaaaacgtacgtttcaaattatttaaaaatttattaattaatttaatattacagtaaattacttagtgattcataaaattaagaacaaatcaacaataactttaaagaactaactagattattaatattttagtcttattgataattaattttctcgctgatgtgtgtatgaattatactaagatgtgctcataattatccaaaaaagtagtaaataatgttgtagtacgtgcctgatgaaaaggagaagagaagtgtcaagatttacaggttattgctgctccatgtcggcaccaacaacatcgttttgttgtgcctgattttcggaatctcatttattatctatgggctcaccaacgattacctagatggactttgctttttcgtgggtggtctaacttcattgatcacaggtttactggctgtgctcttctgtaaaggagcctccagcaagctcgtagacttatcccaaataggaattcgtcaagtgtacttgagatgtttgggcaattcgtctgcgatttctatctttttaatcggtttaaacgttctttcactctttatcctgactatagttttgttcccgagaacaactttaggtgatgcaaaaatacttaaactgctgaccacaatttcatacttttgctttggaactctattcgtgactattttctccagactctcaggagggcttttcaacaactcatacaacattctcctggagtctgataaaagtaacacaattgaagaagtttcagtagatgaagttgttgaaaataagttgttaggagatatgaataactatttgcagaatatctacgaattagtgcttgaatttgttgccatcctctcaacattaatctgctcatacgtgatggtgatgggtagatttgaggaaaatggagtgctgctggccaagtcaataaagttcttatcgtacccatttattattctctcatttagcctatttgtaacagcaataacaataaccattttcacatactttatgaagaataatacccttaaaagggtcagaaactcttacatgtacactgtttgctcaagtctggtagccactctggctcttttgccgttctttcacatgtttttcttaccaagtgaaattgacggagttcactatgaaaggtacaccgtttacggactagtgttactgggtttcctggtcggtgtattaatgtcactttgcaataaatacttcttgtcaaacaataactttatgggcaagtcgatttcactatcagtaatctcatcactgactggtggaattatcaactcactttcgttctcaaagctctttacctttattccaactgcattagtagctttgatccttctattgtcactgattttgactgatttctacgggttaatctttgtatgtgccggatcaatgtgttctctttgcctggtgcttacaggctcaattttctactccttggtctttacatctcatagactaactgaaggcgaagatggtggaaatgaagaaaatccatccgacagtctagtattaaggaaccttaagacttcatggtccaaagtcagtgatgtaactaagccatacttgagtacctggtgtattttactcggtttagtactcattaaccacatgtcagttaagttggaagttgttagcccaggttaccttaacccatttgccctcacatctctgttcttgggatgcacattcccaatacttgaaagtgggttaatcctcagaatatcatcctcaattgctaatactaagttgaggaaaacattcaaggaagtttacaactcactttacccatccaacaagcgtgacaaagatgataagggaaagggcaagggtataaaactatcattttggagaagtggtaaaaataataaaaaacaagacgacaaacccgaaagtgaggatattaccaagagaaacgcagacgttgagtccccaaatggacaagttgaagaatccaacaatgacgaactgattaacgtagtaattagttcagatgatgatactaagtataaaaagttcagaggagggtttaagaaatgtttgctagttgaagccggtgttcaagaggattcattgttgaatgctccaatcacctgtgatagttccagatcaccactcactgacactctcgactccacttacagtaacaactcgttccacacagctaactctactcatgaagatgctggagataatgccgcgactgtggatttgaggaaacactgctctagagattacagaatattgaaaaatgcagatattcactacaagatgttccaccccaagtatcatgaaaaacactttaacttgcaaaaaatatcaaccgacgaagaggttactgtacaaaacaattcacagaattcagaaagtgcacaaaataatgtagaagattcacaaaataaacaaaataatgtagaaaaaagttcagataaagtagaaaatgcagtagaagatgtagaaaaggtcgaaaataagcagaatttggcatcaatggtagaacataagaatgatacaggagtaccattggaaaccacggtggatttgaataaggtgatggaaggagtcaggaaaagtatttctagcgagaattcaagttgcagtagcacttacagggaatatgaaagttcatatcccgaaaagaaagttcaaccatcccaagtacatacagctgaggtggtaaacgaagagtcacatgacgaggctgatcttgaggaagtacattacacaggctcattcacctctaagaaccaagaaggtgaagttgtcgaaaatgaatatcacattgacgtgaacaggaatttattaccgccagatgttgatatttctaacactcccaggcgcccaacccctaaatccaccgacagctgcttgctagatttggaagctcatttcgcacaacctaagaaggaaagccaattattaacatacaagaatgtgctgatatcaattttattgtcaattttgccttttattttggcttttggattcccacttctggttggtgtttctttgggcaaaaacgcactcgtcacacttttactcttttcaaacatctcatcttcaattttggtccaagtgctttcattgtgttcaatgactcttgagtcaagttataatcacatctcaagaactagttctgcggactccaattccgcagttccagccgcccagttactagacagtaatggcaacgtttcaaagaggttgagtaaaatcgtctcctcatcaattggccctgttcttaacgcccttatgatggccttgcctttattctgcatttacacaggaagtgtgtatactagcctctccaatcaccaggggttccccaagtggtcaaagtacacaaattaattttttccactacatgttcaaatttattcatttttattctcttagttatatttactttagaaattgttttaatacagtaaattatacaagtttgagaagtaacaaatttaatgaaaatatttgttcactaaattctcttttcgctagaaatattgtgagaaataatacatttaatgaagattccttgatggaaagtagccaaaatgaggtaaaatgatttaaatatgattaaattccacagaaggtgggatatttggagaagaaaaatgacgaaattctactaaaagttaatgttaaacccggttcaaagcaaactcaaattaaaggaggttccttacaaataatttacacatgttttattaatattttactaataatttattagtaatttataaattaaattattacttttatgtgtagaagtggaaggttgtttatcagttcaaatcgcagctccacctagagatggtgaatgtaataaagcgttggtagaattcatttccaaaacacgtaatttcttactattccctatctaactcttattctatccaatgttgaaatttatcttagtcggtataaaaaaggggaatgtaacattattacatggtcataaatcaagggataaaatcttatccattactggaattgacatacaagtggcctcagaactctttattaactcttatgaatctaacaactaaactatacatataatatactaacatatgaatgtgtataaaataaaattaagaggcaaccctaaaaataataaaacaattaatccttactttaacaatgtgttcctacaacattattaatatacttaaatgtatataactcataatactatatgtaagtagcgaattagaacactataaataaccaattagaatactttagtccttctttgcttgcgccaagaaactcgccaagaacttgtccagatttgaaaactttaaaggttggaaggcttgtgacgttatacttttgtgcaagttcctgtagcttgtcgacgtttaccttgacaaataaaagtgaagggtgttcagtagccaaagcgtcaaattgaggagcaaatctcatgcaagggcctatttacagggttaaacataacataatgacttatatctgtggaacgtaccacaccaatcagcgtaaaagtcaacgacaactacggaatcaccagaaagtgtcttttcaaattctacacaatttcatatactccaattaacacatcatttactaagtatgtaacttgataaataatatgctaagcagtatggtggttaccttcttttgaagtaacttcatgaaccattttgatcaaattgcaaataacttgaggagaggtgtttgagtaaaaaagttaagtttaagaaattaaattagaaaaagagtggaaagaatatttaaagtgataaaaaccaatgtgtataattctatgggtaaagccccagcaagaacacaaagcgtacacaccaattcaacgacttgataaatttatttaaataaagttaaaaattattttttcaacaaaatcacatgggttttagactcaaacaaatgttatcttgaaatcgtcaaaaatgatatagtatggattccataggattccaccactgttaacaattatacgaaatttagtataattattttttcatattatttttattccaaacattaaataaacttttagtattaaatatatgtaatttggtcgataaaaatcattatattggggtaatagaatccaaaattgaaatattatgaataaatacataaaattccgtgataaattactatatataatatttacaattacgttgttatggtatgtgtatatcatgtgattgagtaagttgaaattattggagtgagaatgaagtggttaggaagagatgtgtaaaacgaagttgtaaacgataaaaatgataagaataaaaattatattaataaattaaataaattaaaaaatcttatttattcgagttctacgaccccatggatctaactttacctggaccattctctcattcattattactgttcagtggtgattaattttattccccgaaactctcttcaatacaatttcagtgatatagctgtttacaatcattaattctcttattttttaaaattacgccactgttttttttaatttaattttaattattttattttaattttgtgtattcattttaatttgttctaatcctctttattttctcactgtttctaatagttttgtgtaaattttgtgtaaaatttatcctagtttgtgttcagtttgtgtagattttgtctcattctgtgttaatttgttattctttatgtagtttctttgtttattttgacgtagtttaatttctcgattctttgtagttttcacttacattaatgttaaaaccgtctatttctgtactatataattcccttaacacgctcagcaatagtagattaatcagccttttcataaggaaaaaaatctcaaatccataaaatattaaatctttgaaataacaagatttccgatttcctacaaattttaaaaatttcacatattttaatggtacatcttatccacctatttatttccctatttttccatcatatatcagtatacaatatattattaatatatatcacttaatatatacaccctagtatattgtttgataggttggagatgccattggaccgtgcgttatacagtcgattattggagatattgacgttatcggaaaagggtgacacggagacacagaaatatgtccacgagagtctggcgtcatttcaacaaaacagaccagatgtggccttgtattacttagaagcgtcactatcagcgccaacattccattctaaacagatggccttgttgctgctgaagaacagtatacttcaaaattggagccaaactaacccatcaattcagtcagtgataaaaaacgagataattaatattgtgaatttgagagaagtgaaattgaggaacgcagtggcatcatgttacgtctcaattttcaatgtccagggatacgatcagtggcctacaggcctatacaatctgttgtcaattattagtaacagtaccaacacagttgggagtgacggcgttgtggatgaagtggttgaaactgccgtagtaacgttagtgatgattttagaagacactatagccaatggagcgatgacaccaaattatttaaattacctgaaatcagatttcatcgtcaagttgtttcaaatctcgtctaaatcgtcagcattgactgagataacctcaaggatactgttaaccctgttggattccagtataatattggagtatttggtgtctgacctgttcggccagttttggaacctattgggcttaatggcgacattggataattacaatgtgaagaaatgtgtactcaaagccatgttaaagttgtgggatctagtaccaatgtcaattctacagtcctcagacgctttattcccattcattactaaactctgttctgatgacgcctacacaatacaaattgatgctctagatttttatacgcatattctgcaatcacagttgtacaccaactccaataaccgtatcttaaactgagtttaacacttttatctatttatttagttaatttaccctttttatttagttaacacggttaatatagttaacagactgaatagctaatagtcaacatttaataacatgtctagagataagatgcttattattgggtaagatgctgaatgagtttggaacattactgaagacgttggtggacaacacgagatattcatcgtgggattacatgtcgatggacagaacgcatctggaagatgacaacgcgaatataccagatgacatgcaggacgtgccaataaagtcaagagaagatgaggagaccaatacttggggaaatacgtggacagtaaggaaaggctcagctctattgttagacacaatttcacagctgtacggccagagtaatcctgaggtgataaagatattgctctcatacatacaagagaaacttgatagtacagattgggaacttaaggagtcaggagtgttaacattgggtgcaatttctaagggctcactttacacactgtatccatatttgccaaaggtgattgactatttaatagtggttgcaactgatccgaagcctttattgaggataatttcctgttggtgtctgtcaaggtttgtggagtggctcttcttgcccaataacattaacacctacttgagtaagacgttgtcagtgattttgagaggaatgttagacaggaacaagcgagtgcaagaatcagcgtgttcatcatttacatcttttgaagagtgtggaactacactgttattaccatacgcaggacagatattacatgtaattttgagctgcatagagttgtaccagtcacgtaatttcatgatattatatgacgtcattggaacactgtatcaaagtgtcggcgaatccctaacacaacaaactgaacacaatcaattaattgatgttttactgggaagattagaaattgttggactgggcgacacacagtacattgccctaatcgagtgtctgagtaatataatatcagttttaggctctaagttaccaccagtatttgtgcagaagataactaagcattgtgtggtatcgctttatgaattagttggtgatattacagaacttgagtatttctaccaatctgttcaagtactaactgacacaatttcaatgctactgacgtctactcatggttcagtaaactccactgaaacctgcaatgttattaaaggcttaaagatcagtaatgggattgacctggtattagtaatcaatgaattatgtgcctctaaaatcgttgtaatcttacagtcctgcatagcgctgatgggggatttatcaaattcctccatacagctaaatcaaggttcacttgaaatattggttaataatattcaaaattatgtcaacaatatgcaatccaacgaacaaacttccattaatagctcttcaacaaatgtgcaaagccgttacaattccatcaattcacatgaaagttccaacatacacatatttacttagattacatattttacatagattacaaacaattacatagttatctttgtagtttacacatatttacatattttacatagattacacatatttacatatattacacataccaatactgtaataataacatactattagtataatattagtatgatattcaaatctgtttaggtgataccgatgagtattttggagtgatgaacaattgtgtgtgggtgtttggagtgttatgcgataatcagttggggatatacaacggcggtaacatagatttagtgttcttgttagtggtgaaggtgatcaatttgtgcagtaataacttctgcattctacagaactgctgcgtcacacttggaaaattctccaaaagcttcccgaatctggcaatcaagtatctaaactcgtttttgaacccactttgtaatcatttaatacacgcgaaaaatgacaaggaaaagttcagtaccacactatccatatcaaatttgatactcatgcacctacaatccaccaacaacttgacgaaaacactcaactcacagtccaataacgtattttcgtcaaacaacgtgagcatggggaatgttataaaagttggtgcagaggagttggaaactagtaacgtccttttattgttcaagttgtacatatcgtgttctaagggcacgttggataatttcggagactcatttgggactaactcggagctcattcaggtatgcgtcaatttaatcaagtcgctgctgcataaacaccccaagctcgttcaactcatcgatcccgacaccaaaaataaactcaactcactcacatctctgacataagaattttaaaacaaatatcctaatcttctacaccacagactatagtatttatttgtgttatgtacaattatattatctgacttactcccatccattatacagttatagtgtagttctatatagcataacacttatagacttaataagggcatttataaattactaaagcgtatataaatcgtactaggtgtgtaaaatgaaattattggacttgtttgacgtcctcgatgagttggtgtacaacttcagggttagcgagggtggagacgtcgccgaagtcgtggaacttcttggacgccaatctcctgaggatcctacgcataattttcccactcctggttttcggaagattgggcgtgatcagaacaacgtcgggcgttgcgaaagggcccacatagtgcctaatactcatcttaagcctgccaatcacctcctccttgggaagcctcagacttgcctccttcaatgagacgaaacagaagataccctggcccttgagtgcgtgcgggtacccgaccactgcagcctctgacacaatgtcaacttgagtcagtgcatattcaatttctgcgctacagagcctgtggcctgaaacattaatagtgtcgtcaatgcggcctgaaatccaaatatacccatgcttgtctctaaacgctccgtcaccggtgaaatagtaggggtatttggtggggaaataggtctcatggattctcgaatggtcaccaaaaatcgtcctaaacatgcctggccaaggcttctttatacacaaaagtcccgaacaattattcccctccaactcctcgcccgtatttgcgtcaattatggccaattctatgccaaaaaaggggtaagtggccgagcccggctttgtgaaggtcactcctgggatcggtgagatgattattcctccagtctcagtttgccagtacgagtcaaccactgccacttttccattcccaactacattgtaataccacttccacgcctctgggttgattggttctcccacgcttcctaaaactctcaaactactcaaattatgtcccttcagtggctcgtctccaaatttcatcagactcctaatcgctgttggtgctgtataaaattgcgtcaacccgtgctcctgcacaatgttccaataacggtctggggttggataattcggcaaggaaccgaacatcaccgtcgttatgccgttcagcagcggcccgtaaaccacgtacgtatggcctgtaatccacccgacgtctgccatgcacccgaacacgtcgccttcatggctatcaaaaatgtacctaactgtcgcatatgcatataccaaatatcctcccgtagtatgcgctaatccctagaaaattattattaccatactactaatgtattatagtataataatagtattagagtataatagcgtaataatatagtactaataatatagtactaatatagtaataatatagtaataataatgtggtgaagttgataccttaggtttaccggtagatcctgatgtatagagaatgaataaaacgtcttcactgtccatggtttcaactgggcagtatggtctaaccgactccatggcctcatgcatccatacatccctgccaggtgtcattttcacgtccgatccaatgtttcggaatacaagacaatgagttacaaatgaacaacgtgtcaaggcgtcatccattatatccttagtctttatatgcttagtcgctctcattcctccatcagcagttatgacctatacaaacattaataatggcatagttaatactaaactcatggtaagtagtaaataatggtaataatgaaaacaatagtaaatagtaataatagtaactgtaggataggtaatgatacgatatgtgaattggagtcatgaattctttcagcgagtgaagtggctgagaaaccaccaaagacaacagaatgaacagctccgatgcgagcacatgcaaggacagagtagcagagttctggaattgtgggcatgtaaattgtaacgcaatcgcccttgcgagcaccgagcattttaagcacattagccactttacacacattcatcttcagctcattaaatgtcaccttcctctggtcttcaggctcgtcgccttcgtaaataatagccaatgagtctggtcttacttcagcccaacggtcgacacaattgtaacatgcgttcaacttcccattcaggaaccaggcgtagtttttatccacaaagtcgccctcagacaccttagtatagggcgaaatccagtgtaaacttgactttgctatcttaccccaaaactcgtcactattagaaatactctctccgtacatacgctcatactggtcctacacatttttatacaaccaattgtgattgactaaattaaatactattcagtaactaagggtaaaaataagtaaattgtgtaaaaagctacgaaagtggtgatattgaatttatgtccggggatgggtttgggttcgtatagagagtcgacgtcataggatgaggtgacgacttcaaagtcatcgtttgcggcatcagttgacgtcctgttgagcataaacctcgaaaatcttttattactttccattttcaaactttaaatactgagcaagaattcctcttttgagtacaaattccagctattttatgaattttcgaggtttaacaattaggcgtaggttgaaaaattgatttacaattgttataatcaagaaatgaaaatccgataaaaaattttcttaattataacaggtgaataacagtcaactgaaaactgaaaagaattcagttctagttgagaaataattgaggcacaaaaaagtgagatttgagtaagaatttcgtgaaaaattgagtaaaaattgagtgaaaaatgggataaaaaacagtcgaaaactattttatagaaccaaattaaaattgttataaaaaaataaaaaaaaagtgggtgaaaaatgtaaaaatttgatacaatactatgttagtgatagcggtgaactacacccgagttttgactagctcatagtgtaattaaagtgtgaaaagcacaattgaaatatagaaaaattcgaaaaatccttatggaggtgtaacttggctttagacttttcgaaaacagatagataattgaagatactatattaaaccaccttctacataaacacctgaaaagaacggcctgagaaatctaaatatttcactaccttatggggtatccgaacaacgtgactattacatattatcacttattacccaatcccatgatactttaacactattttacactattttctcattcttttcatattataaataccttactagtaaaataatattttaatgtgtgattaatacttttttgattacacatgccttccacgacttcctcccaaaatttcacaaatatcactaaaaaatccactaaacatttctaaaattaaattttaataaaaatttaaattagacttcgaattcgttaattttcaatacacaccttattcctactcattccacaccatcggacttgctattattccacctcatccaccttattaaattacctatataatatacttgctatgcgattgtggattatccttctttttaacgtcgattttcaattttttaggattggacacattcccaactccagtgttcccacaatctcatttcaatttcactccttatttagtgatactagttatttcttttatatattattttatgctttaattcattccatttccaattcttttgattagaccattttagaccttttgttgcccttaaaatggtcaagttctataataattttattcttttcatgtaatctcatgaatgttgacggattttactctttactaatttttaatcagatttcaaatagctttattttttcaaatttcacaaatcatttgtaatataataacatccaaacattaaaatcattttaataccattttaacatcaatttaaattcgaagactattataaaatttgaaaattatcacaaaatttaaaattattataaaattgaagaaatcaacataaattaactatttgaagtaaagtaaacgtttaataaaagctaacttgatgaagtagatgtaagatttggacaatttgaaatggattccggagtattattgaaattgccttcggattggcaagtgaagatccgtgatgagatggtatcgaagttgagtttatgtattgataagggccaggcgaagactgtggctgaggagacttgggagtatttatcgcaggagaaatttaataaacagcagctgacaaataaactaaaaacttatttactccaacatgtatttttcccttttctatttatatgaaaaaaatttctttattttttaatttttgaactataatgtgtgattttaatttgtaaaatattaattttcaattttaatgtgtgaaatattatttttaactggcattgtctaaaatgtcatctaataaattttaataatttgtgtagtaaaatataataattataggcttcagattttacagaatggctttacgactttgtgcaaaaaactgttgaatactatcatgaaacacatttaccactaaacgaagaaaatttgagtgaaacgcagaccactcttagcactgctgctagtaataccaacactagtaacaccaatactagcaacactaatatcagtaatactaatactagtggtgatacgtttatgaagactgagaaagtggaaatgttgaaaggttagccaaaaaagctcaatagtatttcatagagtcgagatcaagactaatgaaaaatgctctaaaggacatacactcttcaagtgattcactcaagagttcgaaatcaaataatcagggcgcagtggcaaacgagactgaagataaattggaagctgttgataagaagaagaagcttttagacgcattggaccaaccgttggataagctgattttgaaggaaaaaatcgcaaaattacaaggacaaagcgtcccactaggagtaaagaccaagagcgagaagttcaaaatcaatgatacagagaagcacaaaattgatacagaaaatttcaaacttaccaacgaaacttacaaaatttcgaatgaaaagtacaagcttagtactgaaaattttaatcccaagaggaagaagaattcattttataagaatctgacactggttaacgattccagcgggaattccgaaccagtagaaacagcagttaatggagaagaggaaagtgtaaaggtggtaaaggtaccaaagaggtgtattaattatccaaactgcgagtttggggaaaaatgcagatacattcacccgaacaacgtaccttgtaaaaactggcccaattgtttcttcgggactaattgcgcctttttacacccaaaccaataaatctcataccactttccaatactccattaactcactatagtattaaactatactatttattaaaaatgtattaacagtacttttattctaatatataataatatattaattgtgcttttattctaatatataataatatattaacagtacttttattctaatatataatactttattaacagtgcttttattctaatatataataatgtattaacagtacttttattctaatatataatactttattaataatatgttaaaaccatttaacaattccttcaatattccattctttaccattttcttcatttacgtgttcatgttcattttcttgactgaactcttcatcattgtcaggttgagtatctggtatatcgtcttgagagttattgaaaagcctcgtagtgtgcttaatgaacttgctagataagttggaaatgacaggaacgagagaaaacgagtcagagccttcagaatctgaagaggaaagtgagtaacactcgtccaccaaaggttcggttgaaatgtcaactagagttttaagagttttgatgaaggactctgacttaaacttttttggtttgccctggtttgatgcaatctcatcgtctgacccactctcaatgtaataatccaccaccttattctcaattctgtcatccacatcactcgggttatcatccagctccgttattacataacttaactcagttactccactgttatcttcagataactggtcttccatcacttcaacctccctcactatcattttttattttattatataatgtgataagattgagtctgacacattataacactttaaaccattatcccaattataattatgttaagaatatgtaataaaagtgatattacgtagtatatggtatagaattacagtattgataaagtattaagtccagaataccgtagcacatagtatagattaatgttgtagatattatagattaatgttgtagatattatagattaatgttgtagatattatagattaatgttgtagatattatagattaatgtagtagatattatagattaatgtagtagatattatagattaatgtagtagatattatagattaatgtagtagatattatagattaatgtagtagatattatagattaatgtagtagatagtcagagttcaatagaaaacaaataacataatacattattatatatacattactaaatagtgtatgatagaatattagagtgtgtcattttggaatcggtactaatttcatggtttttacataatcaacggagtcttggtagttgagctttttagatgcgataaccatctttgagagaattccaggcaccagctgtccaatgataaggttaaggtaagagtttgggagtaaaactttggggttttcaaagtaagtggcaagcatgtatgagcgggtaaccctctttacaccgtccacaagttccggttcacagtttttaaccaccaggagactctcaaactcatcaacttgagtggcccacctaagcttctttggatgcggaaacttgtttgtagctgcactcaaaatcaccagacaatcatcgccgtagttataacaagttctcgtgaccacataggtacgctttgtgagagggaaagggtactttgaaacagagtaaatgaagtctgttttcgttttctcgtcaaagcttaacatttcgtgttccaggtaagtgtcgtcccaaatagttctgtttttaatttccataaccagggtcagcaaattctccatcggaacctcaatttgtccattcactataaactcttttaaatttgaattcggtctgtacttgcttaaaagctccagttttgactttccgaagttgtaatctcgaactttactgtactcctcaaagggcttattttcatagaagcgtacgactatgctttccaaaaatttattcaaatactcatcaactgtttcctcagtggtcaacacaaacgtatcaagagggggtgcatgtttatcctttgaaaacctgccgcttagccttctaggtgttccagtgaattcgcgtgatgatctagctttcctaggtgaatcccttgaaaatattgattttctaggcgaatctgattctctggacgacttagtttttcggggagaatctgcagagtcccttgaaaatatggatcttcttctaggtgttccctccgagtctccagatggtttagttttaccgtgagaatcatcagattttttagatgtttcggtggattttttaggcgaatcttctgaatctctgggtgatttcgttttcctgggtgattctggtgattttcggggagattgcgaggatttgcgtgaaaagaatcttcttctgggagactcagtggcttttgaatcaatgttttcaggggcattttcagccacgtgatttacttcttccttgttcaacttcatcactgtatcaaattttaagcttaaattctcaacatccggatctgcattaactttgccaccttttgacagatcagctctattttgatgatcagcggtgtcgaggagatcggaggatgatgaatgtgacgagtccgaagaggaggagtcggagtttggttcaatggaaacagaagagatgatatccttaacaacttgaaacatgtgtgatttagagattccttaaaatgtaaaaatgaattaaatattatgatacttttcaaacaacttttaattataaaattatgtacaaaaacggctatttcctatttaaattagtgagctggatagaactgcagttatcagttgttatggtacatggaaggagagccaatgaagtaaaaaccagatgaagcaagccgtgctaacagttaaattcgtctctgaaggtcataaaatcaatgtaaaaaatgaactaaaaatagaagtgcagtaaaatggataaaattaaaatgatttaaaaatttcccagtcactggggggacttttttatcttgatccataattatttacacattttccaaataagcacgattattactatttttccttattttagatttattttaacatcaatttacaacttatttcctcgttttttccacaacatctccttattttgttaggcactctccataccataaaactttcaattattcattatattactctttattatgtatattattatctatatttttaaactatattattaatgtagtatgatgtatagtataagttaatgttagatcaatttactgtacatgatggaatacataattggtggaactactggtttactgaaggagattaatactaagaatcgcagcattttgaggctttcttctcttgaagatcaagctttagataaatttatcacaacaacctcctggtctggcactctcgggtatcttcaaaattccaaccataacacataccacttatatattcttactattattgatactatatactatctatttatataatctgttagatatactttaaatctttcatagatatggtgaagatgaaataactgttggatatgagagcggattagttcgtagttacaacaccttaacaggtgaggttatcagggaatatcatctggattctaaatgtgtttacgtaacactgttaaattatcatttttatcccctcaccaatgctatttatagtaacaataagagctcatctttatacccaaatcttactattccaacagtatataaagagaacaataaagtattattagctgtcacagaagatggatatatttacctctttaacactgagaattgtcccaaaaccatccccaactctctagtaaatactgacaatactgatactagcaattctaacaccgatattaacactgataataccaaaaatgataatgttagcactgttaaaggcttattaactaaggtaaatcatccttattccatcgctgttttcaagtataaatcacctgtatcatgtgcttctactcacagtttaatgaaaaatcgactaattatcgcaggtccgaataatcctccggctctcattgatttattctgtgaaagagtgctatgggttgggaaatttccacatgaaactcttttaggcctccaaagcacgctgaatatcactagtctttgtattcttgatgaacttggcgatgatttaatttgtgtaggaactaaagacgcttttgtatatgtatatgatcctaacagtcagaaggatccgattttccagtttaatatctgtgatcagaggagttcagctttatcaaaacgcgctctaactcttcctgaacacgatttcaacactaaacataggaaacaattggataaggctgttaatgaaaactattcctcaaatgacagagcaattctcaaaattaccaccaatccgccctttaaactattatttaacacagaaaaaggtgatcatcgagacaacgagggtactactgaacataacaacaacattggtgaaaatggcataaataataaaaattctatcaataattctttgaatttagaagaattatttaataatattttggaaaagagatttaaattatcaaatgatgttagtattgagttgtacaactatcctaagaaagactattgcaatgtgtacattagtgataactttggcactgtttattatctccagttcctcaccaacaacaaacttattcactggatcaataataaaattaaccgaaactccagaaacggcttgaacaggacagtggaagatatggatgaaaaggagaaatttggtatagtggaacacttgttagaggctagaaagcgtctttgcacttcttgtaataatgataagcgagttcattacagacgaaatagttacaatcaaatggtgtgtaggatattaagttgttacaattaccacaacgggtcagttgtggatttaaagtgttctggcgattatttaatcactgctggcatggaccgctttactaaaatcatccatgtccccactcacaagcttgtatttcaactatattccaaccagaaacaatcctccattctgctcagaaatgattccatcatgacaaaattcaatcattccgatttcaaatccgttaaaaaaggtagcgctggcgacgccgataacacggttgatagcagtgaagttgatggcgaccatagtagtgataccgatgatatcggtgactatgatgatacggataacacagatgacggcagtgaagttgataccgatgacgcatttgatagtagtgaggttgatagtgatttggaaggagttgaagacatttaaaaacttttaatattaaataatatgatcaaacaggtttaatctatacataatattagaatacataaactgaataactaggtgataccctgaagtgtagcgaaatcattgaaaatacaaagcatttgagatcctgaattaggtaatagaaaatgcgaagtccgtgagggtcttttgaggattgaatttcctgcaaagagccgattttagaggttgtgaaggtgtaataattcccattcaacttaatctcaagttcctgtttaccaattcggtcaggatgcggccactcgttatcatcctcatgtactataccagattccactataatacgcttgaactcctccacaacttcattcaacaagtacactaaaatatatcaagaatatatgattagaaaaaaacataaggtttaattatataatcttataggtaatatgaataaaattgtgtaattaaaaccttcttttttaatcattgtgtctcgtttatagtttgaattattcgcgtatctcaatcttccattagaatccagttcaaactccagaaattcgtggccaaatttaccctcgtggccaacactacgcattggaatattaactaggtaattaaaaatcaacttactagtatctcaagtagaaatcttcctctggcattttgcgatttaaaatttataaatctactactttttataccttaccaatggggtctcgacttcatacacatatcatctactctaatatatacatagtatataacaggtatataatatgtatagtatataatatagtttataatacacaaacatataacatatttgtatggtagattaattgtgtactgtggatagccaatttggaatggaatctttaccgaaatattccgtaaagattcttttaaaaattacttccctgtttttaaaatttgtacctattttttcccaaagacccttcaacaatttcattaccaactccttatcctcctccacttcagtatcttccattttgttcaatgttagtaaatatttatcaattaatattttaactccaaactccacaacatcatcaatttcatttctaacttcttcatttctttgaagtgtaataacagaactattttctacattaccatattcgtgaatgatttttaacaaaaatgtcgtgaatgtgttaactttctttattaaatcactttgtggatcaaattgtataataatcctaccaaactcgtcgagtctatttgtataattaaacacatgatatattaaaacctctaggattattttcactatttcacacctttgttccttcaatagttttaatatgtgttcagacaaaaattcgattatcctctcatttgaaggcaaattaacataaattcttgccaaacttacatgaatttctgctaaattattgttaattttgttcaaaccattgatatttttggtagaaatattgttattttcttcagataaatttggcaaatcagttagtttatagtagaattcatagcccttttccactttacttatgaataaacatacttctaacaacacccttatatactcaaacccattattgttattggagttggtgataaaattactaactatatggtccaaattgagtggaatcggctgaaaattacccttaaatactgaaaaatcagctacattgtagttgtgtacgaaattccagtgagttgatttggggaatatttgagtgaacaaactgggagaaatgcctttaaaatataataatagaggccatacacttggtgatgattccacgtgtttgaataaattattaacaatttcacagatcatttttgccaaaacaccttttacttctgatcctccattaagtaaggggtgtgagttatcttctgaaaaattactgttgagtttaaaatgatttaaataactctttaaatggtttaaattagttaattttgagtcctgtaacaagttcaaaatactagaagtaaactcagatctgagctttaaatcccagtccacattactggtattgaaattatcaaaaagtaataaaagtatatacacaatttcagaagattttaatctggtaacgagagattccaagtgtatcagaggagccaaaagtgcgatatgttgtttatcaaactcgaataataatttaatggataattgtgcctttagtagaatcaactcggaaaataacttttcaaatgtttcctttcccttctgagtcatgtgttcaaactcttgcaaatcagcgtttaaaatcaagtaaacagttttatagtcatttttttctataaattccttattcaacactagtaatttaaatgacttcacaaccaccgatgaggttgttaaacattcaatttctgtcctgttacaatcagtttgactagtaggattaggtgaatctgaccaattttctgagttaataatgttataaagtacgttgacacagtaggaaataattgactttgactggaatcgtgtaagtttagcaagtgagtaaacacaattgaagtgtttaaatgaaataggtgtgggctgtttttccagtaaaacattcaacaatttcaaattatatccaaaagaaagtgtataggggaatttatcaattattaaacctataatgttatttatatcatcattaaactctttactatcagaggatttggaggccattacaccctgaaccaggtgcaaatacatcaattcactcaatttttcactgattttgccatcagaacaaaatgtggtcaagattgaaacgagtaaatttttagcagagtttcgtagtctagggtactctgaaaccaataatccgcaacaaacctgtaataaaccgtacaggttctcccttgcctcatcttgataacgtctaatgaactctgtaaagcccattagggcatgatttttcacattttccgaagtatgtcttgacttggcaactaattcttgaaacgttaaacggcgcgaagttacgttcacagagtccttttttacagttattgattggggcaataatttcacagttttctttaactgtttaagattagataataacttctcatcactcgatttatacctacgtaaatgagcttttcccaatttactcttcgcctctttaaaatcagaactctttgagggcttcttcttattcttggccattttattactaatcctggaagaattatttattttattacccatcctaagttatgattttatcttttaagtcattttatattttccatcatagttcaagataattttatagtattagttactggaagtgcgataatactcaaaaatatgcgataaaaataattaaacaatcggttaaaaataaattaaatttatgcaaataaaataaaaaagtattaattttaataatttgggaggaatcttcacaactcaaactcatacactattgtgctatagatgaatctatttatccagatttttaaatctttgtttcatacaaccatgtacattaattttgtatttaaaaatgttaattgatcgtaatttttaattttaaaattatcgcaaaatgttaggttataacttaatttatcaaaaagtcgatgttgctttggattttgaaaactatattctgaaaggttcaactcatttaaaactaaaatctaccctttctacgactgattctacctcagcgacacctaacctaacggaatcaagtgaatctaaccagaacgattcaaaaaagaatgtgttacttataaatttacctctaattggtaacccagtatataaacgtgttttattaaatgatgtagaagttaatcattaccttattaaaccgataactaacagtgtaaactcctctgtgcttaacagttcaataagctcagtggatttgatgagttatgagggactacactgttcagcacagtcactaaatgattctgtgatgtttgttgaagttaactctctaaaggatgaactcgaactggatatccagtttgattactatgacatgaatccaatgaatagtgaggtttatttccagaaccattggattcttcccagaggatctaccaactacaaatattacaaaatgtttcagactgacaaatttagcaagttttggtttcccacttttatcaacagtgacaactcagtgtgtactaaactggaagttaatgtaactgttcctatccaatatagtgtagtttgcggattaaaattaaaggaagatgttgaccagggaactgatttagaacatagaaatgttaataatcaacaattaaagaaaacatatcagttctactccgatgatgatcaaaccaattcagataatactgatagtagtagtgatcctggtaataaggatagtagtgatactagtggcaacaatgttaaggatactgataaaaaggataaggacactaccaatagtgttaagactgtagataataaggctaaggataaggataaaaatagtattagtcccatggtaattagtattttaagaaatagatttaataagttacctatatttgtgggtgaatttgactattgtgatggatctacagaggcaacaatgactgaaatagtaggcgatgagggtgaaacagaggaagagttggcgcaattatcaagtcatttatatgaatttaagccaggttcaaagttggtgtatgttactctgagaggctttggataccttttacatccaaccaacgtggcaacaaaattgtgcctggaaacttacagagggtattttgaacctcagcttgacattgatcagactggactgtacttattgttccttccatttggtcattttccagagaatatggatgtttcagcctgtttgaggacccagaattaccttgattttaatcgctgtagtgctttcacctcaccagaaaactatttattttgttcatttacagactcactgacccaaaattaccataatctatactacaactctgggaatattgttgcctactccctagacgtccttcactcatttggtgatttagcacaagatccaaactgcattaacaagcgtattgtgatagccaatggcttatcaaccttatatacaaggccaattaaaagtgctagtaaggagttgcacttaaatttaatgctccagagttatttggtagaccaatttgtgaagcgcaatttgggaattagtgagtttaaacttagactctggtctaaacgggaactctttgccacacttgttgaattaatcggagatttctacccactttcaagtggtcagccaaactattcctctaaaccagcgtctactgtaaacgctgttaatggagtggttaaaaataactctgacacagatcaatcacaaaagtcaacggataagatggaaatgtacgataaggatattataacagaatatatcctgatgagtgataccgtgtttttattaaagtgccaacttattccaaatgttttggaaagtattgttatgaacactaatttccttaacgagactttcatgatccactttttcaattattttttgaacagatttcctggaacgcaagttcctagtggaggagataccaaccagcagaacttggaacccaattttaataagggaatttgggagtggatattgcaggaagtgattttgagatacgtaattttttggaataataagcctcagaataggttgaataaggagaaacagttggacccaaacatgacattagaagatattttgaagaagggagttgaacatgatcagttgaatgtgtgcatgagtaacttgcaaaacttggtcagatcatttgtatatggtacagggtgtcctcagataagtatgggattaatcctacaacttcagcgcaaaggtacaagcatggaccacttgtcctttagaattgatgttaactcactacaaccgccactcgacgttaataaggaaggccaaactaagtataatcttgtgaatataacatcacagggagcgaagaatttgtttaatgtctacagttcactgctgagtttaacacactattcaggctcttcaaaccagttaaattcccttttaaacaatacacattttaataacatctattcaaaccaatttcatgatgattttgccagcccagtgaatgattccgtacttttaaataaccagcttagtggcggattggaaggtgaaaaggggttatataaaatgttattgaagatatataatgtgctaccaacgggattaagggatgacatcgtggattttggcgatttgagggataatttgggcctggtctcgtttagtgaaatagggctgttgaggaagaaaatgtgtcttttccaagcattttttgactctgtggacatgattggaagggatggaaactttgttatgggttttggttatataggaaactatccgtggaccttttgcctagggtatggcccgctttgggactgtcttgaaatgttgaaagtatcgtgtgacattaataaaatcaatgatttacttgtggataatggtacaaactactgtggaactcatattaaaactaattataaactacagtataaccctggacaattacccatcggaacctctggcggtattccatactggaaaattatcctcatacaacaatccctaatacaacaacatcaaaatgttaatcaatccagtaagcttccattattatactattattacagtattaacttagtattagtaccattagattagtattagattattattagactagtcatgtttcttttaattgaaaaattgtaaaatttttagtgttgtgtttgtcgggaggatatgccaagaagtggatgttttatttggtgagtgacatagttgaagatgacggagtacgtgaaagtgtaaggttactgggagatttagtaccagttagctacaatgttaacccgagagctaaaagaggcagaaaaaaagtagccttgaaaggaatggctgaagacctggaaaacgatatacaaactaaccctaactttaattccacactaggtattttttagatgatttagtattattttataatttaattatgggtattttatatttaatttatcttagctatagcattattttatacttaaacagtataacctacccctcaattagttatttgatggtaattgattgtttagggaataattgttatcttggaatatatagtgactgtgaccgttatctgatagagtggatgaagcacttatatatgggattacatcctgagctgactcagttggataacaggtcgatagtggctagaatttgttcaaagaacagactcccactgctctggatcagagtggactcgtcgtttagccttatggcaaggatcagacgttgtcagtctggatcaatgtgggaacagcagttatactcagataataatatttactccttgattgaggcgtcacaggctttgggaagcattggaaaatcggagtatatttcagataacccgttgattgagtcggcatgtaagagactcgataacatgattaagaaacataaatcacacccaataatcagagctaggtgtgtttactccctgatgtgtctgtacaacagagaccccagacaacataagtacttgtatggagtcttcacgaagtatttgagcagcttttctaatttagccactcacccaactgagacgaggtttattatggagtactacaaggcgctttgtctgctgagaaatgagtttggatttacacctgagttcgtgattgatattctgtccaatacgatagagaatttatcaggcccagatatgctcattcaaggcggaaatctgattgagtgtgcgtcatacctgagtttgccaactgattcatcgcatcacacaatgaaaagaaacagtgtttataatctctgggaactgctttggcacctgtttagactagatggaatcccaggtagctgttcttttggaaggcttttgactagcaaattgctggtatgtatatcaagacaggtgttatttttaacattttgtgaggccaagtttagaaatgagaaggatttaggatttgaatttgaccctatactcttcattccactgtttcaaaacgcgctacacaaagttcgctcagcatttgacctctcacaaacttataattcaaaaccagtacaacgttcagcaattcgtctgtcacttcacttattgttacagtgttcgtattcatttaaatatactcactctgataaatctaccacctccgataataacacagaggaggtggatcaggacgaggacccgttgtataccatattattgaatgaagctgtaaaggagcgcaaattggtgggtagattggagaaggttgatgttgacactagaacaatgatgttgaggaataatttagggttattggacgcagtaaaatgtgcatgtttcctgttttacgtggtacgagattttgaggtaaagcatgatgtttgggagattttctacagagttgtgtttgatacatgcctatcaaagccgataattttcatggatctatcagaaaaagtgcttgaggagtctaggaaatacttgttactcatactgaaaaaagcttcagtttctaaacagccattttacctttacctgttccccaaaatacataaactctactacactctctttggatttggaactatccttccaaatgatcccaaacctgaccagaatctcattaaccagtatgttttctgtatatcagtgtacatagtataattattagttaaatatatactactatatatagtatgctcaattgtttgtagtcgattatatcgattatccagtggattaagtatgcctaagatagcatcgttcagaagagcatatggagaaggtgagttaggatcaggagtggagtgggagaatgtggcattggaggctattagagcactgaaggagctccctcaagctcattggtttcttaaggacccggaaaaatcattcagaggatataagaccatcattaaaaacccaatttggttaaataaaatcgagcaaaaggcagtaggaaaaatatacaaaataccaatgcagtttaaagctgatatggcactcctgtttaaaaacgccaaaatgttcaataaggtggatacgctaccatataaagatgtcgttctcctggaagaacagtttgattcaatgtggccatgcatagtaaaggcatttcaaaaatcagctaaactaaattcttgacttcttttacacatttatattatactttataaataggttaaaaatgagtaaataagtgtatttgtgagtagataattgttgtataagtaaatatttgagcttgagaattcaaaaattaaattccatagctgaaatcacagttattatggataaaataatttttatcagttattaaaaaaatttattttacaataaacaattttattaataactaataatgtaaaaattagtgaaaaaacatggatttcggacgaaaaatagttatgaatggcaccatacgacaccctgataatgtgttaagaaaatggcagaaaatgtaaaatataaatggaagaaaaaaagccacaggcagagaatacagaaggttcatcctctgactactttgaaaagtcaattgcggaacatgatcagaagacgtttacacattttgactatccgttccaggaagaggaggacactgatcgctcaaatagattcagtaaattaggaaaacccttcagattcatatttccggataaatatccactatcttggttcggtttccacctgcttctcatcggaactttcttttttttcaactgtaatactccagacaaagaaaacattaatatggtatttctcccattaatttatccaattatttatctctagttcattgctacaagtttttaaaatttatttacacagtttaattaaaaatgtgtaaataggttctgggcagtgaacatgctcttggaggactcgtttctatgatttttatcttctcagctaacgctataatacacatcgcattcatgtttctcaggtttctttatactttctttatctgctttatccataatttggtatatttttaccttaattatggctgtttttatcataactagtactatttaccctaactagtttaaataacatagactaataatgagcacagatatttgttggttaattgtatactggacagattgtgctcaagaaatccgttatcatttgcgctattgaacatgctcgatccaactcttttctatactatttttgcctcattccagtcaatgctgtggcaagttctcatatacagaggttagttaacagttacacattagtggtttagaccccaataatgatagtctatactatattaatgcttttaaaaacactgaattcggagatatcttcgttttcgacaaatcttcaatggtttggatttcttacggagtttacctttacgtcattctctccataagagtatgttcataactagaaatagtttgttaaatactaatgtgttgttcagtgtttactgttatctgttataacgtttttgttcgagttgggctttttaatgagttctaacgactccatgaagaagtatttggatctctacactaggattaggaggtttaacatactatggatatcgtattctctaacaaagcctaaccttatggacctgatagagtctttaaataagtactctaggtttgaagagatgggagatttcactagaaagaaacgtaacgagaaattggaaaatgtgttcaaagacagagcacttgaagttctaaagtatttctaatcatttgatattgattttagggatcataacatgacttccgggcattttcaaaaaacagccagatcactaggttttatcatatatatatcttaaatattttacatcaaatgaacattaaatcatatttgttcctgtataattatgtgtagacttgccaactcacgtgactgaatctctgatcaacagttctagcaattcaaggttaaagaattggatgttagcttactacgtcacaaagacttccccttgcatttcacttcttcaccaggatgttgttcttaagaacgagaacatgatcaataaggtttctgaggttctttttgaccagatttacgcaaccacaaatgactacaaggatgaagataagatggatagtgagaccatggatatcaactacactgccttggtgaattctgattcatgccctgccagggatgatccaaagaaaaaagttgacattaacataactaacattgaggagatacctgctgccattataaacaccgccatagacctgactgcaaacactgctaaggaggtcaaggacacagctaaggaaatgatgggcttaaaggaagaagcccctggtcttaccagaaatgaactcaaggaacgaatctctcaagaaattaaaaaaaggaaatcctcaactgaaccaccacgtaaaccactatttataacattttatttacaaatatatactaaaacactattttatatattaatatttagaggaagaggaattgaggccttctggaagtgaggtcataaacattggaactccaacgtcaatggttgaacaacccaagcgaaggtcgactttcgcttctaaattctttaccaaagaatttaaggggttcaagaagaaggaaagaactacaagtgtttcatctgaaggcgtaactcaaatctacgacttgaggtgtgttcgggaaactcttttaagtgaggacttgaacattcaagacgttctaaacttcagaagtcctgaaatcgttgaccctaagtcttcctacgatcacaccaaaacccgcatcaagtacaaatatgacaggaccgacctcttcattagcagggaacgacttgctcttttcattcctgaggaggatctagacaagactataagtctcatagacatctctggtcacggtaggatcaattttaacatcattaaacaagctctcactaacttgttctcatcaaggaaaaagttcaaacgaaatctaaaagtattttttatatacccttatacttatttttggttaagtattatataactgaatttcactgtattttaatacaatttatacatattatggaaatctgggttaatactggatcagggacagcaaagtgtgtttagagttgtgaaacgtttaatgtcagcattttcatgggcagtgtcgtttgtaatactgtcttttatggctggagttaaggttgaggcaattgttgtatctgccgcagcgttcctgtcagctctaactgtagctctgagttacatgtacaccaactttataacttccgtaatttttgtggccttttcaaacccttacaacgtgggagacagggtcaggttagataacggagaacctctgattgttaagaagatcaggacatacacaactgagttcgtgtcaatccacggaaagattttaatttatcaaaactcgctcctctcgaccatgaaaataacaaatgagagcaggtctgagactgcaacacttgaaattatattcaagatagacgacatgacccccgacgcgacaatccaaaagttcaacaagatcatcaacacagccataaactgcagaccaaacgactttgtgaaggacagcgcaggtctcttcgggtaccactttaacccaggccactgctacgaagttgcactctggctcacctgcatcgagagttggggaaactggcaacgaatatatcaactcaggactgaagttctacagttaattgttagagtgtgtaaagagcttgggattggttacatacttccaacgcagcctctacacttcaaagattcgctggaaatcgcctccttcaaataactcatcaatttcctattatacaattatatatgtgtaacagctctttatactattatttaaattcaactatgtatactcaaagaagaagtatgaaaagttaaaaaatagttaaaaatcttgaaaatgatggtattttagtgtggaatcaaactgtaaatttgtgggttactaatagtagaatattattcattattttatcattttaactctataaaatattataaaataatttaataatatgatctcataaaataatagtgaaatagttgagattataaataaaaaatgacgttgaagaagaaaccgggcaaggaaggttccacaaagaactttatcaccagaactcaagcagttagaaggcttcaggtttctctacgtgattttcaacgcctttgtattttaaaaggagtttatccgagggacgtggcaaggggaggtacactaactagcaagggtataaataggagaaggcttaagaaggataaaatttactaccatataaatgatattagaaatctagcatctggagaattactgcccaagtttagggatataagctctcacttgaagaagttcaaaagactggttgaaaggggcgaaaaatttgacgcgaagttaaaggcacaaaccaggcccagatattccctggcgccaatagtcaaggaaagatgcccttcactagtctcagctttagaggaccttgatgatgcaatttctactatcgcagccgtctcaggtattttactcaacctttccatttatggataaatataaatttgtttgtaggattgtctggagatgagtctagaggtttaaatcctacgttagtttcaaagtgttcgactcatttgagtcactttttgaagtacgttgctgacactggatgccttaaaaagactttcatctcaattaaaggcttttattttcaagcagttatcctcaacgtcactgttacttggatacaaccacactctttttcacaggtattattaatcattttcataataatattacaatgttatattagaaactgccgtatgaagttgatttcaatgtgataagtactttcgtggagtattatttagaactagtaaagttagtgaattacaagctttacttaatgtcgaacattgaatacccgcccaaaataaggccagggtttgaagatttgggagatgagttctgttactttgaactcaaaagagtggcttcagaaccaggcctttttgcgaatctccgcttcttcatctcgagggaggttccacttacgcccaccgcacttgtggtcttaagtgcaggaggtctgttagttgactctcctaaagaagctactcacgcaattgttgacaaaccactcacaggttattaaatagaatttaacttggttatagagctcgaattctcatgtaattacgtacaacctcagtatgtatttgactgtttgaactgcaacgtcgtccttccaacatcacaatattcacttggaagcaaattaccacaccatctatcaccttttgaggtatttgataactcacttctattatatcaaatatattgtattgataaataaattattttataggatggagcatatgtgcctgatcgtaaggtggagttggagaagataataagggaggcaaccggcaaaaaaccagaagaaggtgagtgtaaataagtttaataatatttagaaggaggagataagaaaaaggatagttatattgaggatctgtcggaggagctggtaagtgaatttttcgatcaaaatttttatagaatccggaattgagaaaacttagaaggtctctgatgccgaagaaacataaaagactcctatccaaaatcgaggtaggtccaagtctgaaaaattatttttagtatgccaaggagaggaaggaagcagaagctagaaaattagcatccagaaaaaaaaattaatttattaaaacacatttttacacgctatcactttccctaccttatttagacttttctgtagtgtggattcgcccacacatttctaccgacagttccacaatatttagttatcaaaaaaatgagttcagacgaattatcgttagtgaaggaggaaaactccatgggagtttccgagactggctcccagaacccacagcgcttggaatgcctcctatccaagggtctactacagagagacttagatttattgagagaaggtacgcacaccttaatttattcacaccatatttttatatttagccggatactcaacactagaatgcgtggcatatgcacctcagaagaacttgctcgttatcaagggcctgagcgagcaaaaggtactcaagatcaaagcagcctgcagagagctctgtcacctcggattttgctcaggccaagattacctcgaagccagaggaaatttaatcaaattcaccaccggatccgcccaacttgataagcttcttcagggtggtgtcgagaccggaagcatcaccgaaattatcggtgaattcaaaaccggaaaatcacagctttgtcataccctcgctgtatattttattatacaactttaaatagctatttattctggaatgtttatttttatatgtttgaaaaacagttttaccggtaaccatgattctgtcgtaggttacgtgccaattaccagtagaacagagtggaggtgaggggaaatgtttgtgggtggattctgagggaacatttaggcctgaaagaattgtttccattgcaaaacggttcggcctctcaccctcagactgccttgataatgtcgcctatgcaagggcctataacacagaccaccagctagaattacttgtagaagccagtgccatgatggctcaaactagatttgcactcctaattgttgatagcgccacctcgctctatagatcagactactcaggcagaggtattcttctacacatttcctgacttttagtctataagcgctttaaatactaataattagtgttatatactgattatacagtgataaatagtattaaatataatagaaggctggctgatatgattataggtgaattggcaagtagacagatgcacttgtgtaagtttttgcgggcgttacagagaatcgccgatacatttggagtcgcagttgttatcacaaatcaagttgtagcaaaagttgacgcaatgtccactttcttcggtataatactattatatatagtatgagtattatagtatatattgggtatatattgaattttaggtaatgataagttaccagttggaggacacataatagcacacgcaagtcaaacaaggttattcttaaggcagtcgaaaggagaaagcaggatctgcaagatttatgactcaccagtgttgcccgaaggagaggcagttttcgccattaccgacggaggcatcaatgactatcatgatagatagattaaaaaaattaaatattttacagtttaacattttacattttaagaactattttacaatttaaaccctattttacatttctgcattaatttggtatatggaatcatcagcttttggaggtgtcttttctacttttgctgggtctaggattttcaccaggatcgtccatatctttacttctgcccttactacgtctgggtttgtcagttgagtcgtctgaggagcgtttaggtctatcagttgagtcaattgaggacctacttttacgggtctcactactgcttcgagttttgctctttctactctttgtgcgattggaattggcatcaacactgcttgaccttttagattttttggttttagtggtattttgatcaggctcgaggtaaggagattcaaatttaagaacagattctttagtatcattggaatcttcaggactaaccatgggaacgggttgtgtattgctgtcttcttgagactctaatattgttttattaacaattgagtcataggaaaaagttttttggcgattaggcctaggaacgttaccccaagtgttaatccagaagtcatcgtagtcttcaatattgcctctctttgcgacaaagtgagagtgaggattgtaaatgtgagcatttttagaaaagtgaacacttccacgaggcactggaggagctttcctgtgccctgaagcatccctagccctagatatggaagggaatgtaggctcaatggaaagagggccagttgacctttgagttacaagtgttttatctaggatatcagatttacttgcatatttcctgacttcatcagaacttaaatccagagattgggacaaattggaggaatttaataaatcagatgacctgggaacatcatcactagaagtttgttcaaaggatttagtagttgaaatgagagtagtaaacgcagaaggtttagcaggcatgaatggaattgagagaaaggggtttgtagtactagtagtcttttcaacctttctaggtttatcatcctcatcactttttcccttgttgtccttaaatctatcaaatttgacaaatctatcgccttttttaaacttgtcataaaggtcaggaaaatgactagtaaaagcatcagctcctataaaacttataaataacagaataactaaaattaatattagtcagttgtgtaaatagtgggatgtataattgtaattaaactcaccagttagattaagagcgtttttgaagtagattggattaacagggttttcgtatccgataccaagaagtttgcactggttagcaacaaacaacattaactcagtacgtagattaaatacgtccctggtgtaagaccatgtttttacacatgtggcccagatcacaaggttaatatagtgagatacttggaccttatcacagtggaagaagatactgtttgtgacaaaatctcttggtcgaccatttacaaaagtttttacgttatctcgaagcattttcatagaggcaggagtagtactcgaagacattttgaagcctatttcaacagtggcatgtttagccctggactcatttactatggccattttgctcaaaagcatgttctgatatattatctaaaaatagattagatttttcaatatatgaatgaaatatagttaatataggtgatctaactagtaaaaaacatacgtgttgaccgtatgaagatctgaactcggtgttgtatgttgtaattctcctgacatacattgattgtccagagattctgaccctgtccccgacgttataagggtttgaaatgacgacaaacataatggcagtaataaagctagtgtacatataactgagagcaacaatagttgctgaaaataaaccgatagtagatggaacaacaatattcttgttaatcttgaatgaaagcaacaaagcaacaagtgacataaaccacaaaattatacttatcaaattcccaactagctccaaaatactcctctgattctaaaacaattattaaatatttatttactaagtaatcgaatgtaaaaagggagcagatatggtcaaataactagtaggcattggtataaaaatacttttagagttgtgataagcttttttctaatcgaacacatgttgattaaggttgaggtaaagttttcaaatgagattgagccacagtttgaaatgtcgtaactgacgaaaaagtcctcgacaataaactgatctagttcagcacacataggtcttgtaatatatctatcatcttcttcttcctccttttcgttattatcagtatcctctttattggttataagagcattcatgtaatcctgctctggaagatctggagagtttatggtactcctgtacttcagaagctcaggcatcttgtacctagaatcaaaccgatacttcctagctcttttaggcctaacaaatcatacaacaaattttatattaatatttttaataaagtgttagtgggaaagtaaacttactcaaaatcacgcgttatatgtaattgatccacatgagtaacattaaaaatttggcttagtctgtgtactttatcaccaggatcaaactggtagaattcatccttttcgtcctctataaagtcatcagaatctctctgaggggctttctcctcaagaggtttaacaatggtgacaactttatcaggtcctttatggagaagattaagggtttcataaatttggtcaaaaagcagtttagaacagtagtcgattgtatctttgcaaataagctgaattgagtggtgaagaagaagtatctcaggagggttgtgaattacatagtttaaaactatccagttcacactaggtttaattgacattgaattgatccaaagctcttttaggaaatcagttccattgtaatcgttgataaccaaatcattcttcacattatgatgctgccactttgataaaattggcctaaaaagttatataaaacatcaattattaggaaaagtggaaataatatatacaaaaaagtaccggaaaattttaaaatcgtccttgtgatgttccatccacacggtgttgtaactcttccttattatagtcatgtcaatgtctagaaatttcaacattaactcatcaagctctttattccttagcgatttcttataatatacaaagtttaacctatattatacaatattatataatattatataatatattataataaatagatattaagatagtgaaataccatttaaaagtgaactttctcaaacaagataattcatttaagtaggtagttagatcagtagaatagtttgccaaaaactgcaattcaaacaggaatagaagtacagttagaataagttttcgaacagcgaataaaatatgcaagtgatatatggatttactccaactgtaacacttactatcaacccagaaactagtaggtagataataaccaaaaatctgaaaaacataagtctcaaatcccatttcagaattatctaagaaattttattagaggtttaaactcactatagataatacaccgaaggaaaacggtgtaatttgcaagggaccataagaggtaaaaaattgtaggatcaacagagtaagcgaataaaacagctccccttgaaatcttcgaaaatggctcaaacaaaaatttcataaatattaacctaaacaagtatattattagatgtgtaagtgtaaattatggttagaaactcacctaactaatagaataataactagaaaaacaatgtttataaaaaggagaagaaacgatagtttaatagtgttgatgatgagctcatactggttttcatcactatcaaaatagtcctaaaattgttaaaattagaagacaaacgtacctcaatatacgataagtgctcatatgcaatttgaatgttttcttcgggattttcaggctccttcgcggcagggaatgaaactgaaaaataaatattttattaataaagtacctgctctgaaggagagaaagaccatatagaagaataaatgcataagaacaaagttcaaaggcgtgtaatcagggataaaatcccataacatcattttaatgtcggaccatagtcctgactcaacaagagcgtcatcgtctccataatctgaaatacacattttgttcaaaattatttaaaacgttacccaaaggatttactggagcttttgactttcttttattgtatttagacttgttatcatcctctttaaaggattttaatgtactcagcgagtcctacaaaaatattgatttacacattttggaaaaatcaacttacaacagaagatctttttgtcaaaagacctttaaacttgctagaaatccttgaatccattcaatgaagaaatacatgtctgagtgagtttcttataaactgcaatggggagtatgaaactaacaaatccataatttaaggcaaaatttccattttattaacttatttttcaaatttatgaaactgtgaattattttaatttttccagttctaacttccttgactggatcaaacaccttttcgaggccaacattcctctcattaaatattaacattcacctgtaatatgatctcaaacacactcaaaaacaatggaaaatatttattttttcaaaaaagactaaattttgagctactccctgaaaaaaacaattataatgacgtgattccattcagtttcactgaaattgacagaatcgtaaaaaatcgcacaaacatccctgaaaaatcactaaaaatagacaatcaacacaagaatgttttttacacatttattaggcagacgaattccataatatattcaagtttacgcttgaaaaaaacaggttcatcggacgttaaagaagattcatcacattcctctgatatcaaagaagattcaaagagttcttcagcaattaacacaaaagaacaaattgaagatgagactatttgcgagagagttgaaaaaatccttggatatttgagtaaggagaatttgatagttgtactccaacgttctctttccgcacatttttacttaaagtcaaaatgttggcgaagactctcagcacgtgttctaaggaactgttttttgaaccaagagaagctaaatccaacagatttagttaaaattttatcctcactgagtaagtggagatttacaaatttgtcagaatttgagaaaaagctggaccttatgatactaattaacgatcattggtcactatataaagcttctcaagccttgtggagtttatctcacctaaacctgttttcactcaagtcttttcagtacctaaacgctaaaataatacaaattctacggtcaaatagtaagtaaaatatacacttttacacactctgttcatcattaaattatttttaggctcagaactggaacctaacactgatttgtatgagagtattcataggatctgctcagcaaatttgaacaagttatcaagaacaggaattgccagcccagtattatcctccataactgagtattttgggagcaacttagttgccttaaagtgtttagatactaagacaatgatgtccctaacatccctattaccatattcgtcctataatgatacattggtaacatctgtattgggggttcttttaacctcatttcacaagtttacacatgctcaggcctctcatattttgtacaacttttccataatttactcagatttgtcacctgaggcgcatcacctagtggtgaagcttctgtgtaaattcagggatttggttttatcttcagactttacctttataccctcactgatttctaagtgcctgtacaacggtatactatttttgcataatattgatttgaattttgtgtccaagtgcctctcagatttgaacgcaaatttacatctcataggtccattttcacttttcgggaatcttttatgccttaatcacatgttatctgagttctcagaacaattagaacctagagataggaaaagtatacttaatactatgaataatttaataagggttgacgatttcggaaatttgtgtaagctggacaatgaagtattaaaacctctggaagttaaactatggcatttaccagttcttaatcacattagctgtagttcaattactccaaagtttatttttaacacaatttacctaaaatttcaagagttttacgagacttgtgactcccaaaatcatatgtccgcaatgaagaactttgtcttatttttaacagtaagtttattttaactaattaattttagaactcatttggaaatcgtgagcttttagacactaactttaagaacctaacactcttgacagcgtctaaactctttgcgtgttcaacgtacgtttgcacctatttactatataatttaaatgatatatattatgattagagagaagaatgaagtattatgtgtttactgggacttaatcacctgttatttatcgtgttttgaggtacaaaaccattatttatgtttcattgtagatgcttgatgtgtttaagagagaggtcaaatttgattctttatcaacggatttctgctcaaatttcacagttttgagatgtttactcaatttattgagttgtacatttagaagagatgaaaagggtttaattagttatctagagaaattagcttatgaaaaggacaggaaccctgaaaatgatgaggttataatagtaaagttttgcctattatttagtaatttatactcaagcacacataaattgggcttaaaatttgagaatttttatacatcaaatggagcaaaggatgaagaatatgtcgagagtttagatacgggtatgagtaaagaagcactcgattatataaggaagtgtgtaaggatgccttgtaatccaattaatttgggatttttgaggactaaactgttctttttacaggatcacccaaggcaatttttaccacttctaccatcaataatcatgggagaaatgatatctacgggggaaaatagaaagacgaaagtggatatacatcaaattggaaaatggcttgaagaagttaagggctgggattgcctttcaaagagtttaaacaatagaaatattgacccatacagaggagaaagtgacgaggaagtaggagaaatggatgaaaatcatttaaacagggaaaataatatgaaaatagaatcgatgtatagtaattggaagcagagagaaatggaaatagagtatgtgttagagaaccattgtataggaccatggttatgtccatatgtaataaaggggaaggataaggggagtatcctgttaatatttccagtggattttaggaccaaaaacaggcctcatgtgtttgatactattagaagagattttttatcaaaattcgggtataatttcattgagttgtattataattaattttaaagtaattttttacaaatttttatatattttatgatgatttatgggttactgtgtagaattattggtcgttccagttaccacatagtaaccagtatatattttaatttttgtaagatatttttattctaaaacagagtaaatgagcattatttgttttttatttttacagtaaatggacgaagagtctgaagatgcccaaaacaatcctgcaaacgtgagtatgttttctgaggggaatgagtccccaaagaaagactctgaatcggacgcgatccagaattcctatgaagatcctgaggacagaggctttgatgttaaggttccatcccgaatacagaagaagaagtcgaaaaaatcactgaaaaaggcagatgaggattttgttccagcacagagtgattttagaccggatttagacgattttatagatgcagactttgaagagaaaactcagaccaagaagcctggtagaggcggtggaaagacgtattttgacgaggtaatcaagagggtcaaggacagaaagcgacacaacgtaaagttatctgacgaggagtgtcagttgcactgtagacaactagttgagaagatgatatcagcagcctcagaagacgttgagtcgcttaagaatgggaagccaggacttgccaagcttaagatgctcaattcactatcggacataaataagccttcatggcgccagtggtgtatatctgaaggcgtggcagtagctcttgctagttggcttgcaccactttcagatggttcactgcctaatctcactgttaggactaaagtactggagattgcacttcagcttcctttccagcccagtgacctcagggataacgacctcggaagagtaatcgtatcactttggaaccatcctgacgaaactgactcaaatcgcactctaatcagatcaattgttcagaaatggacacggccaatgctgggaattgctacttcctactctgaattccaagactccttcgtcgacaataaacctatcgtaacatcagattcggtctataagaaccgaaaattcgacactaaacgggttgctattactcaggaacgcatcaaaagcaagctatcacaaatgtccagaaacatagaatccaaacataaaacacctgggaaagctaccagggtcaaaatcacaggcggatcgaaataatttcatttttcactacaattgtaattttttgcaaattgttgtttttattattttaattcataaaaatttataaattgtgtaaattttatcactctgaataacacaaagttgtgttagttccctgcgttcactaagattattttatttcccaaatgccaaacttttgtattatagttttcaataattaattaattgtatcatattttaaatgtataattagtttttctttgaaataataatgtttaactttatcaagagataacattgctgtaatgagtaacatatttcccatataatgtcatttttttcaaacagttctctacaacaaaattctttttcttccttcccatcaacgcaaaatcaaaccctaagcaatgctcaaaccttttctggctttggctcttccacacccttactctcgccaccaaccaactcaattttaggtaattatatactttattatatatgcaaaattttagggagttcttttaataatactcagtcaagtacttcaatatttggccagtctcaacccagtcaatcgatatttggccaacccaagccctcaatattcggacaatctcaacagtccagtggctctatttttggtcaaaacaataactctagtggttccatattcggacaatcacaacccacgcagtcaatattcggacaaaacacacaatcgaatactggttccatttttggccaaaacaaccagactagtaattcttttttcggtcaaaccaataattctactggttcaatttttggccaaaccaataattctagtggttctatattcggtcaaacgcaacctactcaatcgatatttggtcaaaattcacaacccactcagtcaatattcggacaaaacaataattctactggttctatttttggtcaaaccaaccagactagtggttcaatatttgggcaatcacaacctactcaatcgatatttggtcaaaccaataattctactggttctatttttggacaatctcagcaaaaccaatcaatattcggccagaacacacagtcaactggttcaatcttcggtcaaaacacacaatctcaacctagacagtcaatatttggtcaaaatcagacttcaatattcaaccaaacgcagccaagtggctcaatttttgggcaaaattccatgtcaacaggtccgttgctagatcatactacagcaattaactcaacatttgacgaaaattcaataattagtgaactaacaaatagacaaaaggaatttatttatgaactttggatggaggatgcattcaaatcagaaaatttcgaggtaactctagacccactaataccacctttaggacggaaaaatcccagaattcccaccaaatgtaactcacttcgttaatttcagtttctaattcattacatataattatttgacaatgtgtaaatatttagaacgtgtaaccagtagttatgtactctatgagaggagtaattatgtatatataattaataacagtaaatagagtataataccttggttgttggaccgtatttattttctaggcttgaaattaggcttgaaaagttatcacttctccttttacggttagcctagaaactgtgaacttatgtgaaattaccataatttgagctgaaagttgtgcaaaatccctaaaaaataattaaaactattagtttacatgtcatcttcagttttttcagcctttttacaggtctttttgtatttgtttttcatggtcatgaggtgttttggctttgaagttctggtgaaatttgcggtagatttcagactctaaaacaaatttagtttagtgtaaattaccttagacttaatgttcttgttaaagaagtcaagaaatctgtctaaatcctcgacatccgataaaggtattgagaataatatattcgtcaaatctccgtcatgcctacattaaaatttaataaaataaaatattaagtacttgttatagaaatcaagaagatcttcagattcagctttacttcctttatacgttttggagaagtcgacaatgtcctcttctgttactggagtcctgtaaaactcgtaggcagctgcaaaagcagcctcctcttcaccttcccagccttaaaataacataaattatcattagacttaccaaattcatcgtagttcttgcgtttatggtcatcttttaggatttcataggcgtgtttaagctgcacaaagtgatttttagcctcctcctgtagaacaattatcagatttcctcctttaaattatagttttagtgtatgtaactagtgagaaatcttaaattaaaaagaatctatggttaaaattgttgatatgtgtaaaatgtgtatagaggaaaactagaaataatttaaactaattgtaaaaaaatacttgttgctttttacttagtccttggagtttatcaggatgagatttaagagctgcgagtctgtaggccttgacaacatcccgagtcgtggctgtttggtcaaggccaagtagaaggtaaagtttaggtgttttattttttcccatatagatcttaatatactattaacagtaatataaatggtgtatgtgtaaaatatagaatgagttacacatttggggggattccattatcccatgtcactatattagtaaatttcaggtttattattttttaattttataaagttattttatttaaatggagttggtgaataaaacttcccttttgggtatgggaactaaggtcgtagttcatcccattgttcttctctccgttgtggaccattacaacagatgtgctcagggcacttcccgtagagtcgttggtactattttaggcgaaaccatcagcggagaactccatctcacaaattcatacgccataccctttgaagaagacactaaaaacccgctcgtttggtactttgaccataattaccacgaaaacatgttcaaaatgttcaaaaaagtattttctcccattatctacacttttttcccattatctacacttttttcccattatctacacttttttcccattattctcactatttcctaattattcatgtgataatatattaatagtgataatgattagataaatgctaaggagcgtgtgcttggctggtatagtactggtccgaagtgtaaattggcagacttggaaattcatgaaatttatcgcaaatactgtccgcatccaatctacatcatcgtagacatcactcaagttaatttttacacaaattacttaacccagattcgttatttacctctaaatactctaaccttacgcataataatattctgtaataatttgtttagaaagatgaattacctattgaggcttatatatctgttgaggagcctaccagtgactctagattccgtagaacttttgtccatgttccattctcagttggtaaggaaattagtttttattcttattccaggctcttttgatgctgaggaagttggcttagaacatcttctcagagatttaaccaattcaaccacctcaactctttccaaaaaggtatccacacatctaccataccattacatattactcattattatttgtcattacttcttattatttgtcattacttcttattatttgtcattacttcttattattacatattactcattattacatattactccgtattgtaggttgagagtaagattagtgctttgagatcactagtgtctaagcttactgagatggttgattaccttggcggtgtgatttccggaacttacacgcttaatccctcaatagtatatatgctacaggtaaccaccatcacataatatttaaatattatatatactacatattttatcactaagttagtgctatatacttctgtgtcgtgagtaatattaattgtaggacatttttaacatgtttcctgcgatggacgatgaggagttaattgaggcgtttgcgattaatatgaacgacacgaccatgacgtcatacctcggaactattatcaggactatgattgcacttcataatcttataaacaacatggcagaaaataaaagaagatcacaactcaaattgtcctccacaacttaaatcttttaccaattgatcacttgtgatatagaataatattttacagttgaatttatgatttcttggattttttaagtttgttaatggtgttgagtttgttggcggcgtatttcttggcttttccagacttgaaatggccttgtctggcagtgctctggacttcacgattctggtcatccaggtccattagaggacccgaagtcatcaaagtcttcttgtccatctttaaacctattccagactcctcaagctcaccaggctcaaatttacgcctgccacgcggcccagcaaggcctacaaattaatcaaacacaccaacttttaccgtatataagtatatagtagtagtatacatataatgaagtttatgttatatagtgagaagtaagaatttacctgctagaggaacattctctgatctgagatctagaggcattttcggaatagcttgaggaaacacagcgttttcatcttctaacaataaaatatgtaaaatattattttatacctggatataaaaatttatttggttttggaactggtggtacgtatttcccttgctgaattagcctaattttcttgtaagattctactacacttggatagcactttactcctaaaaatgattagaggattttctaatttttaccttctaccactcgccgtttcgctgttctataacgccttagcgtttttgacctcagtccctttgacattatatataaactaaaaataagtacttaactatgggaacggaatctgaaaaaactcaaaatcccccaaaataaacataaaaatatacaaaaacaatcttaaaaatatacaaaaacaatcttaaaataaataataataaataaaaataaataataataaaaaaagtataaaaaagtataaaagtgaagggggaataaatttaggcacgtcgtttacgttgttgttcaacgatgtttgcgacttcgttcattttagcttttgcacgtctatgtgttcccaggcgcctcttagcgaatttaaacgctcttttactcgtggaagctgagccgattttaaccaattcaatcaagttcctctcataaggcgcgaatccgcaaacctcacgaatcacctcagacacaagagctgaacggttagtcttaaggccttttcttctacttggtctcaccgaacttgtgagcggaagcggagtcaccgtatgtcccttaagaagacccactaaaaatcataattatctacttacatacctgagactcctgatctcaattcacgcttcttcatctccttctctaccattttttatctttatctttatctttattttattgttggatttacaattttaggaattttataatttataaattatcaacggttaccaattaatctagggataaatcaggttagtgataaaattttaaaaactttatgaaattggatttttatattttatgaaaatattatttcattaaagtttaaaatgtgatttattctgttaaaaaattccatatggggacacattaagaatccgccaatctcaatccatccatagctccactctcacacattctcttcctaacacttaatcacacaactgtataaatatatatcgagttatagtaattgacattatgttacagtgtgaatcattccatttcaacatcttgtatggtacaggatagtaatttttcaatggctggtccaatttgcggatgcttatgcctctccagcaacgccctcaataacccatactcgtcctcattcaacatatctacaaacatcaatttcactaatttactaacagagtaaataatttactaaatgaataaatttgagtgggaatgagtaaataattgactaaatgagtaagaaagatggaatcagatagggataactgggttatttcaacatatcaaattatgtaacacaattttcatcatattccatctactcttagtgggttaagtatgagttaactattgagatacgttggtagtggtataggaataggtacaacgactgatgccatatgacaggcaaatgatctgggaagttgataaacctgtaaaaatattgcaaacactcgccaatcacctgataatacattattattaatattaaattattattattaattgttggattgtgaacctttgggattattaaatgaatttaataatgatttcaaggatatttttattgcaaggataaaattgatataatcgcaaccatatcagagtgatccttgcgaaaccactagttctaactatgtaaaaattaactacgtaataattaacttggtaatactaactaatacataattgtgtaaaaaagtggtgtaaattactttgcggggaagtttgtattttttttggaagagtgtggtgagtatgaagctggtgctgccaaaccatttcgggtactggcagatttgaataataaacgctgaaacgtggaaaactgggatcgatatcttcttcaacacacttccaattatcgctccctctctatacgtacatccctacattattatacgtacttcactacattattatccatactaacaaatgtcataactagtattagataattgtgagtgtatcagactggggcgatactagtggtcgtcattatgttcggactgtcagagtatcattcatcatttaggagttacttacctcttggactagtggtagtaaaatgcccttgaaccaggctgtaggcttaaacatcgccttcatcagtgactcatagtagtggtgattcaacgtcttattactcgacaaattcgccctcaccgccggtaataatatacacaagtaaaatctctcagcctatagaacgggttagttagattaatagtgtcatgagtatcacaactgtgaatacttctaactatgtaataatactgtcacaggagatgaacatacgttagattcattcatgttggaggagaagagtcgtgtgacttcgtacatggcgtttggggtccaattttgggggtttgtgagttgtatgatttcagcccagttggtcattttcggtaacactttaaacgcctttggaagtcctccgctcttatatctgctaagatataacccaatctcattgtaaaccggtctcaacctgtccatcacactttcctacaacatttttacccaaaaatagtgtaaattaccttgggtttggttgataaatcattcaatttggaccagatttcactggtgtttgacgtggtttgggattctggcaggaatcctgcggaatcctcggagaaatcaaatgaaaccaaggggtcattttccaggaaatcagttcctctcaatttcttcctattttacaaataaattattattaaatattattaaatattataattgattatgtgtaattggattagaaattactttggaatctcctcgttggcttctttgagaagttgttgtactttaaagcttacatctggaggtaattcctctgttatctcaggctcgaaatctgacaaatctgagtctatctcatttttcttgggttttttcttgaaagtttttttatttttgcgatttttgttatttttactctttttaactactttggcatttttcgccttgttattcttctctttgcttttcatatattgagatttctctcgttaaaatattttacaaaaaattaaaaaattaaacattcacattcattttatttattgtgatgtcattcagccttctaatgcttcccttaaatggggaatcatttctagatttatgtcatactcttcctctattcattcttaaaattactcaagtctcatttataacaatttattttactgtttactaatagttaattcatttttttatcaaattttttgaaaattttacttatccttcttgacacaccttcacattctcataattttctataatttttaaaaaattagacaattttaataaagttttaataaattaaaaatactttaataaattactttttaaaaaattttcttctcaaatttccttccacaactacttttacattcattctacttattactttatttttacacttattttaactcattagatatgaatactagtgttattgagttatattattacaatatttgaaatctattctaaatgtgttaagtttaatattctttaaaatggatcaaatttctcgagtttaatgttattattttattattttttagaattttgaaaatgttcacaaatttcctaattcaagcacttttacctctcgcaagtccagtattgccattttaaaggtatttatactctttacactaattttattctctttagatccctgatcctttaattaccatcaccaattataaaccttctaccactaaatgttcatgtaaattccactgttcctgtcccatttcaacttctttaaaagattttacaacaaataatcccttgaaatctgtaaatactcccttgaaatctgtaaatactcccttgaaatctgtaaataatgctttaaattataatgatttggccaccaattcagcactgccaatcaataatcaacctggtcttaatcctccacatgatgaaagtgtgactgaaacaggtgctaaaattgccgaaaatccagctaaaactggcaaaatagtacctaaaaacgctgggaaaacacctaaaacccctgtgaagaagtctcttaaacgtctaaagaagtctaaaactaagactaaaactatgcctaaaactaagactaaaactaagagtaaaactgtgcctaaaactaagagtaaaactgtgcctaaaactgtgaacgtaaaatctaaaaaatgctcaagaaagcttaaaagacttaaaaaactcaacattagccacagtaactcactaaacagcgccaattccacacaatccaacactaacactaagaatttaaacacctttaacaccgataatactctggacacccataacacactcagcagtgatgtaataagtgtgactaagagcataaagttgaaaactgataagtgtgttggtacttatgacattgaggacgtgaaccttgaccgaggcatttttaatattattttaataatttttagaagctttgaacattttagagcacttgggtgaggctgaaaatctcctaaaatttgaacgggaacgtcgtttcagtcaaattagatcagactacagcactgtcagggatagaattgaagagaaattccacctagtaatcatgtgttgccgtaaacgtcaaaatgatttaaactccaaatttcttcaagtaccaaccacactatatatcgtatcatgtgtttatgtagagactggataatgtggagaagagcctttcaagcatcaaattacccactttgaaacacattaagaaacaccttgaattttttaactaacctacactaatactgtatattgatagagtatacagtaatattgtatatagctagagtataaactaatactgtatacactaatattgtatatgtctagagtacttaacactgtatgcattagtattgtatattagaagtgtattagtggaatttgaaaatttacaaatttaaatgtgttaatgtgagtttgaatttgtccgagttgacgtactgcggccgcatccagtcgaccagcagcgacaacgtcctcggcaacaacggataatcctccaccatcacactcatactgttctcgtcctcacccatcacatactcatacacactacacacacaattaacactccacaacaatacaatgttgtaactacgtaatacaatgtggtaactacgtaatacaatgtggtaaataagtagtaaactgtgttatagtaataaatgagtagtaaactgtgttatagtaataaatgagtagtaaactgtgttatagtaataaatgagtagtaaactgtggtagaataaatgagtagtaaactgtggtagaataaatgagtagtaaactgtggtagaataaatgagtagtaaactgtggtataataatgagtaaaactgtgttatagtaataactgagtaaaactgtgttatagtaataactgagtaaaactgtgttatagtaataactgagtaaaactgtgttatagtaataactgagtaaaactgtgttatagtaataactgagtaaaactgtggtatactaataaataagtagtaaactgtggtagaataaatgggtaatctgggtgtatacctgtttaggagatggttgagtgattggtgttgtttggcgaggttgagtatccagtgcgtgacgatttgtgcttctttttcggtgttgactttggagcatttttccatgcatgcgatgatgagattcctgtacaggtcatcgagcttatcctcagacaagttcaactcctccacacgcaacgacgcctcctcctcatcatgcgataataccaattctgatactattgaattcacactcctatacatatcctccacacacccctcatccacttcttcatccacatcctcattatccacatcctccctatactcttcttcttccttgtctacactataatcatctttttctacactataatcatctttttctacactataatcatccttgtctacactgtaatcctccctatccacactatactcatcttcatccttatccacactgtaatcttccctatctacactatactcatctttgtctacactgtaatcttcatctttgtaaacttgtttatccttgtcagtatagctgtcttgatccttgtaacctctaccatccctatctctataatctctatctctatccctgtctctatctctataatctctatccctgtctctgtctctatccctgtctctatctctataatccctatccctgtctctatctctatccctatccctgtagttatcgcgatatccattttctctgaacctgtcatcatacgaatctccatctctctctctatctctgtctctatctctatctctatctctgtaatctttatagtttgtcctgtccttaaattcttgagagtctagtttgtacattttccgttcaaaggagtctctgggtctttcgcgtgttctttctttcatggagattgagttgaggttggctgaggaggaggatttgtttctgcggtttcgcatgcgccagacgtcttccttatcgcgttcggttctttcaggcttgggttgtgagaggtttaccagattcgaggctgaggagtgtttatgtctgagttcctggagcttgcagggctgttcctgtttctggtacactgacttgtcccagtggtccatcctgctgtccagcacgttcttaattaggcaccggatcctgaaggagatttcctcgttttttcccaggtcctccaggtgctggatccgcttctcaaactctgacaggtgcttccagcggttcgtgtcaaagctccttcccaccgtctgcaacagcgtgcacatggcctccaggtgattgttccccatgttcacgtcgtcgtagagtaaaatacactcctcgcgcttcaaaaacacctggtccaggcacgtaatcagcaacttcgccgccagcaacttctgcttaaacaactcgcccacaaagatcatgtttcctctcatcttgtgcttgtacttttgctcgtactcaaacctgtcatcgccctccaactccgccgggatctccaacggcttcaaattatcctcaaaactgtcctggctacaattcaacaatatacgcataaagtcactcttcctgttactcttcacatcgactacttcttccgttacggcgttaggtgcgacggtattggtagtggcaccggtactggtctgagcgccatcggcaccctgactaacttctctaccattgccattggcattaccattggaattgccattactgttaacattaccattggaatgggcattggattgatcgatggtgtagagatcgatggcgagtttggcgcagagttcgacgtacattgggatgaagtggtgttgtgtgacggccttgtcaaagacgaatttgacgagcatttcggcgtgttcgggcgtgtcaattccgcactcgatgatctggttgtaaatgatatcaaacttctcaaaagtcagtctgttcagcagtcccatgatcttcctcctcaggagcatttccttatcattcttctgcttcgcctgcttcatgacccacgagctctcacttgcaaccactggtgtgaactcactcgaggctctggaaaactccttgtgcctgtagtttgacccgaagttcttatcgtaactcttgtgcctccagtccttcttctcgttcttgtcctgcctttctctatctctgtccttgtacccctttgcagctgtagctggcacatttgcggtggtactggtggtagagtagtgaatctgaggtaatttgtatctgcgtctaatctcctccacaagcttactgttgtccaataagtacacgtaatagcccagcagtgcgtttaccgtgtaatctgagctcgttggcgatggtgctccttcagtactaacatccgtactcgcagaggcaaattgagctgaatccaccagctgggtcttagtcacatctctattcaccattgggacttctaatttcgctgaatcaacgggatccggtttaacgtctttcggaactacttcctgtttactctgtacactcggaacaacttcttgtttactctgtaaactaggagctacttccgacttactctgtaaactaggtggtacatgtaatttactagtgggatccgattttgtacctgggggttccgattttgtgggatcagattttgtaccaggggtttcggatttagtgggatcagatttaggaacattattatccaacttaacagcagcagtagtagcatgtgtatcattagttttgttaaaagaggtgcgtacgggtgttgatcttacagcttctttgaacactttagcgtatgatatttcctccttctcgctcttttcctgcactttatccacgtgcacagatttatcctgtgatttatcagtgtgaaccgatttctcaccaaccctatcaccatgtttctcaccaagtttatcagagtgtttctcaaggtgtggcttatcatcatgtttctcagactgagcggacttatctttttgagcgtttctttcttctctcatcttttcctttctcaattctctactcttggatttatgctccttttccttacttccatgaccacttccatgtgtatgtgattgagtaattccatgaccactagattgaccacttccatgtgtatgtgattgagtacttccatgactacttccctgactacctccatgagaatgcgaagttgttgtatgagaatgtgaagttgttgtatgggaatgtgacgtggttggggtatgtatgatagtggttggttgttgtctggtggttgagagtttggtgcgttcagcccaggttagctgtttactctctggttcactaactgctactgatttataatctctgttcgtatccttcgtagttgctattgataaattatccaccaaatccttaccactgtgcgctgtgccatgggcattagcgtgtgcagagtgtgaaataccatgtgtcggatgtgagatactgtgtgaagaatgtgaaataccgtgtgcagaatgtgaaatactatgcgagggatgtgaaatggtgtgtgcagaatgtgtggtgggaccattggtatgtcctggctgtgaattactgtatgaagactggctactgtgtgaactactatgagtactactgtgtgtactggtgtgtgtactggtgtgcgagttactgtgtgtcagctgtgtcggatgtgctttaggtttgggtttggctagtttcgacttgccttgtaccacgagattgtaaggcatgctgagcgtgtactcgttgtgtacgggcggtgggtacacatttctctgaattgggtaattctgggtctgtctggtgtaatcgtaggggatatattcatagggcgagttggggtacatttggccgtatggcactgtcattgggtacgtctgagaaatccacattggcacgtagggatcctggtgtgatatccgataaggcacgtggccgttcttaaatcccttcatgtctggcactcccaaaagcaacgaatcgtacgggagctgacccggcacaaactccggcgcatccgcgttcaactttcctccagtcttcaccgtcggattaaactccggcgcgtccggattcaacacgttagaatccacacgaggcttgccaacctcctgattactcaccttactcaccgtcataacataacaatttcaatacaaattttctatacaaattttgtccaaatttctgtccaaattttgtcaaattaataaatttccaattaaatgttggataaaattgataaatttccaattaaatatttgatcaaattaattaattccaattggtaaagatttcaaaaatttcaaattttttcaactttaatcaactttaaatctgtcaaaattttaaaccctttaatctttaaacccgttaaactattaaaaccttgaattattattaaatccttgaattattattaaaacagttaaattgtcgaatcccttgcttatttaacaaagccaattcatggttaaattcttaatcactgactaatagaattaataaattagtaaactcgtaaactaataaaattcgtaaaactggtgaattagtaaaatctgagtttgaaaggtctttaagagttaaaattccatgagatttgaaaggttcaaattctatccaattttcgattagggggaattgtcaaaattatgataaaataatatcaaggtgaacgattaaataggaaaaaacacgttaaaaattgcgaaaaagggttaataattaggggatggtgaaaataataatttaaagatcggggtcgtgcgcttgaagataatgaattttagagatttaaagttgccataaccgccaaactattttacagaaataacaaagaaacccggctacaacactgaaatcaaatactgaaagaagacatattaaattgcgactcttgtacggtcgagatcacttgaaatgattaaaaccaagccgaaataaaatacacccggaaaaataaaagacaaaaaacaaactaaacagcatacatacgatcactttctaacaaattatctatttaaaatgccatggaaaaaatccctttccagatggggtttcagggccttgaggtgagttccgctcaagtgacacaatactaaaacttctcacattaaattcttttacacatgttttaatcttatataaaacgccctaaaatttccagattcaccacattccgctccttctcacactaatacaacgacatcctcaaactctctcagatcactttctcattaatttttctccattttccagtccaaacccttttaatttacttctaaaattatttcttcctctcccaccccgtcccatccctcagcttgatctcctcacttttttgtgtattttcttacacatcacattgggctctaatttccattaattaccctaaattatataaattttaactttacttctaatttatttcattttccaaaataaaatgtaaatttattcctccaattttatcacagctttctcttagttaggccaagttacggtcaaataatgtataattaacataatttaagtataacatttcttatggtaatatttatatttgggcttaaaactgagtttagtttgttttaggcgtttggtgtgttttaggggccaaatgtatagatgataaggattctaatgcttctatttttaactttttccaggccttccttgagtttaattcgtttcaattcagttaaatttaaacctttaaccaaattttcaactctaggcgctaatttgaatttttttttcataccaacttgcaattccaaatttctaaactcaaattatcgaaccttttcgtaagcaaattttaattaattttactttaatttacttaatttttaattttgtagtgatttatcttgtaaattaaaggattctaataaatccgctgagctcgatccaactcgtaaatatgatcgcaactactgtaaattaatcatcaaatctggtatcttcacctcattttacctcttaattagccttattttacccttattttacctcttaattagtgttattttagtcttattttacctctattctagggttattttagccttattttagcttattttagtaataatttacccttattttagccaattttagtactaatttagacccaatttactctctaattaataccttattttcatttaactctggttaaactgtgatttaggagttggcggttctgaatcgtttgactggtgtagaatattagctgagatgtacaaaaagttcatatcaagttatgacccacctcctggtcccaatttgcccacctcgctgaggttaaaagaggttgacgtttgtcctggtacttcgggcggtttcagaagagttgagtatgacgtgattggcgactatgcatatagacttttaaagggtgaaaatggtactcacaggctcattaggaactcaccgttcaactctgaccataaacgccagactacctttgccactgtgcaggcggttcctatcctcagtgacactgacgaggaaattatcaactttaagaaaaacagacaaattttaaaaaaagacctaatcatcgaatccatgcgaagtagcggaaaaggcgggcaaaatgtcaacaaagtcgaaacggcaggtacaatcacacattttacacatcttacacatcttacactatttacactatttacactatctacagtatttacactatttacatagttagcatgttaaacggttgactgagtgatgtagtgagggtatatcataagcctacgggattatctgtgaaggtacagcaggagcgaacaaatactcagaatcgtgaaatcgccatacgaatgctcaccaaactcgttgatgaacactatttagtacccatcctatccagttcccatacttaattagtactctatctactcattcttccagttatctccactcattatattacactggtatattataattgtgttgatattgtgatagaaaaagttgaatgagaagttggatgacataaagggtgcggatttggtgggtacttggggaagtcacatcaggacttacacactaaacccggaacaaagagtcaaagatcacagaaccaattttgaaaccgccaaagccacaaacgtactcaacggtgatctactacccatcatcctcaatcttctccaacattatccactctatccacactatccacactatccacactatccacattatccacactatttacacatattacgcaatatttacacgttactaagttatatgtataattagtgtataatgtgttatactacatttggttaatggagaaggctgagttcggtgaatttgagtccttctccggtgacgtatagtgccgtgacgccgatggattcggcgtttttgcagttattcatgtcatcgtcaatcaggataatctcgtcaagactcacgttataatccgaacaaatctataaccgatgatttatctggggattaccttttttaaatgatactcctttcccaacggcatcggaccatccaaacccaatctcttatacatcgatggagaatcccaaaatctacaaacacactatttataccataattagtataatattatttatagtatagtaaatagtatagtaaatagtataaatagtgtgtaagttacctgggatagtaagcgtagacttgtttgatatcggcatcgcaatggctatatttgagtgcggctctgaccattttatcgccggagatgtacctggcgtggccttcaacgtgtacggcatcggagtaagttactataaacagtgtaatatccgagctcttcaggcgtttagccatggccatgaaatctggagtcacagactccaggactcggcggtcaacgttcgggtccagatacccacctacagaatttaaaggtgtaatttgtacctgagtgcatttgtatcatcgttgagtcgaaatcacacgcgatagccttgaaaccacattcctccaacaaagttaccaacttatcagcagactcgtcagaactcaaggaattaaacaaaccctgagatatatactccctcatacatctctcaaaccttttcatcacaatagatttttcacagaattttacagaattttttatagtttacggaattttttgtagtttccagatccaattttccggaattcttatgattttcagatcctaaatattgccttaattgtttaattttcttaattctttaatttccttgattatttaatttttaattcttcaacaattgaaaaataatacaaatttttgaaattgttagactttacatgaggaattgatagtttaagaaatttctaaaattttaagagcttcaggtaattgccggaattccaaaaaatacaactattctcccaaattacaacctacaccaattcacaaattatacaatctgtacaacgtaacaaaataatttaaaaatatttaaaaaataatttaaatatgattaaaaaataattaaaaaaatttgagaattttaaaaaataatgtaaaaaaattttgacaggtgtaaaattaaaattttaacatttgagagccacatcatccagaatcccattgggcctcaataatccaatcataaccaattactttacaatcctctcaacacataacattaccatttactcatcaacttttcacatctcatacggttcctcggggattctccagttcctcggttggttcgtatgattattcgggaagatcgagaaggtgttcaagttgttctttttcgagttcggagtccattgaagatgttaatcccatcaaaccatccaactccatcatcacctaacataaatcactcaaactaagcttaactatactattatttatactattgtatatatctaagtagctccctctaggggtatatatagtaagatagctccctctcggggtatatagttatgtagctccctctcccttatatagtttgctccctctgggggtatatagttatgtagctccctctaggggtatatagttaagtagtggttacttcttgtttatatttgtctgtgatgttatcttgtgtgtttgttcttgagatgttgaattcgttatgtttgtgtttgtgtagtttgcgtatggctcttcggagtttgagtgctgacattgcgatgttctccagcggatgatccagtaacatttcacacgttttcattatgtttgaacttgaaatcatctcacacgttactccagagtcacgcgacaccctcactctattcgttaacatctgtatcgcccccagtaacttattatactccttcttctcctattatttatattattaactatagaaattgtataactatattaattgtatatagaaattgagaaaagtattgagaatactttggtgatgtgattgttgatgaggtttgcgagtttgaggaactcgttgtatcggtcagtgtcagcggttgatttggctggttgggtcggctttggaatgtccacactgttctcggggatgttcacagtgttaacaatgttaaccatgttgatactgttgccagtgttgacagtgtttggtgacctgttattgataattttctgcattagctggttcaaatcaccgagcctcgccatagtctcagttggcttcacaggcctcaaaggctcactaaacacatacggcttactctcacacatcacactcctcaaaccctgcaatacattctcccatccggtcacattgttcacactgttcaacgtattatttgctgtgttcaaactattgtttgcactatttacagtggtattagaattggttttgtgtgagtttatggcgttagtgtgagaattggatgtgacttgtgatttgtttgaggcttgggttttgggtcgtttattgagattattaagtttattagagttttgtttgggattgagttggttttggttattgagttggttttggttattgagtttgagtttgggtttgttgaacttgagatgatatttgcagtattcgccttggttgtggatgtagacaacattcttacacgactcgcccttgacagttacagccttacactgctccaaaccgtccaactcaccaatcaccaacacgtcatccagcctacattacacaagtaaactaagtaatatttaggctaaaataaagctattttaggggtaaaatagagataaaataagcctaaaataaggctaaaatagtactaattaaggccaaaaatgagtaaaatttagggtaaaataaccctaattaagcccaaattaagtaaaaataaagcctaaaataaccacaaaatacgactaaaataaggctaaatagtggtaaaaagaggtaaaataaaggcaaaaataagataaatagttgtgtacctgttgacattgatggctttgatatcggcttggatggtttgttgtttgatgtctgggttcagaatagcgcagacggtgcctacgactacgttttggagttgtgcgccgaggtcacttcggattaaaatcttaatatttgctccctggaggtctgagccgatccacgtagtgataatattcttgtcagccacgcgtgccgtacggttagtcactgtgaaaataagcgccaagtcaacgttattcgccaggcccagcagcttcctacactgcatcgtgtccttcgtatccaacacatcacgcaccgaagcaaacaccgtcgtactatccgacaatatcatcgatatgctctcctcctcaattatccaccttctaaccacaacattattaatcgaacaattcattaattcaatcaatttagctaatttaaataatttagttaatttagttaagttaatttagttaagttaatttagttaagttaattaatggtatgggtggaacttgaggatgagatgtatgttattggcgatgatgccgttgttgtataatcgtgttttccctaaggggcgtaattttacggtcaaattaccttcatttgcggtcattttaaactactggaaatgtgtaaatcagctccataccaatgtaaatcagctccataccagtggacaattcaatagtaaaaattaaaataaataattttgttaatgaaatatttgataaagttaaaattactttacaatatgcaagagattccagaaaacaacacacgtgacggcggtgtccagtaaatcactggatataccacaccttaacctaccaagtatgtcatgtaaaagcgtaaataaaaacacacaagaaattaaaataattaatatgaaaaataaataataaatttcagttcctgatattagtcaccatttaatttaatttcacgtcaaattaataaaattccgtaaaaaaaaataaattaatttaaattaaatatttagccagggtgtaaattatttaggcagtattccagccgcagtgtgaccaaacagctacaaacacgaatttacgttctaaaattaattaattaattattataattttaaattattaatttaatttttttgaagttaatttttaaaattgagattttcagattcttttatctttattgtgcagaaatgtcaattgtttgattgcttttttcactttattttatcttttagtaaagtcaaatttatcatttttaacagtaaaattttaccctttatttcactcaatgcgctcgtgtgtattacttttaaccaacaaattcatttttaatcgaaaattttatttttagaattttaaattcatttttaacttttaaattcatttttgggattttaaattttatttttttcgtgtaaaattttttgtctcaattttcactcaattctgtaaattatcctcccttacacatttcttacacatttttacacatttgttaaattttcagtaaaaaatgattttaacgtagttttaccaattcctaacacattcttacacttttttacacatttctcaaatttttgtaaattattccgaaacattaataaaataatgaaaaaaaggtaaataatagtatggacagggataatactgtgttgttatcattgcatgtgaggaaattaaccttgaagtcttgggtcacaaagtacctcgactccgtaccactcaaactcaaatggcatctcacaactgataacactgagtcgcacagttcacccgatgtgtctggacttcgaaactgggagtctgaaacatttaaacttgacgggaaccaggccttaaatgtcgatactttattcctcctcgctcaaacttccacagacactaacactataaatagtataaatagtgtaaatagtgtaaatagtgtaaataatgttaacagtgtaaatagtgtaaaaggggtgagattaagaagtgtgagattgagtgtgtcgctgtgtatagataatagttctaatgtgttggttggtgtgtcgagtgagaatttacggaatttgaaggtgagttcgaagtttaaccctctttcatttgagctgatgagtgagaataatattttcgtgggctacgttgacgtgttttacgtctcacaacagcgctgggttagaattaacaaggcatcactgcccatcagtaataaggacactgactacaacacctcgccagagtctaatattaataccgaagatgacgatgatactactctctcgtgctcctcacacatcaactccgagttctcccactccaattcctattctaaccacggtgataattctaaccacggtgataattctaaatcaggtgataattctaaatcaggtgatagttcatcatgttctggagtttgtgagtatgtattgatattttggaattcggcgaaaacgtgttttgtgcgtggtaatgtgagtgatattcagttgcagttgctgcggatgtttatcaaaacctgtttaattgacggggattcgccaaattcacaaataccttttgaacttgaagatattaaacccgatcatccctttgacattattcacaaatttgacaccctagccgtcaagaaaatctcacacaaacacgccaaacagattttcaacactcatgaatccacgcccacatccaatgacattggtgacagagataatagtgtttacagggttgacactgaggacagagttgaaagtgtggatagtagtaattttgagatagtgcatagtggtagggtgtatagtggttctgtgccggcgactgagcgtttggtgagaaacgttgacatgaatgacccggcgtcgttttataatttcatttcacggcagaataaacaatttcaaactctcatcaccaaacgacttttatctcccaattcctccaccaacacaagctctctcattgatacactaactccaaatactagtcacacagttaacaaaagtcacacattaaaaggtaacacattaaaaggtaacacattaaaaggtaatagggtagaaaatgtgaagagtaagaatgaggaggtgaaatataatgcgttaccgcagtatgtgaaatcgatagatactgtggcatcactgaatgacataacgcataaaactattaacacaatgaccacagggctggtgtcgtataggaatcaaagtcaagccatagacgaagaagccttaaccattaccacactttacacacattcctatcccaaccagactaatactttgcacagcctggcagatcccgtggaacacatcagtgtggatcaacatctggaacaacatgatctgggccatcctggtgtatcacaggatacgccagaaataccacagccagaaaatgctaatgcaatagaaaatgtgttggaggagtcaaatattaccctaaaggccgattgccctgagataaaggctgaagtgcatgccttgacttctaaaagctcaattacggtctatagtatctacagccccaaggattatcttgataacttctccgatctcacaagctcatcccaactctccagctcattcacctccatcaccaactcacccaccaatcattctatcaacgtcaaccatgacactgtcaaccataacattgttgaccatgctgacactgtaggtatggtgaacacagttggtaaggatatctcagttggtaaggtgaacaaggtaagtatgagtaagatgagtagaattgataattatttgaaccatgtggagaatgcgtattatagtcctgatccggagtatgattccgtgaatatattatcaaattacgcctgtggagttaagttggaggttaatagagcactattttgtgagaacactctgctcacatttgagactataactaaggatttacagacgattggcgagttaaaatccagcgctgatcctgagctgggctcatttgacagtcttttaatcttcaaggctttgagggatgctcaggtcctaaaggtccaaggccagacattaccaacctcggcgtatctcagatttttcctaaagtacctccggtgttataatatgaaacgtgtgccaattgtggtttacttgcagattattacgtttaagcagttggagactatgaagagactttgcagcagttctgacgatattctgcagtttattaacattgcgcttgaggctttaatttatgaacttcaagtctccactaacctctacaaacagccggaaaatgagtttttatccaacttcagccagctcaataaatttccagatttctatgacgagtctagcgtgctctcgggtgaccaatttgagatttttgagagcattttagacgaaatgagtaaagatgtgaagatggtaaatactcgaaatcttgtctacatttcaaggctaaattctcctcccgtaaagtctcgaggttgcatcttcagactcgcaccgcttaaaattgttctctatcgcaccttctgtgggcgcaggaaactcatctcaaacggacacataatcaaaatttaatctatttattatatattaatattagattattgctgcgtctggttagtgttattgatcttgttgaagttgatactttagagaaggtttagagtggaacttcacggtaattatcttttttgttttaaagaaataagtgaatgataagggtttctggtctccttcagtgtatttccacacgactctgttattatgtctaagttcagtacaaattatgtcatcgttaactacgtatctaaatccagttgtttcaaatgtctgaactctgtactctagaggattgagttttacagtttctccttgttgattagttttgtgtagagtaatttcaggaggaatttcgatggtttttacaatagaattaaaattttttacgatagaatttccattttttagaatagaatttcgtaatttcagcttggtaaaagcaattttatcctcgaaaataacctcgatcctccctgttgtttgactataaacgacatagagtgggttttctttagttctacaactccaaattactttctcaccgaatttaacaagagtacaagtttcagttctgagagtgtaaataaacccaacacatccttgcaaaaacaactgtacagtataatcatcaggactgagcggtgtagtgtttcccatagcatcttgagtgagtagtgttatcggaggcatctcatagtgttcagtagtaaactcagctccttccgtatggtaaacagtaaatttgccctcaaaaaaaagtgttaaacgggtacacccgtgggaataacacacaatacgcttgggagagggttggcctgaatcacgcctccaaatgatctcctcatagtacttgataaggtcaatcctttcccaagagttaggctcattttgatagtcaagcgtgtatgtattattaacactgttcgatttcttcaggctggggatgtaaattggtatgaatccgcccatatccgcagcgtaatgtcttaaataccaaggcttttgagtaatgccattccattcattattaacttttgtgaacttggttaggacgctagtgtctatcaatacactgccgtcagccacactgtacaccaaagtcttgacgaagttttttcttacaatactgagattcaccaaggtctcaaacccgaactttaccatcacacactctacaccctcgtttattctaaataccaattgtattcctccaacagtactaaggtgaatagtatattggtcaccggatagttgttcaaacttgcgaagcgtaactctgtagtacagtgttatcggaggaatctcatactctttcttagtccacttaccatcttctagtttatacacagtgaatttagtttctgttcccaaaacaataatcttatcctttttgtacaagtcaattgatttaagaagttggtctcctgagatatcaccgagaaaactctcactcagaaactctatattgagcttataattacgattatcaccatttgcagtcatattatacccattacacagtataatattatgccagttttcccgaaacagtcttagtatgttccagtcactctttcccagtacgtcaattctaataacaatattaggtaaattataactttctaatgtcatttcttgacttattgaacaattttcagattgctgctctataggctcaatcctgggtggttcagtttcctcaggcttcctgaggcttgtggagccaccgtcaacctcccctataccgggctctataacagttttagccatttttgacttccttttacacactcttttagcctctctaactattctcttacccttttgaattcttctctttagagacacgggacgctcaattacaccagcatcgacctgaggattctccaaatctaacctctccatcctcaatttagagaacataagatacatctgattatatcttaggtgaaacgctaaatattttggaaattctttagcattagacggcattgtccagcataatctaccgtcaaaccagaccttcctacacttaaacttaaactcagttatgacaatcaattcatacaattctacgtcacactggaggtaattataatctctgtcatcaatatctgtgaaaagtaatttggcaatgtcatatctgaggtgagtgacactgtaccattgctcgtgtaaaccatttttccttattacaaatggcttaccatttctcaggatggcaagaaattgcggatatccaaactgaatcacttgccagtacatttttaacaatatttttactaaacttggtgagtgtcgtcaggacacaccaacttgactggccaatcacatccacgagtaacaataccaactcatagtaacatttacacgagttaatttagtgttagaagatgtaattgatggataattgagtgaaattatgaataatgcagggagtgcgtggtgatgtgtcggagtcaccggacctacacactcggaaacatattttcaaactattaacaaacaatttaacacattaaaaagctcaacttttaccttaacttccaataactttaacaattttaaacccatttgatagcgtaaaatttatatttctgtgtgtaaaatggagttgacgcaactgatactacttcttttgtgtgtaagtaaataattactttattaattattataacaggtgataggccggggatttacggtggacaacgggtttccgaacccgaaactgatggaatatgagcctaacttatcacctgtgccactggacgtagcacttgaaaattcaacaaacgagtttgaacatttggacaggggaaactctgaggaatacatagcaaaggatggatttgccttttatataatcctacaagtgcaagcattcggcccaaatcgtgagtccatttacagagccaataacatttttgaatctgttacaagggttataaagtacacattctgccgtgagatcacagctgtctcactattcttagtcaacggcaatttcaagagatttgagaaaattgatcaacagtggaaagaaattaagaatctaacagttgacataagtaattacaagaatgttgacacggcaaaatatgttgtacaacgttcacgcagccatgaacaaggggaaaatggtcaagaattagtaaaaagattcattgattttaaaactgtcacagtacttctattcaacaaagttattgaaaccaatcctgacacgggtgtggttgaggtaatttgggaaactcaggacacactgtacacagcgtttgaaatctcagtgtgtacatattccaacatgaaatactttgcaatattacataaaaactacaattacacattgtttatctgggatactaatggtcaaaaatgggaaaatatcacagaatcaaggctaaatttgagggaactaaaattctattttgacgatgaaactgacgtaaaatctatagaacaactgagtaaaagttatgttgtgtatttaaatcagtttaaatacgtaattgactttcattttgatgaaaaactgagggaaagatttgggtacagactggctaggaatttgcagtacaatcttctggaaaatactatccagatccagtttgaaagtgcgataaaagtaactttagagccaaatattaaacttattaagctctggaataataaattcgagcctgttgtcagacgtgtgatctctggtttaatgagcagaagaccataccgcaagactccagaatactttgaatacgttaataatattaatatcctaaaggattctgatgttaataaggaatttgttgacacatcagttacttttctactacccgtctgccaatctgacaatgaaagtgatacttacactgaggaatctaccggagccactgatcctgaaaatgagaaatctgatccagacagtcaggaatccgatccacaaaatgaggaatcagatgaccagattgatgaatcggatgaatatgtggaggaaagtgatgggcagacgtgtgaggaatcggaaggaatatcaagtgaatcagaagatgacggtgaacggtctataggcttggatattacacagagaaaatcaaaaagaggctttgtataccaaaaaactgatcaattcatagaatttatctgccgttgcggacatggtatcgtaactatcttcgaatccactcccaataacacagataaagccgctgataccacagatattactgctgacaccacagataaagctgccgatagtaaggatcaaagctctaagactggaggtgaaaatctcaaaaccgcagagggagcgactggtactacggatgaatcttctggtactgcaggagcatcaagttctccggatgaaacgctaaatgccatagatgaagcgcttgattctctagatgacagtctcaataccatagatgaaacacttgtttctctagatgaacctgttaatactatagatgtgacaactaataccatagatgaaccagttaatactagggataaaaagcttggttatctggataaaaaggggaattatttgctcaaaaaacggagtctaaaggatgaaaaaaaggattttctagataaaaaatgcaattatctagataaagcctccaagcctccatataaaaaagaaaatagtccagacaaaacctctaatacagcaagtgaacctcctactactacggataataaatctactactgttgacaaaaccgctgctactacggataataaacctactactgtagataataaacctgataccgtggataataagcctagtcctaaggctaaaaagcttaaaactgtggataaaaagcttgatgatgtggataagaaggtgatttggtcaactataaactatggcgatcctgtgttgagagtggtaatatttgagggttctgacacgaaatatcttttgggccagaaggatgattattcatttcacttctttacttggacggctgattgtagttggtctgatatgactgagaaaagggtgaatttggacaacttgaagatgcttgacagggatggccacgagattagatatccaaatattattgctcattttaccaattttcagctatacattaagcccagtattccatgtcataagataatgtataaaaatcaggaagtctgggaatctaaagagaagggcgtgttatcagacctgtacgaaatattaattaaagtacttgaaaatgaagttactttgcactttaagaacaattttgccaagagattcgatctcttcaatgaccaactggtccttttctcacaaggaacttcactctgtaaatatcactaatctcaactctcaacactatacacatacttacatacacagtatatattacacagtatatattatacagtatatatacacagtatatatcatatagtatatatggtatagtatatcaagtatggtacattatatattgtatggaatatatgataaatgtgtaaagtgttagtgggtattaatttgttctatggtgaaattttcgtctgtgaatatctttgcgaatctttcatcctccagtgccgacttcgccatcatcgccatctccctctccttcttactcatcttctacaattcacagtaactcatgtaaatactatactatctactactatattatctacaactatataatgtaaaataggattgtgtaatctataatgggaatgtgtagtgttactgtttgtgagatttgtgatttgttgagtaatttttgtgcgaattcttggttaactttgactggtttttgtcttattgggactctcatttgtctctttgactcaatcctctcctgcaacttcttactcctgtactcctcataatcaaactcattcacactctaaacatcattacacactagtaccacaagtaaactacgtataacacagtagactacgtaaattagctaagaaaatgtgtaatagtatgatagagttgagaactttgagtttgtggtagagtttcgattgtatgaagaacccgtgcatgtaatctttgactaagttggttccgatgaggtctgatgctgagagttcgtcgagttgttccttggttacaaatacaaactcgtcataaatctgctgcttcggtatcactcccgtatttgttgcattcggcacctccatctcctcagttatattctccaaaaatgtacaccatctatacacagagttatgtgttataaagtgtcaattgtataactatacaagtgtataaattgtgtgaatatataactatataacttggttgactgtgataatacgttggagcgggtccgatgtgtggtatgaagtaggtcccgactctggtttgatctcctacgatgaagcagattccggtgtctggatagaaggagaacccgttgatgttagtaaaagtttgcttctcatttaagccttcaattgatgcgacaaacgcgccagtgtccatcgaatgcacacgcacactcctactatcacaaaaaccaatcaacgcattctcaccaatttctacattacattatgcagtaatttgccccgcaggggctaaataacatatccaaacggataaatagggataaatagggataaataggaattagtaggggatagtgggattaataggggatagagggattaggaagatgagtaactggaacccgggcgggagcaagcaccgtaacgtaccaacagaataatgattgattgagttaatgaattgtagtgatttgattgttaatttggagattgaattgtattcccaaagcggcttagaatttcttatatcaaacaacttcacaccaccaaactcagtaccaaccaccaccttcaacccattcacagaataaccacaacacgtcactctatcacattatcacactatttactatttactctattaactattaactgagtaataatattaactgagtaaaaatattaaatatgtaatgagtgagtactgttcattggtgtttgtgagatgtagtgatgagactggtgagttagtgcgtaggtcccagttttctaaaactccgcagctacaaatgatgagataatattaccaaaccctccggctgagattagtggcaggattggattctcacacacacagttcagcactccagatttcgactccaacggcgcctcaaacactccacgctccacattcaccctatacattattatatttaacaatatcatagtattatcatgggaataataatagtatgggaatagtatggaaataataatagtatgggaatagtatggaaataataatagtatgggaatagtatggaaataataatagtatgggaatagtatggaaatagtgttggatatggtgttacttgtagatatggttggaagtggtggtggttatgacagtggcgtaatctgatacataaatcatatccgttccctctctaggcactcttatctacacaatcatcaactctaactattaaccatattaactatgttaactgtaaaaatgtgtaaataagacacgttagtgtgtaaataagacacagaaatgtgtaaaatactataaaaagtgtgtaagaatgtgtaaaaatgtgtaaaatactataaaaaatgtgtaaaaaagtactttatggtgtgtaccgccacggttatgaaattcaatatatctttgatggcataggaaggccaatttagtataatccgaggccaggaaacaggttttaatgacctcattgtcaatcccacgacggtgcttcaaacataactcaaccgtatcataaattccaatctacacaatacacatcaccatcaactcattgtactactgttaactcattgtactactgttaactcattgtactactgttaactgtagaactgtgtaaataaggtataaaaatgtgtgagaggtacttgagggggataagttcctgtggcgatgatgtagcgtaaatcgggggaaatggtaacagtgttacaacattgcggaaactccaaatcatgaatcaactcaatcctatgctcatattccacatcacccctaaaattatcatcattatcaaattattattaaattattattattattgtaaaattgtaattgtacttgagtttggatttattttttaaggcttctagagcgaattgcggtatggatttaccagaagacagcgaatacacctgaaatacacaattataactttataactaagtaaaaaataccttcaaaccattagaattaaatgatctcaacattatcccattctcaatatatttcacattatttcacattatttcacaatatattacagaataattaattattttacataattatttaattaaaataaataatttaggataaatttggtaaatttggagatgaatttgggtaataaaagtcaatgtgcggtactaaataagatcttaaattaaaaaccttatttaattattaatttatttatttataataattttatattaattttgttatattttgttatattttgtaattttccaaatttttcaaaattttcacaatatcaacgttattccatgttaattccttaattactgtgttattttattaactacacttgagaatattaaaagtgttaaggcggatgtcagagtttgttcatgacgaggaaggttactgcggcattacgtttgaagatttggccgagttatgcccaaatcttcacggcgccgacttggatcttcatacgacatctcaatccacaaacatacccccgagatacctccttcctcctcccaactccacacccttcctcctgaacttacacagaattgctctcaaatgtcttggaaattttaaccctagggataattttaaccctagggaacttgctaattctagggataactttaatcctaaggataattctaattctagggagaattataatcttcgtgggcgtcgtctgttctggttgcatttgctgggggttcacagtgggagcacgtttaaagagtttgctgatcaaataatttcgagtagaaacgagtactggcaaaaggttaagaagtttgacaggaaaaactccattcaaatccagcagttggatcctcagatattccaccctttggctcctgcggagactaacccctggtccttgagtcagaaatccaaagagctaatggctgaaatttggcaggacattcagagaacttaccaggaacgcgcactgtttcagagggactcagtcagaaaatcactccagagaattctctttgtctggagcatggaacatcactacatatcctacaaacaaggaatgaacgaacttctcgccatcatctacatcacttgctacagagatcagtacaatcctctacacagtgtggacactcttaatagtgtgaagaatgtggatagtgtaaatagtgtacatagtgtggaagaggaggagaatgagttggaggacctgtgtaaaaaggtgtttagtggagttgaggaggatgttgagtcagattcgtatgtgttgtttaatgcgttgatgtgtaaggagttgcagatgttatatgacgccaacgccgtggactatttttacactagcccgggtaaactcaatcccctaatcaacagatgtaatcatatctacaatctgctcaaggtattcctttacggtgcttgcatccctcacaccatttactcatctccttaccttatcttctggactacttatctttctcctcttcttagttatcttctccttagtttcttagttatcttcttaccttatctccttaccttatcttctccttagtttcttagttatctcctggagtactattttcctgtatatttatccctacggggtttaagttccctgattaactactattaatataggagtgtgacaacaagttgtatatgcacttgaagagtttggacctggagccacatctattcctgatgtaactctttactttgtaaattaatctgtaggagatggattcggttattgtttagtagagaatttaacgttaacgagactctcaatctctgggactttcttctctcaggtatacattcacactttagtgttatttccaccatatttacccgtaatatgattagactactattttgagcggctgaatcgtgaatctgcgggaactgtcccagacaacaattgcgtttttgatatcatcaactacttctccgtcaccatgatcatcttcctcaaatcataccgtaacccctacttactcagttacccactcagtcactagttattaattagttattatagttgttatatagttattggtatatagtagttagagaattgtagtgttggagagtgatttgaatggatgtttgcggaggttgtttaagtatccgccaattgaggatatctcactactcaccaccaaggctctaaatctcaaatatcacaacattaacactatagacagtgccaaagatagtgataacacaggtaacaccataactactactatacactattatacacaatatacatagtaatatacaataatatacatagtaatatacaataatatacatagtaatatgagaatatatgcctaagagtactgctatactgcagctaatactatagtcatactgtagacagtattctagctaatactatattcttaactatactatacctaatatccttaactacctaatactatactatagtaaatactatactatactatttactatactttacctattactatactatagtaaatactatacctaaagcttaactatattatatactactaatactttatacctatactatacctagtactataccatagataatacctaaacccagacagctaatacctaatccctaatactatacctattactctactatagtaaatactatactcttaagtatactatagtaaatactctacctaatatccttaactacttattactctatatagtattctagataatactacacctttacagtagatactactctagtccttactctagccaggaatcacccagtgttctagacaatactatacccataactataatcagtactacacctaaatccttaactacctaataatatacctaataatatgccctgtaatctagctaatatccttaactacctattactatacccagtactcattactatagataatactatagttaatactatataatagtatatataatagtatagataatactatagctaatactgtggatattgctaatgttaaatgagtagttggcttggggttggatgagtttgtggatgtgtacgagtttgaccaggctgaggggtacagctccagtaccagtgacgagtcaccgaaatccgtggtaataaaactcttagacgactccacggtcgttgagacgccaaacagctcagagtctgaaaccttcacctccaatctcacacgccaacaactaggaacacaactacatcacatcgcaacacaattacaacgaatacaaaaaaggtaatatcacgaatgtgtaaattattgtagagactcatcgggagaagaaataaataacatacgattacaattactaaaaatcatctcagactttaatctcaccaattaatttatttttacacattttgacaaatatttaatatttttattttgtcaaatatttaatatatttccaactatttaatattatattgtgccggcagtgttaaattgtgtagttcaaattgtatagttgaaattctgtagatgaaaattttacgagagaaataagtaatttagggtaaaaatgttagatgttaattctgtgtaaatttgtggaattgctgttgttttttgtgtttattggaatttttgctgaaacttctgaattctcccttgacaagtcagaattagacttgaaattatctctgagaatattaaaggctgggaatcttgactcggaacccgtaaaacgaggcaccaaaatccaactcaaaatcaagtcattctcacctcaactcaacccccaaatcacttccgaaatcacacaaacattcatcgtatccactgttaaaccacattttaccactcttaaaccttattttaccaccttaattacacattttcccattctaatcacacagttattgagttatttattgagttattgagttatttattgagttattgagttatttattgagttattgagttatttattgagttattgagttatttagttggttaatagtgttaatgtttgataggttggagagcatagtatagagccgttgaatgaggcgttgttggacatgagaataggtgaaatacggtaaaaaatacttactgaactttgttattcaggagacttggagttccaatcgcttcttacgggaaaattttctatgaattcgcacttctcaataccatcccacatcaggaattttaacacacaattacatttctaaggtattttcactattttttactattttttggtattttttagtattttctgctagttctagcagtagttaacaggtcccaaagggtccaatttgacccctcaaacacaccctaaaacactaaatttactcctaattaacctgtaaaacagctaatttacccctaattaactcctaatttaccactaattaactcctaatttgcccgtaaaacagctaaataacccctaattaacctgtaatttaactgtaaaaaagtgtttagtgttaggatggatttggagtttgatttgcaggatttgcagagtcgttcgttgtgtgagatgttgcgtttgtctgacgacgacgagggtaagagtttgaagacctggaaagtgctaatctacgacgacgagtcacgtaggattattagtccaattttacgtatcggtgaactcaggcgtcagggtgtgacgctaaaccttaacctctcagaccgtcgtgaacccctgccaggcgttgacgccgtgtacttagtcacacccaccgaggacaatgtgaacttaatattatccgacgccagggaaaaaaagtattccagagtgcatttgaactttacgacttatacttctgatgtgtttctgagtgattttgcacgtagatttgcagagataaatgcgttcaattctgtagcctctgttactgaccgttatttacactttatttccctgtctccagtcactttttcactaaacttaccctcagctttcagaactttttacggtgaaactgctgaggaactgagtaactctgtgttagaaactgttgtggacaggttactgtcagtattggtaacgtcaggtgcactcccgtatgtccgtgcgccacgcacgaattcacctgcaaacaccgtggcacagcggttatgtactaagttacacgagcttgtgagttctagaaatgcactaggaccaacttataacagaccactttgtattattttggacaggactgtagacctgagcaccatgatccagcatagctggaactaccagccactgctacatgatctcttcggaattgataataacaaagttgcgattccaggactgaggaaatcatttgacctggaaaatagtgataagatttatcaagccatactctcactaccactctccgatgtcgccatgtacatctctaactcactcgaatactataactcacaaatcacacaaattaataaatgtaactccttaccctagttaaccatttaccctagttaaccatttaccctagttaaccttttaccctagttaaccactcacagtagttaacactttacaatagataaaatatgagaataatttgttaattggttaagttatgatgtttgatgtgtgtagcggatgacagtggtaatttggtgaatgcgataaatgcgataccgcagttgacggagcagaagcgtttgttggacatgcacacgaatatagcaacgacgttggtcgacacggtcaaacaacgtgaaattgatcgtttctacgagtttgaatatgatcttgacatcatgtacgataaaaactccctacaagcctttgaagatttgataaataatcacaacgcaacacccatggataaatatcgatcactactcatactcaacatctcaaaacgtaatttaaccctaaatttgtcagaatttagcactaatttatccaaaatttacccctagatattccctaaaataccctaaatttgcccctagatatgtcctagataacttatgtaaatacttaatcatttagcgcatatgagtgatgagataatgaacgattatgaggaacggataaagaaaagtggtttaaagtgtgagggtttaaggggtttaagaagtctaatgcgcatgcaagatttcagctccaacctcatgaaacacattcaatccgccgttaatcaatctgtaaagaaccaatctcccaatccaacagtagtaaaccctatggtgaatcagaagaatgaaaatgtgttacagactaaacctgaaccctctcaagctcataagaaacttgccaattatagcagcaaacttattggcactggttataatctcttcaaggtacgttacggtcctccgttacggagcttgtactaactacccagttactcatttactactgtgtactttatacttggttatttactacttagtactttatacttggttatttactacttagtactttatactcagttatttactacttagttcctcagttatgtattactgtgtataatagtgttttagggagttcgtaacttattgcctaggaagaagaacttgcacatagtgaagatagttgaggacttgataaacaattccgagagcatttctgaggattttgtgttctttgaccccaagacttcggatacgccagtcactaaatccacaaagcgaattacctctaaaaaatgcttcgtatttgtagtcgggggtgcgtcgtacaatgaatctctagccatcgctgatctagcctcgaaactcaaacataccgtatcaccatttacagttagtcattgtattatactattaaattgggttaatgtgctgtagatgatatacggttccacgtattttgatcgccctgaagatttcgtaacacaattaggatccttcaattttaatctctaatataatatactaccatactatactaattatactatgtataatgtactatgtataatgtgtataggtatattgatgtgactaaattagtgttatttacttaatcaaatttatgaattagttcttatctgagattacacatagctttagaataattattgtaatatcttaatatcttcactggttcctattattttatttcccatgatttctaaaatcgcgtcgtatatcgtatcatcgacaatgaaattctcttctttagtgattaaattattgaaaaattcaaactctttcccctttttaaggttaaagtctcttgaaaaggctagaaatgtttcttttaaatagttaataataatctcctcgatacgagctttaattttaaatatcaacttctcaagactgaagacgtccatctgtttacgaatgaactttagtaccaattttttctcctcctgatcaattagatcctcaggtgccttttcaagttccgctgtatatcttttcttatcttcttcagttgaacaggtttcggatatgttacatagtgtccaccctgttttgtgtttaataaagttttcgccaacttctagcatcacccttacaataaataaatcccgaatactatacgcagaatcatcaaaattaggcgaacttccaaagaattttgacattaatttttcatcataaaacttcttaaacactaagtgatacacagagtctagttgagctcttagttctagttcctcaggactgtagttaacaggagcaacattgggagaattagctggtaattgttgatcataaacttgtggtttgtcacaatcggaatgggtatcggtatcggaatcggaatcactggagatacaagtagaatcatcggagtctacacttttcggagctgacttggacaattgaccatccttggtatcagtttgttcgaagctgaatgaataaatttcagccagcttattttcgacatgaaggtgatagtcagcatggttaaaatcaccaaaatgttttctaaacttatcatcctcataaattcgaagattccttcccatgtttatcaaggccaattgatatatttttttatctatctccaaactttcttcctcacttatcaaactttcaaataactcaaactcatcctcaatatctttatccttaatatctttatccttaatatctttatccttaatatctttatccttaagattattgtccttgagataattattacgttttgaaaaggttattaatttttcatttaagtagtgaacgatgaaatgataaatatgtttttttaataggtcggatgattcctcaaattctattgaactcattggattattgatgaattttattaacaaatccttccccttttcacaaattagatgaccaggagcctttttaatctcatgtgttaataacaatttgtcttcaaaactcagagttcttcttctcccggtatctatcataagttcgactctttttctaataatacattcatataaatatgataaatttccggtaattgaggggttctgaacgccgtatacgggatcattgacggggtgaaaactagggtcatcaggtagaaacggtttattataattatttttaagcaattggagatagagagagttaagttgtgatcttagttcatgttcatcctcgggagcaaagttggtattaataacgtgagtaatagttaatacctcttgatgagtttgttttggcttttcagaaactaagaggttttccttaatagaatcgcagacagcagcgaattcattaaagtctaagatcgtgggacctgattcagaagattcaacgttgttggtattcgggaaaattatataagttggatgccgatgacaacaattggagttgactgtgaaaacaggaatgttattcagatttgaatatgttaagaatttcataattaacacaagtactaatcttaaaataaactgaattattaggaatatcgagatcaagtagggattatgggataagtagatctgagtgctaggatctgagttactattgtaataccttgaaataattaaaaataacaatacaggattaatatataacataaatatgattaactttgcctggatagttcaatcagattattgcccgtatagttagaatttaggggactggatccagtcaaatcaagcacagtaaaaagtatatagtatactaaatatatggtattgtagatacttagataatagttttaagagtattatagggttataattaaggaattttatatttattttgtaaattctaacggaggttctagaattttttagatcagaaatctaattttttgaaatagttttaactaaattaatagatatttaagttaatttagggttaatttagggtaaaaattagaaaatttctatctagtagttaaataacactgagtaatactaggtcaagtgtacccgaggatacacattgaaaccaaattttctacactaataaacaacttttagaagtaatttcaagtagtttgatggctaaaatgatgtgccaactgtgttagaattaattaatttaatttttgcaatagtcgaaaatttttcattttttcaaaacccaaatgtcacttttgggtccggaccaaaatgctaaaaattcgaaaattttaaaaatcaaaatttccacataaaccaacagatttaacctctcttagcatcagaaaattattataaagtgggaattatctgtgtaggaagagtaactaggcctaaactctatgcctactctgtatagatattagtttgttagaagttaatattggtattgtagaagacgcaattctgagggtgtttatagttgattaaatcatcggaaatagcgtaggaaatgaacttttttaactttatctcccttgatacctttttactcatcttctccatcgcctcactcaccaactcaccattcccaaacgtccaaatctgtcaaccacattaaccaaccatactactcttaactatataattagtactcttaactatataattagtactattaactactaactatattatttttaactatattaagtaaattaactgtatgattagaatattagtgtataactggtagtggagtaacttgttccatgagaacgtcttgtccgtattttttacgtaatttgcccttgacaatgcgttcggccatttctctagtctttccagagttgaccaacttctccaattccctctccatctcactccttcccccagaatcaaaccgctcaatatcctaacacaacatacacaaccaatttaaccatataactatgtaaataactatgtaaataactatgtaaataactatgtaaataactatgtaaataactatgtaaataactatgtaaataactatgtaaataactgtatgtagataactatgtaaataactgtatgtagataactatgtgaatgacagcgtagaataaaagtgtggagagtacaatttctttgggtttttctgcgactgtgtgtaaggccatttgtcttaaaaaacgtttaagttcatcggtttccaactctttatcaaattgcgtcacattattcatgctagagtatacacaatccactccctccaaacaacagttcaacacaccaacactttccacagtgtccatactaccctgtggatcactgtggaaattgtggagattgtagaacttattagtgtttggtatttggaatgacagaatagccgctgcagtcccggcgtaagatgctgagattttcggatccagtgacgagtgtacataaaacacaaaatactcatcagggtctgatacgagaaatgatattcttgctactgatattgactctctcaatgcacttctcacatacttgccagtctcacccacactcttaccacatcttaaacacactttactcagtacactttccaacaacttgtcaactggaggttttagtgtagtatcctctggagtgtgtgaattattgagtagtgtgaaagagagtagagcggagttggagaaagacttagcgaatgctgtgaagagtttatttttggccacgaaatcagtgtcacacctcatgtcaatcatacaacaaaccttttccacacaactcaacgctaccgtaccctccaacaacattactatctcccctaatcattataatatttaactatgtaattaactatgtactaagagctaagatttatcatattttaccgttgtttgagggatttttagcgtcagaaacggtgtttaggataatttgagaggcaagtttaacgtcaccattggctttcattaaggctttgtaacactcctgagcacctcgtccagtcgaagatctcagtagttttatcttcttcgatcgctcagactccatctccacaacagcactgtcattactaatagcattaagattgcgataattaacaccatttaaagtgtccagattgcgatagtttagattatttaaggtgttaagattgtgattgagtgttttggagtaatttttatgagagagtaaaaatgcgtttgaggtacgaatttgaggaaaaagaatgaaaaataaagctaaaaatagcattggagttacacatttaacttatcctacagaacaagagaataaaatttatgaaatttcgggaaaattaaaagattcccaaatctaaacagtaaattaaactaaaaacatgtttcacatctttataaattaatttaactaatggtaattttatggaatctacacaacattaatcctcaagataacacatttattatactaaaattccgtaaattccacaatttattaattttaatgagaatttaattttttaaaattttatatttaatcgcaattaaaaatgtttaaattattttttaccctcatcctatccttccgtaagctctaacatataattatcaatttaacatacaattatccaattaatatataaataatattaattttatttaacatacaattatcaatttaatatatatttatcaatttaatatataatttttttagtgaatgtgtgttgttatgtgagtgaaaattcgatttcgggtactgggctaactcaggcgattttatacagtggaagaatcgtaggtgaaatgtcacctggcgaacttgaaaagattctaaacaccattcctcccctcgatcacgtcattctcttctacattaatctcaatcaagactgcaggtttcacacattctcacacatttttacctatttactcatttttactctatttactcattattcactaagtttatcacgttgtattatatgattagagacttctttccgttgtattctcagttgtattatgatttattgagtgagggttggaagttaaagtttgtgaagtttaactgtcagggcgttgataagcgacttaaaatgtgccgagattataacatcaatgttgttcctacaatcgcttacatctcaagttatcctctacaacggtggaatatacctgaaaaatcctatttacgtaaactactacggttcctcctccatgatcatcaatccgacatactactacaaaatgccacaaagtacacatcattatttaatactacgtggttaattatatagttaatagcatagtatattatatagttaacactatagtatagttaatatggtaataattatgtgataggtataggggtgatatatttgcgtatgatcaattgagggattgggtgttgttgatgtataacatatcatcgttgaatcggagaatcggcacacgtgaaagtatgatcaagttcctcaaggatacttggaactcttttatcaccttctttaaaaaatgaacacacataatttactcagtaatataatattaagaggaataccaagtacttattgctgctggtatgggctatagctctgaatgtgaaattcaaattaatatttaaatagaaataaacacaggaaattgtttaagctatctgtggatactacaaggttttgttaccaactattaatttctacattcctgatgatattactaacattttattctcaaggatacatagccgaatataagagacgcagtaaaaacagttggcctacagatgatttgactacatggaatgcattctgttactggctaaagaaggcacataagatcactaaacataatgtcaaatcacagtttaccacaaatttacgtagggacttattacttgaagttcaaaataatgtgctaatctaatacccatcaccgaaatatatattacttagttacggtagtatagttaatattgtatgttatgagattaactggattaagagtgtgtgagtgtgggtttatgatgtgagtaatgatcgcatacgtcatggattgagatttgtactttattatctttgaccaggagccgttgtacaaacttctcagtatagaaaatatcaactctattctccagtagtttaactacgattctcttgattttacggttcatttcacaggttttggagattttacccttgtcgtaaactaccttgtagcagttaattttaacctcaaattggaacttaaataaatcaacactaacctctgaagggtaaattaccctctctcccgcgccgtaaaagataaatttactcatcttaatactactttcagttatgtcctcccaagtccggtcactggaacatttgaataatctgtacctgtagtaacttgaaaataacaataaatactgctcagaagagtgtaaaaatgatacatgagttactatctccaagggatcattctgctcccaaatgacctgaggatcaatgtataaactctcacataaaattactctgtcaaatttatatccctttttacaatcaaattgcacaaactcgtcctctctatagtaattataactctccccctcctcacttccaatgtccaacattattcccttcaattcccccgtactcttttccacactgttaatactggagttactcaattctccattattaacactggagttactcaattccacagcgttaacagtggagttactaaattcaccggtgtttacggtggatttacttctatttatttccgaagtgtttgggtgtgagttactcctgttaacactactgttggtaattggctgtgaattactcctaattacgtctctgggattttcctgattcgtggtaatattttgtagttttggtattggatttgcaattttctttgcgttgggactgaagaatctctttttaacatcactgatggctacagatttcgtcttgaaactgttgtttttgtaacagaagaaagggtcaaaaacacgatcattgccagagtcagggctaaaactcttatcatagtcagattcgttgtaatattccagatcataacttctggtagtgtaaatacttctcttggggtcaacttctaaaaacatgccattgtgagttacgacaactcgatttgtcatgagattagtgtaatagtagtcacaattcgcttgatcaggataaatgttaaacccaattctgccctttgtattccttaaaagtcttactatataatacatgtcatagattacagtttcatataatccatcctccaagttttttactatcgttttttcaattttatggcgtctgaagatgttttttgtgagtctctttctggtaatgtttttccaaggctttttattattcgccttgtaaaataattgataatcgttgttggccattaatacggcgagatatttagagcctttgtcgcctgaaaacattgatactgaccttgaacattccaagtcactcccagcctcccaaataaccttctcatcatcaaagaataaccagtgagattgaacgattttcttaaatacaaacccttcagatgtttggaagtttctaattcttccatctcctgtaattttatactctttggattcccaaccctttgtgatgtctagctcagttctactattctcaacccatttcccgttaatccaaccaagtctctttacatctccatttaccaaatgtaatgtaatactcttgttattcttgtaaatgttattaagtttaactgtgatttggaaggcatactggctagtgtcagttgtgaaccaaatgacttctcgttgacgagtaataatattcctggtgtttgtgaatctgtgctcaaaatcctcagtcacgaagcctgtgattttgttaaaggcgtaatttttcttgcacatgtagtgcccttcatcaaactcctcgtagtacctgtactctaacgctgagctctcgttgtttatactcaactccactggatctaactccaaatgatccagatcaaagcttaaatacgccttgttatagtttaaaatgtcctcgccaaacatttacaaatttatttttctagatctcgcattatatcctcagatttttttcccagatctttccaatcttttatacaatcttatattttacacatttatatttttcacccattcatttattcttgaaaatatttattccattatactcataccacatattataacactgtcctattcatcatacccttttattattcaaatattattatcatattattacgattatgtcattattagcttgtttaacattttatacattattacacatattatactgtacataccttactacatatatatatactagtatgtgtattatagtgtatattacttagtattaatataccaatattataccgttaatcaattctttattactctattaaaacacataacaaggcattaaaacctttaaatgtagtatagaataatcgtatacacccaatttactatccatgaacccatacaccaacaccaaaaccctaagccacaactccttaaataccaaatactaaacatattaccatgtaagatagtaaagaaattagtgagctttatgtataaagtatagattgactacatttgcgaaacctaaaacggctaggaagatgacgagtgcgaatgagcagttgtagacgtacttgagtttgcaggaaaggtgggagagtgcgagtgtttcaaagagtatcccctcctcatccgtggcgtagctcgtgactttacaaaaaatcttcgataaatacattgggaactgcagcaaaatacagtgcacgatgttagtaaaaaagtaaaagaaattcacaatcacgacaattggtaataaaaatttatgccgtttaattattagtacagtgcctaccatggcgtcaattactgtgataacgcccgtgtaaatacccaccagaaagaagtaaaaacttgattgtttcgactgctcgtacaactgcctggcaaaattaaagtgtaccaaacttcttacaaacttgaatttgtcatctggtactctgaactttgggtcgatttgggtgccaacgtccttgatcgacttgaaaactctgtatgaaatcacatccttcatgttgagcattttcatcgattttgacttgtttagtaacttaattactgactcaggtcttcccgcccgaatagcttcctcgttatacttttccacagcgtaatctaagatttttgcgctctggcccagagagataaacctcctcgtatccaacgctataaacgccgttatcagcaggaatatagagccaaaatacttcatcccgttgagaaacgagtaactcctaaacgcgggtaaaatgggaattagaatcaaaaacgcatcgggaaccaaggttaaaaatgaaataacatacgtaaaaatcaaccgttgtgagaacccacaggcaccagtccgtagtaactcaagtctatcatcgcctgatttaacaaatagaaacggatacaatccctccattgagcagagtaaattattataatacagcaggaacataaactgtgaaaacacaagtccaaacaaaacgcagtaaaacccaaacctgaaaaacaggtaaaaattcttaactctcttcctacgccaaactattgtacaaacgtcgaataaacacatgaccagcaggagtccaaagattattgagctgaagtacaccagaaaacttaaaattctagcgtgaaagtagtgtgacagccttatcaaatagaggttaaataacctgtttaggccgtaaagttcgggcgcctcggcgggtatatcgggggttggaacccaggttaaatcacctgtaaaactctctaaagtctccagggacatgtcaatgtcgtctggagcccttgaaagctttgaaaatctcgaccaagtgtccagtgaaacagctgattgacataccgataaaatcagcctactcactagcagtactatggaataagctttttgactccttatcaacgagaaaatcccagtcttcaagttcctgacggaattcttggtcccagaattgtccccggagctcctaactgaagggttgccagaactcctgacgctcattttaaggattaaaaatttatattacaattgaaatttattatttttaatttccatttcaagttattttacgataaaaaattgaactcaagggctacaaagggataaaatgcggataaaaaagtggataaagatgttgataaaaaggttgtttggaaatcatctgtttggtactgaaaaattaaaaaataagcccttaaaacttgtaaatctcaacatcaaatccttcgaactctgccaaattttacgaaaattttacccttcaaaatataaaaatttaacgttaaatcggttgtaatataaaaaaatttacctttaaaatattatcaaatttattgttccagaaagtttaatcgaaatctattaaaatccctggtttaatcccccatccagtgtgtataattaattaattttaaaataatttctttaaatttttggtttaaaattacttttaactaattttaaaaatttctttaattttatttcccgtgactctgtgattagaattatccaatcctggcctcaatgtgccacatttccaacttcaacaacttcctcactcttaaatttacacatgttaattttataccaaaatttcaaaatctctccctcagctaacaaaatttatattatttattttcacaaaattttatcaattttagttattttaggttgattcatgtgattatttaattttttacaatttctcaattttttacacttttagtttttttatcttttttatcttttttatcttttttatcttttttatcttttttatcttttttagttatttttagttatttttagttatttttagcgagtttgtcactttatttactttgtttggaaggttttaacactatttttatctcacatcattacgtcatttaacttttttatccattttttacattaatttagttaatttatgcgttaatttgattatattatgacaaacgagtttgataagtttgttgaggacgttgacgattctctctgtgtcgtctgtttcgacgctctagaagaagaattaaacgtaccaaacacaattatccactcaattatacacttcatagtatgattagtgttataaattattttagaataagaagcctgagagtcgtgagtgtcttgcaaagttaacttctcaagacgccagatgtcctcttttcgtcacctggaatcttaaaaacgggttctcctaacttatttttactcttgtttagtgacgacgaggatttaagaggctgcatcggcactctcgaacccaccagcctcaacaatctcagtaacccttacacatttttacacatttttacacattcttacacactaatttcattattttacacactttttatagtattttacttggttaaatatatataaatagggggtaataattgtgtagagaagtatgctaggatgagtgcgtttcaggattcaagattcccgccgatacgttccaaagagatccaaaatctcatctgtaaactctcacttctacactcctacgaagtaacaacacaacttattattatggtggttaggagtgtaaggattatttggattgggagattggtaaacatggcctggttgtagaatttgattccaacggcttcaggtaataaatactaagattgttaatgctggatccagttactctgctacttacttacccgaagtagcactcgaacataacatgtccaaagaatacgccgtcgaacaacttgtatcacctctatctacttactattgtagtaatattaccctaactacttactatactattgtagtaccatacctaagatactatatacctaggatactttatctaaatacaatagttacaatacaatagtactgtgggtggttaatactgatgttatatgaataatgtattagattaggaaaagtggttatagaggtcgagttaccgatgatcttttatccaagctacgggtaccaaatactcaatcacatatcagtcacattcatatatcatttacaatcttatatcattcacaataatatataattcaggtgaccagatatcaatccaaaaaagttaaaatggattataatcattatctatcccacatctcaactcaataatacatctcaacacaataatataactcacattacaaccgtaacctgagtaaagagtattcaatgtgtttgacacagtttagcttttttggagtttgtgattgcggatttgtaagcacttgacgaagttaacaactccaataacccgtgcttcctgtcctccatccccaaacccaaatcctccattctctcatcctacaacatcatcacacaattttaccaaaactaatatcaatactattaccaattctaattctaatatcaatactattactaatactaatatcaatactattattaatactaagatattaatggtgtaactacagtggtaagtgtatacctgatcttgtgtgttgtattcgagttgttgaatggtatgttcgtaattccagaaatcgtaatcggcttcgatttgagtgtcggagttaaaattcctaagcgtatcaagtttcgccttgagtgatcttgaaattgaagaaaacccaagtgaatcatctagacacttagacacacgtttcaaatcatcttccaccattttcttatcactttttatcgcgtctactacttcgtctaccagttcactcggtttaacagtgtgtgtattgaggtccggtgactcaggagtgtgtggctgtgagatatatttatccctaatgtagaacctggaatgatgtagtagataaggatcaaatgggaaaaaagagtctatgggactgtaaaaagaccacttaaaatgctccgactccttcgtatccaatagataattcttactcctaaggaattcattcagacacgctaagttagaaaagtgagaggttgatttaatggcctgggagattacggacgttttacagtatgatagcgggtctagatatgaagttaggtacgccataaggcccgtttctgtgttctgaataaatgagacgcacgtctcagaacccgataccacacccgtgtgataacatattatgtacaatatgtcctgcaatatcgagtaaaataaactcaacttcttcgttactccaacagcattcagatgtacaccaattgttttactgttaacaccggagttactctttacagtgttaacccaggagatacccctactgttacccctactattactcttgacactgtgactattacccttgacaatagtgctcttgacaatagtactattggcgatatgacagttgtgtatgaactgattgaaaggtgagaggagagtaaaaaaatgtgtcagtgtggagatgataaagtggtgtggaacgaagttggctctgcagatgagtgaagagatgtaagatgcggcggttctgcgtttaattacgtgttgtgcgttgtcatagacgatagtaaacagccgctgtaggaacattttcaaaaatttaacgtcaaacgatgtgacgtaaaagtatataaactgcacatacttacacttgtacgcctgtaatatcacctcctcaaacacctcaaataactctcgaaccatcttatgcaactcctcactatcttcccgtagatctttatccactgtatccactgtgtttactgtatccactgtgtttactgtgtctactgtgtttgctgtgtcaactcctacagtatcaacagtgttaagagtgtgtaaagtgtgtgatgtgacagttgaatgtgaagatgagttgagagtgagagtatcggcggtggtatcagagaagctagagtcactgttgacatagcatgtctcacttgacagtaccctcagctccttcctactcttcggtgtatacatttcctccaattcatcggagctattcttggtcatattttcagacgtgtccttcatattttcagacgtgtccttcatatttacgcctaaaaatgatatcaattactaatactataatatggtataatactgtggtataataatatggtaaggtaaagtggtgtgtgggtaactactatactgagtacaagaaaagagaggaaactgtaagatcatggttatggataactaggtaaaaatacttgtggtttgggatgttgatgtcccgggttgagtgctgagttctagtgggaatttggagtgcgtgtctttacttgtgtgattatccaattgtatgtgctgtaaggtatttttagtgattttactaccagttatactggcgttgttcatagtggctgagttatacttgttgcacctgttcagtagtaagtgaagatcctcaaacaccagcgccatgaggaaatccagcttctgtgacatgtcgtcgcagtcctcctcagtcctgagtttatcgtagacatctcgaaaccaattagctccgtcagatttgtactgagttgtgtcagactgcccactgagtaactctgtggccagctgattaatcttttcagaccttaagttttcaactttttccacgtcgactacgggatctgcaagtctaatttccgagtcaatcactgttaacttgttaattaatatcctatacaagagaattcgtatacttggtagatactttgataggtataaaatagccttggtaaatgagatatgatgttcaatttgcacattatgatgcgggtaacacaggtccagcgtatccgcaattgttcccagaatgctcggacttaacttgcaaatttcaattatcaagtcacacaaatgttccctcagtatttgacccctcgttttgacattatcacaacagcgagcgtagctgaagaagtccacagtgccagtctggtccctgtaaaagaaacacctcagacctttaaacgacggatttttatgtgtcgaggggaatattgagattacttttttcttcaaatcgacgctggagtgatatccaatgagttcgtacatgaagttaaaattatctccagtgagttcctgatcgtctggagacgtggttaaaatcgttctgacgaattttttaagctccgtaacactgtcaaactcacgggaacataaatccaccttcaaatgctccttattaacagatttaaaatatgtaattagccgttttacaagccagtcaacgcaagttccatcaatggaaatgaggtccaaaaccgcatttttacacttgtcaatctcctccaaatttgcatttatccagtcaaatctattcaccaacaactccacaaacaataataaattatcattatccaacggactcgacattaccaaatcgttcaaatctctaaacattattatttaattattattataatacaatattattatggtataaatattagataattaatgggttgaaaagaatctaacgtgatgatttgtggattggaatctagacgtaagtttgagttgaggttgaaatcccctgggaaattaaagcccattaacttcttcatcttttccttttttcctaatcctaaataataaaatttatgattatttcggtttagggcgggacgattttaagttttatttgcgatttatctcgaaatagaaagtttggggaaaaagcataataaacgtaaattgggtttgaattgtagcccatattatttatattagttaaataaacgtttaaaaaatacatatgcccagaaaattactactaaaacaaactcttcataccctacttcctaccatcaaattccctctatattttcactcaaattttaacataccacttaaatttatcaattttatcaattttagtaatatttttaatgatatatttttttatttttgggaattttgtgaaattttaattctttccattttcatgttattacacagtttttacctctaaattaataatttttggctctaaaagagtttaaatttacttgaaatgacattatcagtagattcaattacttcttcaaattatgattctggtacttcattcctctctcattagtgttcagccaattcaatcacttcactacttgatgaatatagtcaaaactctctcctaaacctcaaatctaaacgaattacgccaacttcctctcctaagtttgttctaatccactctctatgtacttctgttactacgtgttatcatattcatacccctggaatacctataccttaagtatttattacttattagactactattagtactatacatatatgtatatactatactgcgtatatttacagtactacctgctctagctatataattaggtccccctgggttgattatccaggccttgtcaagcacatgctataattcagtgtacacagctaattttttttatttatgaattttctgatgcttaacaatgtgaaatctgttggttggtgtggaaatttggaatttttaaaattttcgaattttggccattttggcccggacccaaaagtgacatttgggttttgaaaaaaatgaaaaattttcgactatttagaaaattaaattaattaattctaacatatttagcacatcattttagacataaaactacttaaaattagttctaaaagttgtttattagtgtagaaaatttgggttctttatgtatcctcagatacacttgaggtgttattatacagtgttatttagctataaaaccgaaaatatctactaattaccctaaaaatagataattttggtttaaattattagtaaattatttgaaaattagttttaaaagatagaattttaacctattaaaaactagaaccttcccttaaatttacaaaataaatataaaatttcttatttataactttagaatactcttaaaactattatctaaatatccacgattcaattttttaatatactttgtacttattgctatagctatgtgcttgacctggcccgggcagcccactacgggagacctaattatacccagaatatccagtattatgctattactatatactaatcttgtgtattatagtttgaatgtgttatttgatggcggtataaggagtcaggagctcattgagttttttggtgacgattacgaagccaatgccgaagtattttttactctaattacctcaaaattactcaaattacaatcaaatcacaacagtttacacataattttcatagtttttaacgcatttggtatttgagtatttgtattctgatccttacgccaatgctattgtcattaccacaagtattttttaccataatattattgatcagattactctcaaaacccctacagactctacgaatcttgcaaatgttttctacggaaatttgatgtaattacacaaagttaataatttatcagtttgctgaggataaaactagtgaagaattggaaaagctattgaaacgtgtttatataataccttgcgtctcaatatctgatctcttgtgtatactggacactatcgcatacaacgggtatacacaagagaattcagattcacatctcggactcatcaccattcatatcctcagctcactcttcaatgaaactgatttctcctcaacgaaacgtatccaaccactaattctctattatgttcaggagacagcacaactgttgtgattaaattacgtgaaattgctcatgaacttaattgctccatcttagtaatatttcgtagcagttaattttgttcaggtttctaatttcaaaactcatctcaccaactccaaagtatccaaaacaccactaatactattaacactattaatactattaacactattaatactattaacaatatcaacagtattaacaatattaacactattaacaaattaacggaataaatatttgattaggaggagtttgatccgtatttggagacggataatgcagtattttcaaaattgtccggtacatggcattcagctattgatacccgggtaaccctacaactaataattatgtgtagatatatttaacatcattgaacgcggatcgatttgttaaaatcacagcacaagtcatcacaagccgacgaatggcatcttttatattattttatactttttcagggctacaatgaagccactattactctctttaaaactcaataatatacaaattatagtgaaatttataatattatacacatacaaatgttaatgcgatatgcgcttccaattctctaggcaatatttacactataatttggtatagagtaactactgtgtaactgagttagtgagttacgagttattattttctatggtccagtgattgaaacttgaaaggaagaataattccttttcctgtacccgctgtacctccacctcatccatcatcaatactacattaccaccactacacacccaaccacactgcagtattatgtacattattgtaataactagtaaatggtataattacgagataacggagtaattagagataacggagtaattagagataacggagtaattagagataacggagtaagtggtacgatgaaattggttttgatgtttcctagtgagagtgtttcatttgttggtatgaccagaattgatgttcttatttgatgcgttattatcatcggatatatctaaaaacacattaccaagtataataactaaatagtagactgtataacttagtaaggatacgtggcactgttgaatttgtgaggtatcttcgtagggaggataaatcgatttgtaataaattctatcagtttcatcctcaacaaacgagtcgaaattgtcctaaaacacattaaattgttgaaattgttaaaattaaatttagatgttacctctggagtaaggagttgttggtggaagttctttcttctgttaattctgcgctttaaaattgataattctttagtatatttcggactctcaaatgatatttccaggcccttctcgtcatatatcatcggagcctccttcaatatctccaacgcctcatccactgataaatctctccttatcctcactcttcccagctttttcttacgaattacggcgtcaggtggttgtacgtcagtttcctctattggtactatttcagtaccagaaacaacatcactaggaactatagtactatccccaggtactacagcagtaccatcactaggaactaattgattcctatttttgggtactaactgagtcctatttttgggtactaactgagtcctatttttgggtgctaattgagtcctatttttgggtgctaattgagtaagtggtggtataagtggcaatttcctgggtctgcctctgcgtctgggtactgaggttactttactggagaaggtttgcaggtaatctgagattctcctaagtttcggcgtgtcctcagcacttttatcaactagcctaagctccacatcgccgttctccctggtcaaaaccagtgaactgtccggtacctcatttccaaatattccccccgcaatattactctcagtgctactcctatcccgatgtttatgtttccgagatttggatacgccggctagaaaaactactgaagtaccgtctgagatgacgtttgaggcccagtgttgacttggtggaagtctggaacgttttggatatctcacactccgagtcacagattcatgaccgtacggccaatcactagcgtcactttcccttctcttgaatatatacaaactgttcaataaagaagaactatttattgatggtcttctatgcctcgttcttctcatcggtaccatacttcttaccggcgttaaatctccaggtgttatagccggtgtcttagtaacaggtgttatagcagttctcgatctactagtcgtagatctgctagttctagacttacttgtaatcctagatggttcggtgaaatctttgagatctgaaccacgtcttgaggttgagcgtgaggaacctttccttacacctttcggtctacctcgtggtcttttacccaaactcacacctttacggtttaatttatacaatacattactcgtatcagttctcttatatgtagtcagctcttttcccctagtcatagtaccaagggtagtgttaacagtgtttagaccttttgcgtttgtgtttgtgtttgagagtgatttggaggatttagttgagcctttgggtcttccaactttaccagttctcataggtttcgcaggaatttccagagttctctctgatacaatagtgtccagagtctccatggcatcagtgtctacgggtttagagatgggttgaggtgaaatgtgaggagattgaggataagattgagaatcatcgaataaactttccctaaaaggttcttgaaaatgacttgaaaagtcaggattctcatccttatcctccaattctcttccatcaactgtcccaactagttccagaggtttatcccttggtaattcagattctctagataaacctcttatagtatcagattccctagataaacctcttagagtatcagattctctggataaacctctagatctactcctagatgattgtagtctaggtctacccctgattccaggttccctagatctgcctctcaatggttgtaattcacttgttttatcccttggttccggttctctggatctgccccttgaaacctgtagtccaggtttctcagttagttctaattctgtcgtcttacttgtcagttgtactggaatcgtgtctaatttatttgaaattctgttaacactttgatgtaaaatgtcaaccgtatcccgtaaattttcaagcctattatcaatcctattcaaatccctaacctctccatacaatctctcagattgtatcacaggttccaactgtattacaggttcagaatgtaccacaggttcagaatgtgtcaagggttcggattgtatacccaaggatttagaccttgttagtctagtctgtgttaactgagcagactgtgacaatcccctggtttgtgtagattgaatagagtgagtctgtggatgtgactgtgtaaactgagataattgtgttgttggttgtgactgtgtaaactgagaagataatgggaagggagaatcatttagctcagcatcttcagttgatgtgatcccgcgatcgaagaaatcatttgacggttcttcagaggctgaaaagagtccgaaatcagaactatactggctgaaaaatctaggaacaataaacggcacatccaacgaataattcctccgagctaccacgtaaaatttaaacgaatcaagctcatcctaaaaatattaataacaataatataataataataatatttagagtggaacttgtaagggtaaggagtaattttgagtgatgtaattggcgtttgtttcaatgtaatatctccggatggtactttgttcaggaaagtgaagttcctgagatgaaggtccattactgaaaacttgcattagtaaattttacataacttttacatattaattttatatttatttacacccttaacattaattttagggtataaaattttcaataaaattactaattcaggtaaaccggaaccccaaccataccacaaactcaattttacacattcaatcattaaattattaaaaccatttttactaaatattaaaaatctttattttattatttttcaataaaattactgattttctctggaattatttattttcactaaatttatcaatttttaccaaattcataaaatttcaccaactgaactaagatttataatatgtatgggtgggaaaatattatttggaaggtttaacttactgttaatttcttttggagtgttctgtgaagttataaattgcttcatcaattgggtcatggacgtggtaacagttgattaatttcgggatatgattccccaaatccctaaaaatatcaattacttacgaagttactttttgtttcccagctcaaccagattctcagccctcaaattctcactcctcgccagtatctccaactccaaacaaaacacctatacacaccattttaccccttgtttacccctatttacccttgtctacccttatttacccttatttaccctagtatacttagtactataattacaatagtacaaatatggtaaatgagtaatgttatacgatagcggtaacgagggagtcgaatccggcgtcatggaagagtttatcgttgatgtttccagtgtcctaaaaggttgtaatgagttttaattaccttgtcgaagtagtttaagtgacttcgttccttcgctaacgagaccaagttcttcatatcacacatactttcatattattgcacagctccttacctatataatatattaactaaatcattagtgttaagtggcaaatgtgttaattacctggtgagagtagtgtaaagaacggggagacaagtgtttctgaaaatggctggaaaagttgaaaaatactttaaaagtgtacaattgagattatcaaacaaatatttaccaacaagctttgtatcaaatatccctccaacaaatattctaattccaattaacacaaccatgtcatatataactattgtagtctactgagtagggagtaactttgaaatttcttttgagatttgagttggtttttcggggatttgagcgataaatttatcataaatgtgaagaatatcgagcattccgttgtggaaaacaagtggaattcggtactcaattattgtccgaatcacctcatgtaactgattcgacctgttcctcttcattatataaccgccagaattataataacgatcccctaacctcttaaaatccatcctatccaatatttacacagctaacatcttagtaatcgggtgaaattataatattaggtaaaattattaggtaatattatattaggtaaaattatatcaatttcatccaaaagtgggcttaagattgaaaatttcgccataaataaccaaactaactaatcaacagtaaataaatggtatagaagtggtaaaaatgaggaaacgggattgataatacccttgatcgatccatttatctaggctgaatccgttatctctgagccatttcatactctcattaagaaaaatcgtgtttgtaatctggaacaaattggatactgagtggaaaaaacttcggaagaaagtgtataaaagctgtagggatataattgccagagttcttgctcagaattttgcgaattcatagctaaacagaagccgatttgtactatagacagatttacacagttatttattacacaaggcgtattcctccacgtcatcttttagtgataataaataatcatccaatgttcgaatcgacttagatttcggatttattccactaaactctaaacaacacaaattaataataataataataataaaaataaaatcaattgttgtaaaataaattgttataaaatagattgtatgaatgataagattggatgatttaccgcaatcgatgacgatgaatttggaatttggaattttgtcaaggatggaatcgagatcagaattctgagactcagatccatccataatattttatactgacaaattattaacacagtaaaaaatattctaattactaaacaaagtaataaaaatttataaaatttaaaggaaaaaaattaataaataataaaaaagaattaaaatttagaaaatatttttaaaaaatatcaactaggtggaatccagacttgagatcacacactggcacagaacattgagaaaactcgtcacactaaagtaaataaaataatttaccaaataaaatttaaaagaagctcaaatgaagtaattataaagctgcttaattattccattggaatcatcaacacaaacaaaattttagtcttaaatgttataaaaattgttgaaaaataattaataaaataatttaaaaattgataaaaactgagggaataaaaattttaggttagaatgtgttaaatgagactccggcacgacaatgtgaagctgtgaaagggtgttgaaaagtgttggaatccaattcctggcgaagggataaatatataaaaatatgtaaaaataatttttttgtgcgagtgtgggaataataaagttgagtttagggtgtggaatgagaatggtgtggagttgtggacacattgaattctcgtgaccagacacaagaaataggaattggtatggtttgattaagtgtcggcgtttgtatttttatgatttttagggttcggacccacacaattggcgtagaaggtagcagttccaaccccattacaacataagatttaacactctatctccctagtctgcctttactggccattttagttatttatttcagtgttgtgatgtcttttcttgatatttcctcccaggtacttgattatgtttctttaacgtttggcggatcatatgcacatttctgattcctcattcacctcagattactattagtatagaatctcacaaatttaatcaacctggcccttttgttactctacacaaaatgacttcattctaatactccctcacccctttgtatattagccaatgttaaccttcctgtaatatattttataaccaagatttatcaacaaatcttaaacaattttaaccaaaacaaccaaatttttacactaatttatcattattcgtcataatttatcaaaatttaaacggaatttagtagaatttaaaaggaatttaatagaatttaaacggaatttaaatttaatgaaatttttatgattcctagggaaatttgttagtttattccaagttgttgtatattttgtttttgtggagtttttcataaatttggccctttgcaagatttgtttactctgaaaatgtctacagcaaacttctacaatgatgaatcattcaaccttttcaattccaacggtatgaaattattaatttaatccttttcagactacaaatccgacactctagatttcacacaactcaattactcttacctcaatctcgatctgtatcctaatacactctccccaatttaaccatactatttaccatactatttacctactatttacctactatttaccatactatactatttactatactataatataataatgattagtgacggatttggcggatataatgcgatggattacttaccttctcagtacgattcagcacactatgagtcctcacagtatgacccaactcaaccctacgatacacaacattacgacaatcaacactacgagtcctcacactatgacactgcaaactatgacacatcacactatgacactactcactacgataaccaacactacgacagccaacattacgattctggacactatgacagtcaacaatatgatggccactatatgagtccgcatttggatgtgttgacggagcctgtgaagccatttcatacggattacgttaactgtgaatcattttcaactagatacaccgatggttcatttgaggagtgtccccaggggcttgggtatagcatggattcacttacggaatccatgttaaagcagttggatacgccgagattaatcccaacggagtctgacgtgccggatagtttaaagttaagttcactggatccgatggtgcgacgtctgtatgacacttgcgtgagtttaaactcggacactgactcgtcaccggacataaatggcatgaagaaggacagattacgtgggagaagaggtcgacgtaggcctgagaagggcgtaacaccagttcggacctttacacctcgaagtcctcctttaaaggcaaagccaagaccggtgacaagaccaagtttcagcggtttaaactacgcttggcttaaggattcgttttttaactgtcaaattcttggcaacgtggcagcaatagctcaggatcagacgggttgcagaatgctgcagcggcaacttgaatgcagtgacacagccttcacctcagcagttttacgcgaggttttggataatttgtttctcctcatgactgatccgtttgggaattatttatgccagaagctgatgagtgtgtgtgatgctggccagctgggcgatatcatcacaggctgtgagacgcagtttataccaatttgcctcaacatgcacgggacaagagctattcagaagttaattgaagtagtttcaggcaataacgttaacaggattacggccattttatcagccggagtcgtggaactgataaatgacctgaacggcaaccacgtgatccaaaagtgtctagtagccttaagtagtgacgactgtgagtttatttacagagcaatgaatgagcactgtgttggattagcgacacatcgacacggctgctgtgtcatgcaaagatgcattgacgcagcaagtccaacccagcgtgcaaaactagtagacaccattgccgccaaaaccttggaattagtagaagatgcgtatggtaactatgtgattcaatatgtgctacgtctccgtgatgacgcagttaatgctagaattgtctcactgctttgtgaggatctcacgaaattctctaaacacaagttcagctccaacgtggtggaacgctgtcttatcttttgcccctcgtcggtgaggagtaatttagtttccaggttcctcaacctgccgttctctgtgttacacgatttgatcttggacccctttggcaactacgtgattcagcgagttttaaacgtggcgcagcccgacgaactcgcacacctgctggatatcatacaaccgcacctcgaggaactgaaactcgtctcttccggaaaacgcatcgccgctaaaatctcacgcaagtcatcctctctcgagaattctttgaccggttccgtaaccactggtgggagtgttgccactgtcagttctgttggcacttgtttgaccggtagtgtcggtaccgtgagttctgttggtagtgtaaactctgtaaccagtgttggtaccgtaagttcagttggtagtgtgagttcagttggtagcgtgggttcagttggcagtagtggtgtgagtgttagttctgtaagtagtgttggtacaattggttcagttgttgcagacggatttacagtggaatcaatcaactcttcatgtccaaacaccgtcaacagtatcaacactgtcaacactacgaactctatcaccgcaaacactgtgaaccctatccctactgtcaatacggttactacggtcgactctgcgaattctgatacgcaggattatagcatgtgccctggaaatttgggcaacgattacccgtccctgtacagtgttgaggctgatactgagactatcagctccaagggtaatttgacccagggcacctacagccaagtcatacaccgcctcaaaagcagcaaagactacatactcaacctgattaccaaagataccggttacaataataataatagagttgacagacttgacaataatacagctgacaataataatagagttgacaataatagaactaacaatacggttgagaataatacgggtgacactggtgatacggttgagaatgataaggttgacaatggagatgcggttaacgtggttaaggatggtgtgattgagagttggggtaagtttgaggagttgagtatggagtttccgagtttgggtccggagaagtttgaggacgatcctctggtgagagacttttgcggcattttcagcaccgggtacgacgaacaatacaaacaatcttataaaatttggtccaatctatgatccactcccattctctcacaaatatttcacaattttacaattaaaaattttacaattaaaaaatttacaattaaaaattttacaattaaaaattttacaatgtgaataattttacgcctgattataatgtgaataattttgcaattaatttacttgattacaatgtgaagaattttttgcagcgtaatttcatttttaaagtattttttcattttgtttcttttcgaacttttcagttctcttgttttaaaccattcgttggttctttttaaagatttttagttgttttaaccattctgttcgttttaaagaatttgtttcaagtggtgggcaatgtcatacagctgacatttgtggatttaacacgggaataacattgagatttttacatgacactggaagtttactactgtttagaaacctttaaatacacttacaatttaaacatgaaacacctattccacacctttggatacataaacatttggatactctaattttttaaacatccacattatacactatttaatatactatacactattcaatatactatttaatgtatatgtactacactgtataccatatactatttaatatactatttaatatattgtatggagtatattattcagtgggatcgggttcccagatggcgatggtttgatcgtcggagacgctaatgaggtgatcgttggcccaggcaacggcgttaacggtggacgagtgagcagcaataactgagagcagtgacccgaaaatcttattccaaatgtaaatttgagcgtcctcactgccggaaactacgaaggactccatcggaccgccaagagttgatctgaggacatagcggtcctcacggtgtccacggtaagtctggataatcctacgttcgtcaatgtcccagagtctcatcacaggcctctgaccagccacactgacgagcacttgattaaacagtttactacaagtgactgtggttataggggctgattcaggtatgggaacaatttccttacccgacacaagatcccaaaccctcaacatccgatccacagtagcaaaaatcgccaaagtcccatccatattaattgataaagttcttattctggtctcgaagttccatttacaaattgagtttattgtgtactgagtcaactcgctaattgaagtgtcaggctcagtgctggtgccatttaatgccacgcagtttaactggccatttgcagcactgggctgttcagatgtggttacagcgttatccggagtataaacaacttcatgtagcatcatctgcttatccatccctgcggtgatgaatttccaagtgtttggtatccaggccacggaagtagccacagcggtgtgcggctcaattttctgtaaaaaatcttcacagaaaggactccagatgacaattaagccatcgttgccacaggacgccagtaacttgctatccgagctccaggaaacacagctgaccacattcctgtgcactttccagcggtaaatcacttcaaacgggtatgttgcagaccataaaattacactctcgtccttacttgccgttgcgaaaaactgaccgtctggagatatcgagacgtcccaaatctcgtcagtatgactctcaagtctggccaacagtcttgaaggtaattttgacgtagtacaacggtggtcaaataatagtgggtacactgcacactcatctccactgtcataatggttcagacaatgcaactcctgtagctccacagcctgcctcaataacgtctaatccaatcaatcattcagttatttaagttatttatgttaagttatttgagttatttagagtgtgtagggtgggtaatttaggttaactaaattggttaggttaacagagtaaattagagttgtttaggttaacagggttttataccagtaggcggtttggaggaatggtaacggagggtgaaattaggcattgaatatgtttccaaagtttctcacgagagttctataaatttattaacacaattttacagataaatgtgtaggtatactttctatgtattggtaaatagtgttattacttggtgagcccagttaagttcagattttagtgactttgaggggtaaaccatgagggttgaacactgatgtacacgctgccttgagtcctcatcaaaagcctcaagtgacatgtgctctacaataaaataaaataattaacaaacaaattcatagttaaaaaattaattaaatgaataaataaaatgaataaaataaaataaaataaataaaataaaataaaataaataaatgaataaataaaatgaataaaataaattaatggaaaaaacgagtggagtgaacctctgagaacttttaaggcttcatcgaagttattattgtacagggcttcgaagaaaatctgttgcgatatgaggaacctacaggcgttaaaaacgctctggtcaaagttaaaccggttcaaaatgccctttgcgtcatacaaattaccagaaagtataaaactctccaaatcgttcgtttcagagtcctgatatgcacaactcgactcctcctgaagcacctcaaaactcctcctatcacataatttacaccgttaactcatcaatttcttatcacatagtaatacataagttgtaattaaagtaaattaagggataattagtgttagaatagagtgttgagtacctgtagcccatatcacggagtaattgcattattatccggagtagttgggatttggaaaaaccattccaaacgtcaaaagattgatccaaacccatcaactcaaatttatgtgataaaagttgttaagtaaagtggaagaaggtcattttaaaaataggaaacaaagtcccttatgtgtattaaaaatataaaaacaaccaaattaattataaatctttaaacgaaataataaaagttcaaatgaaaaatattattgagaagaaataatgaataatatacgaagaagaaaatttaaagtgcggataacggaaattaactccacaaaaaactaaaatttcacactattcttcaatctttaaacaaaatttcaatttttcattatttttaattacattttactgtgtttatagtaatttattatgctaataatttttaaacatttgtacagttatgttgttattttttaatttatactcttcctatgaggaattaaataatctattcatccctctgtagataagtttaacaatgaacaaggaacgcgaggtactcaactcagtaaagttctcaaacacaacagctcctgagattattccagaatccaaactatttcctaacaaagaatcgcaaaattcaggaatctcatctaaaaattcattagaaacttcatttagagagagaaactcgaggcttttatcggtggaagatttattacacaagagaaatgacgtaaattctattcctaaggtacgatttactaattttaactgttaaatttagttaacttacatctccaaggctcaaagacttaagaatttagaggaatctaaaaaacgggaacaacttgaagctattcaaaatcaagaacgccttaaaaggaaacgaaaagaacttttagaacaatccgtaccaaattattccatactcttatccctattaatcccattttaccatagttatattaatattttacatatgtatgattaggagcgccagaaagagcatgagcgtcgtgagttacagaagatgaaggaggttgagaggcggaatgaggagcgtgagaggagggagagagaggagttggagcggaaggagcgatcccaaatgccagttaatagtgatttagctcacttgaatttgttaaaattaccagaatctgaagtaagggaagagttaatagagaaggagctggagcaaataaggcttcactacttaggcctgaataaggagaagaagaaggtcctaaagccttcggagaagtttaagactattttcaacttcgagtgggacgagtctgaggatactacaaagtttgaaaataatccaatttaccaggacagaccagaacctcaactactctttggacgcggtttcagagccggtaacactcactgagttaattttaccgtaggaattgatgtcagagaacaaagaaagaagaataacttctacgacgaactctcgagaaaaagagccgaacttcctcaaaccactccaaaaccacccgaacccacccctaaacacgaagaggttactaccataactaatattaactatgtaaatattaactagtgtaaatattagtgtaaaattaactatataaatattatgtgattgagtaaaatttgtgttaggaatcggaggtattgagtaatcattggacgaagaagaagctgagtgagatgacggagcgtgactggcgtatattccgtgaagattttgagatttatattaagggcgggagagtacctccacccatccggacttgggccgaatcgccactaccctgggaactcctagaagccatcaaaaaggtaactccacaatcttctcaatctcactcagttaatcaaatttagttaatttcactaagttaatcaaattgatttaatttcatatagttaatcaaattgatttaatttcatatagttagaaaattgagttaatttattttaggctggatatattaagcctacgccgatacagatgcaggcgataccaatagcacttgagatgcgggacctgattggaatcgcagtgacggggtaatgtattttctgtaaatttaatgtttagttctgggaaaactgccgcatttgtcttacctatgctcacttatgttaagaagttaccgccactagatgatgaaacttctcttgatgggccttacgcacttgttctagctccttccaggttcacacatagttactccagtcagttaattatcaacccagttacctaactgttaactcagtaactctgctatataatgatttagggagttggcacttcagatatatgatgagactgttaaattttcggcgttttgtagttgtagatcagttgccgtagttggtggtagaaacgccgaaactcaagcattcgaactacgtaaagggtaattccatcactatccaattatcttaactatgtaataatataattattcaaatatataataatgaatatgattagatgtgagataataattggtactccgggtcgtgtgaaggattgtttggatcgtgcctatacggtgttatcgcagtgtaattatgtaattcttgatgaggctgatcgaatgattgacatgggctttgaagatgttctcaagtatattctcgactgtatcccctccactaatcttaaagaccgagatgaatccagtgctctacaacaagtatcacactatcttaccttttacccctaaattacccctaattagtactaaattcaccttaattatacctaaattaccccttaattatctataaatccgatataattacttgtaaataatctatagttattttatgattagtaaaatagtgttgtgtaggaactgagtacgaaggcgggtcataggaggtataggataactcatatgttttcagcaactatgcctccagcagttgaaaagctcacgaagagatatttaagagcgccggcattcatatcaattggagatgttggaggcggaaaaacctcaattactcagcgtctagactttgtacaagagtctaagaagacaagacatcttgaagaaactctagagacacttgaaccgcccattatcatcttcgttaacctcaaaaagaacaccgacgtcatcgccaaacatatcaccaaaatcggttacaggcatccccaacactattctatcataccactcaattatttactatactatttattatactatttattatactatttattatactatttattatactatttattatactatttattatactatttattatgctatttgttatgctatttgttatgctatttgttatactatcaataatataataataatttaataataataatgtgtattagagcggtatcgttgcatggtgggaagacgcaagagtcgagagaggacgcgttgaataatttcaagtctggcgtttatgatattttggtggcgacagacgttgttggtagaggcctagacgttgagggaattaaatgcgtgatcaattatgatatgcccaaagatatacaaacttacactcacagaattggtaatgctatgatgataatattattttaggacgtacgggtcgtgctgggctcaagggactttcaatttcatttgtcaccgacgcagacgttgatcttttctatgacctcagacaacttttaatctcaactgacaatatcgtaccactcgaactcagccaacacccagcctccaaagttaaaccaaaccaaccacaccgcaatatcaccaaataaattctcaccatattattaatattttactaatattactaatattttaatatattattatattatattgtaaaaataatttaacattgtaaacttgtaaattctggtagtaaataagattctagttggatttatggaaattttaagagtatgtgtagatgaattagttggattaagggtaaaagtattattgtaactgttaccccatttaagaattcgttatataaatttataattgacttttcttttcggatttatttatttcatctccacattttctatcgccttatctttcaatttttaactttttcattaggttagtttagtatacaagaattatctttgttaacagttatatttctcaattgtctgtttggattccattttatttatctttatataattatttatattattctagaaatttattttattacccgacattttattattaatttttttatagattctcatgatccagatcaaacaattttaaaccacccaaattcataaccaagttaacaaaatattatttgccaatctttaagtattgacaaaatatactaagtattgattgagttaacgaaatatcaagtgatttccgaaatatttaccaatctaagtattgattgatttaacgaaatattgtctgaatttacaaaattattacggagtaaataaaatattagtgttgaagatgtctacagcggatcaggtggtggttagggtgaagaagttcttatcgaacccgattttgagtaggaagcagttttcaatagaagtgttacatccaggccgcagtaacgtgtcaaagacagagttaaaggaacgtttagcaaagcagttcaaggtcaaggatagtaagacagtagtgttgttcggcttaaagacactgtttggaggtggcagaagcacaggtttcggtttaatttatgacaatttggcctcactgaagcgttacgaaaggagttacagacttgtgagactgggaattgaggaggcgaagccgaaactgggccgtcgtgccaagaaggaacttaagaacaggaggaagaaagttagaggtaaagaaaaggctaaatgcacagctggcaaaaagaagtaaactaacagtactcaatattgtgtacaacaagttacatattatttacacgtgttaactctctcaatttgtaatatcttatcccttaatttttcttctaatacgtcttctctcagtttatcctctggtattttatcctccctcgagacttgatcaactttaataattttttccgataaaaaatatgaacttaatcccatcaacacaagtatatgcctgaaatcacaatcaatattaataatataaatagtgtaaataatttaatattaatataaataatataaatattgtgaatagtaccatagcgagtgtatgaagaggttattgacagttttggtattgggatttctgtagaatttaacagctttatgcgttacaactgcgtttggaataatcgtcgccaggagaaactcgcccggcacaaaacccaccaaattacaaacctaaccacaacacattcattattatattaataattatattaacttaataataacttgataaaattgtgtagaagagtacgagtggtattgacgagaggaatgtgatccatttaatggaggcggtagcagtttttctaccggaatcgtcatcaattccatacactttaaataaggccttgttatagtcaccacgatacagccaagacagagtataaaaatgaggcaactgccaaacatacattaaaccaaataaaagccaaggctcaggcagcaatatggaaccctaaaaccattcattatagtttttatactaaaactattcattataatatttatactaaaatcattcattataatatttatataccccggcggacagacatccgattagtggtggaacacatcctacaactgatccgatatgtgtattccactgtgttttttctaatgaagattatttaaaaatgaaaaatactctttagaggggtgtaaacaagagtgtaaagtgcgatgttcataaaggctaggagcataggatttaaaccgccagccatataaagtaaaaggccgccaaaaaatgtaaaagtaccgccaatcactcccgcctggtacggtgtcacaattttcctcggcagtggtctaatcatacattaacccatgataattatgttagcccatgtaaaataattagtgtaacatgaattgacaagatggtgtggatgtgttacctgtttttggtacggttcataatggagtcggaatcacgttcaatgatttgattaaaagtattggcggcggcactgcagaggaaaatgcctccacaagttgtaagaaaactggccgaaatcatcggggaaaccatgagaaaaccactggcgccagtggcagtaacccaaagtgataatttatacttggataacttctaaaatcatatgtcaactggatggaaagtacctttatggaagttaaggaaataggcttgtaagccgaatataaaagcctagaaaaggctaccataatataacttctagtattacaaaggtaaaataaacgttaaacacccattgaaatggtaaatttactttaaaaagtcatttaaatggcaaatttcgtttaaaattatcttgttaaaataagttaaaaggtgaaattgagaaattaattaacattgtgaaatggaatctttattaaaataacacataaaaatatgtaaaaaatatgttaaagtattactacagtgagttggagaataaaaaattgaatgggtaagactaacaaattaaaattaaaatatgtaaaaaatataaattaaacttaattagttgtaaaatattaagttaaaagtcaattagaggatagggggagaattttgtgaaaaaagttaaaagttgatcaatagaaacaaagttaacaaattaaacaaattatataatgttaaatatttaataattatgaataataatgaagttgatgatggctgggtgggattccaaggttgtaaatttgaaaataaagtcaacttgcagtgaaataatatttaaaaatacgatcaatacaaaaatgtaaaatttaatattttttattatttatgtggttttatttagtttaaagtaattcccccatgaacaggaatcttacacaaaaagtgttagtttaaatctattttaactattttttagacacaaagagtgctttaatatcctgtaaaatatataagcatccgtgttactagttttcaatgttatctctgttctatagcctttaacattaaacactgagtaaattatgttcctttaatttaaaatactcctagagtttagttattatggttaaagttagtccgtcagatctcagtcagggtacgtttaataaaaatctgatttattccaacgtttagaggaacttgaaattggactcttggactgggtttctgacgatgatgaagagtttgataaatcacaactagataggttttatgaactagatccgccagtcactctcgataaaagctttaaaagaaccttaatgggtactttttctctaacaaattaaaaaattttttagttttgggattaccagttgttggaccggaaaaacatgacagacttcgtgatgtagttcggaaaacaataaccaaagaactggagaaaaaaggttagatttaaccctcacactatacaattattcattgagttgtgtattatattaactgcgagattatttactgggttgtataattgtgtcaggatgtgagattcaaacgccgtttgtattggagataccaacggataacagtaagcagacgagagggttagcgttttttacgtttgggactccatttgaggcgaatatggccttgaagttcataaacaagtttaaactcgactcatctcacgcctttaaggctattttgttggacaacttcgacatgatcgtgagtgacgacaacaagtgtgtgcctccactaaagacctttggctttacaagggagggtattagggactggtggactatgggagaacgcatgagagaccagtttgtgattaggtatgcagacaaaactgaggtgtactggttcgactcagtccacagagaaccaaaattagcatacgacggctcaagagaaagagctgaaggtagaagagcgtgggcagatcagaaagttgagtggagtcccaacggctcctatttagcagtttacaagtgggcaggaatagctctttacggtggaaataactttgagctgaaaataaggttcgagcataagaatgtaaagaacatacaattctcaccttgtgaagagtatcttctcacctgggatgggttaaagggtgaggataggcatgaaaggtccatttgtatttggcgggttatcaccggtgaacttttgaggagttttccaacacctttaaagtcaccaaaaggcggtgatttccctcatctcctttggaataggactggaaaatacattgcaatgttgaaccagttttcggagggcagtgaagtcatggtttacagactacctgagatgacactcattgaaggacctgatgggaaaccagcacctctcaaatacgccgccgaaaaattcgattggtctcctcaagacgacatcctctccgtcgttattccaggctctttagataccccaggtaacctcatcccacattcccagatttcaacttaactactattagaattagaattaatattggtattagaatattttggcagatgttgagtgtggtatttattaaaatatcacaatttaatctgctataataacgttgtagctaattctagaatccgccaacgattccaataaaacctacacacactcatacttacacactttaacacatttatatacatatatttacacagttgtatacatagagttagataaatgagatatgagactgattgaaaatttagcgagattggtattggttgagattccttcaaggcgtgagttgagttcaaggaacgtgtacaacgtctgtgaagttgcaatgcactggcattcgaaaggcgattgcctatgcctaagggtataaaaattttattaaaaatttcatctaaacaaaaatttcatttacacaaattttagtaaaatttcaacatattgtttagacgacgatatcgaagaagactggaaagaagggcaggaagcagtttaatcagcttgaaatattccgtctgagagaaagaaacataccagttgatacaatacaaatacaagatgcaactgttaaacagttacactgggaagaaggcggaagtatctcaccatccattacttatttccattataccttaaacgacttaattattcataggtaagagatttgcgttgattgttaaggatgaggagacgagaagccactccatcagattttacaaggtctctgatgtcggagctactagagacactgtcgtaagtttttatacaaatctcactaccaatttttaccatataacaattttactatatacaaaatcttaagattgtgtaaatttatgataatttatgtgtagtggacaacgacatttgatattacttcgcaattgaaccatatgcaatggtcaccagcgggaaattactttgttctgggcggattaggcgcagaaggctcactcttcttctgtgcattaaacgataacgacaaagtcgacgtatctcaccaacaattattcactactctataattgatagattagttacaaccaataatctgtaaacttggttaatctgtaaaattggttaataatgtgtaaacttggttaaaaatgtattaattggtttgtaggtgttgtataaggatgagcattttatgatgaatacgataaggtggagtagttgtggaaggtacttggcaacatgtgtgaatgtgccgatgcctcaacataacgccacaacttcagactcattcaggtatcgctaaacagtaaatgagttataatattgtttaggtatagtgcagaggctggatattgtctgtggacgttccagggcagactactgtttaaggacaggaaggagaatttttacagcttcgacttcaggcctcacccaacacctttactcaagaggtcggaaattgaaaagattaagaagaacctgaaggagtacaccaagaagtacgacctcatcgatgagaaagagaggaaagattacagagactcatatttacagaaaagacaaagtaatctcgacgccttcaaacaattatactcatcactcctacaatggtacacctcacaggtaatttcacacacaacccatcaccatattacaacctcccacacatataactaatacaattgatagtataataataaatagtataataaatagtataataaatagtataataaatagtataataaatagtataatgttatgataggataattatttggagttcaagtcgggctgggataagtttttgaacccgttggactgggaagtgacggacgatgtatatcaggaagtgatagacataaaggaggaagtttttgagtaaaagaataatgcaataccatatataatatgtattagtaaggattagaaaagtttctgaaccacccattcactcatgaacttttcaagtttttcagcagaagcaggcggctcccctgtgtaaattagagcatttaaaactcacctgaggtacaaaggtatttagcgccatcaacgaaatgctccaagtcagtcacaggcctcaaattctggtcataaatcttacgaactggaccagctataagagttaactcctacaacatctcatccaaacaataattaattaggtattaaattgaataatttatgaaatttgatgaataattagcaattcatggaattcgataatgaaattgcatggataattgatagttgagtgaggacaaacctttccaatttcaattagcagagttttcatggtgcgtatatagggtctgatgtagaaggaaacaccgtcgtgatgtttatcaccgttgcgataaagccaaacgagttttggaggctgaatttggacaccaaatttcctaaccccgagagtgtttggaggaattacaggacccttctgtcgtggtagaacagaggaataaacctcatgaacgcgactgtaagactcagtacttccgtcaaataagaatagattctcacgaccggcaaggcccctacctcggccgctttcatcaaatctttccctgtggctgccagtgaagaacctgtggtcagttagcctctcaaacacacttcgctccttaaggccttcagggttcttgaaaagcttattatggtatctaggaacgtcagaatttctcaaattagcgcccgttacaggctgttttacagtcttgggagataggtgtgcaacttcacccagttccggagtaaaacaaaccttttccctactagagtcatctcccctagcacttactaactgaagtgacaaattttaacaataaattaaggacttacaaaggggtttgggttataattacagttttcgtccagatagtggataaatccagtcatttaggctttaaaaacacaaaagctcacttaagtacggagaagcttgcttttaaatctcaaaaatcatcctcagatcccaggactggagtcttcccaatttcacctaggtacacagggaatccagggaatgcatcaaagtgcgtcagccttccagactccttagtacaaagtctcatgattcctccacttaaacaccctttacacactaaaatgtactaattattcaataaataatgagttaatatatggattaaaggatacatattcaataaaggttgaatgtgtgtcattattcaatagttgaaagtctatattatgaaatttttatctaaaaatattaaataaattatataaagattaaatcaattgaatgtgtataattttatggaattttatctaaagatgtaaggagagtgacagattaaaatgtatgaatttaaattatgacaagccgtctttgacttctctaacggcgatagagcttaaaacagtataaaaatgttgaaccaaaggatcatcagaaagattctcaggagggacgggatcattggcaggatcaggctcttcaccgccaagcgagtctaagttttgtttgtatgacaaagcggactctttagcaagtttgtatccgagtttaaaaacactgaagattttgtgttttttcattcccctgggaggacttgagattacaactttccaattcatgcgcgccttgtcataggagactcctttgggaagcgattgcgtatattcgtccaaaagatcatattcatactcctccttgagagcctgggccccttttagaccctcgtccttgttctcacacttgaatttgaacttcacaatcgtgtcattctcaaccttgtcaaaacaccaagagctgttttcagcgtcccattccaaaccttcacgctcactgtcaaccctggtttccctttccctaggcttaaaatcactcgtgtcctccctcggggagtccttgttcgatttctggtgtgaaccctccttcgactcttttttgttctggtcttgaagaatgaactgagctgcaagggtcgggtctaaactcaaatggggcactggagtctccaaagtcgtcaagatcttcttctttcgacctctggtctcagatctcttctccatcttcagaatcttctcctgcttgttccggttaaacagctgaattgccctcatcttgctcacccagaaactctcagccaactccttggcaccctcgctgccaaacagtgagactggaaacgattttcgccaaattctgcccttgtactcccaaaacgtaagccatcttccgccatgtgagtaagacccgttgtcgtaaaccaccccgccagaatgctccagaaatgccaagctatattcagcctcgtctttaaagtcgaaaaactggttataatttgtgggtggaattcccgattggtgatgtccgaacgctgacattggcggcaaattctgactgctcagacgccctaaaactgcctgaggtgtcatgtgatccacagatcccatgtctttccccgtaaacctcatcggtggtggcacataagcaaactcactcatattcatattggcttgacccatattaggttgacccatactcggttggcccatattcggttgacccatactcggttggcccatattcggttgattcatcatgggttggaagacaggaaagcccatgactgggaatccagggtgaggcacgtgtgggatgggcatgttggagtgagggatcataggttgctgggtctgattcatgttaactgagtggttcatctgtggattaaactggccctgcattgggacgtgatgaactccatcaaatgacacttggtgtacatcttttttcaagtgtacatcattcgattgtggattatcctgttttgattgtagatcatttgattgtggatcattcggttgagaattggtaggctttaagtcttgttgagaggtttgtgtctgggatagggactggttttgatttaccgaggcgtcggttgccagggtctggttgccttcaaaatcagcgtcagttttactttcacagccagaagggtcggttgattcatatccggactctttagttaccaacctcgtagcaggcatatcaatcaaaaattaaaatacattcaaagcgtagatcaagtcaatgtcggaaattcaaattaaaaaaattacaaattgtcatcaaatcaaaaactcaccgtcctgctgttacaaggaagattaaacgacttaatttcagtggagagtatgaatggaacctcagagaatccaaaggagtagggaattacgttaaaatatacgtcactaattattttacaagaaataatgaaaaaatccaaaataataaaacaggtatcaaaatgataaaaaattgttatcaaaatgaatcgcagaagcggggtaattgagacattgaaataaacaaaaagtgtgtttaataatacttgcaatttatattgataaaaacagaccaatataataaaaaagtttccataaaattttggtgatatatcatatcaataaaattttatttatgatacacatataaagtatacaataatatatataagatttttgcttaaaatgtattaagtttatggaaaaatgttcttttgcccaagcttctaagttggggtgattcaagacattttatttcaacttgtttaaacactttggcacaacattttgcacaattctttttcgcccaaaacttatagctacactacgtacttactcctcctattttatcaaaattcccttcaactttttatgccttccacatttcttacttaaaattcctttcccaaacacttgaattcctacttcatgagactattctcacaaactaatatcattttctcgaaaattccacttattttaatttcatttattactagttgacttaccataatagttatttaaaaatttacatttacttggtctttttatttttaaattacgttattccacaccttcccactgaaaaaccactcataatattaaaatttcttatattaatgaatattttgaaggtggcaaactctcaatttaacctcaagtatacgctggaaaattattttacgccagattaaaactgaaatggaaatctactgcatacatggcctgaatttcttggcctctacattgttatgtgaggaaaatgccgtccctgctgggactaggcttacgaaagactctgtatcctgggggttatcggtggctccgacgtactgtttcataactatcttgccattttttttatatgcgtaggcctggttgtgaagaattggttttttcgagacagaacagagccaaacaacttcagatgagggggaatctgaagtagaccgggtatctggatctaaatcaatcaagtctttcacttttaagggtcttcctgatataggacacgataacaaatttttaggttttggaggaggttgaccttccgtcttcctctcctttgaatttgatttagatgaggaatctataccccaaaaattcgctccaggtttatagtctaaatcctctttaaatacattcttctttgtctcaacattagtgtttggcttcttggccgagtccagtgagtacaaattatcaataaccaatttacgcttcttttcaagctcctcctgttccttcttttcatcctcttttttctgccacatcttcatgtcagattcccattgagacagtaacttcttgttcttttccatctgctttgcgagtgacatcaaaatgcactccttgcagtaaatgtatcctgaaggagtggtcacaggcttcactgcagtggctaaacatagccagcactgttcaaactttctcattgaagaggatcccagcctctgcttcagtgtattaaagtctgaaagtaaattgcttattgtgaacacttacctttgaccttcttccgctcatgatatgtaaaaatagagcccgcggtattatttttactatgcctagtcatttttcgagggtttaagataacaaaaattcaaatcaaagatattaaaacttaaaatatcatatcaaagatcgaaaaaatatactcaaagaataaaagaaaactataaaaaataaacaaattaggtcacaaaattattctacatttataaaaaaccattagttactacataatgaatatgcgatggaaaattaaaaataattggctttgaccgttccccagttagtatttatgactatacacatttaagtattttttacgagttttaaaatgaggaaattgtaattagttgaaattttaattttaatttaaattacaatggaaaatgttgtaattagagacagtgatgagtgggactcaatagagttttcccttcaacttcgctgccgctcatctagggttagattacttcaggcctggaacgtaatcaggccagaatcactatctatgtttaaccgacgcagcaaggtatttgttttaaatttataccctaatgtgtacctgttgtgttagaaaagatttgtctagtcatagatctttaagttaatattaaaattttagaacatgcttgttctcgaagcattcgttgacacagaatctctcgatcgctcaaactcagtgcaggatgtgtgtaccaggggattcgatattggtgctcccggctttcttgtaacttttgggaatctgaggtatgtttcaacaataattttatgtttagtctttctggattccctctattaagcactgattctaaagggaaaacgcttttggacaatgatacatgtttgtttatttattttaactttgtttaaataggtgcacttgacccgaacggtaacccattgccttctaaagctccttctgattttacctcttcaatttatggcgagaagagggttttcgactacttcgtttgcgatgtcggttggttgttttatactctcaacgattttttaggagtaggtaagtctttggaggttcctgacgtagttgaggctcaaagatccagagtatcgatgcccgtagaatatgactcttactttctgacaaattcagaaaatttgagacttgattctttaacagtttttgctggatcaaatgagaccgaaaatggctccgtggaactttctagtgaagctcaatccaagggtgttttaccccaaaacaccttcaagcataattacataatttacgactcatcacaggtattaacaaaaacatattattcagactaaattacaaattgtcaactgcttaattgagtctttagattttaccgagatatttaattcaatttgagtttgaccctagtgctgatgagtcttttgcacttcctctctgcgataactgtcaaagtgatgtgtccacaatatactgtccttcagatagcgcaaggtatgttttattaaattttattacttttaggatttgctccaagtgtgatgttcgtcttcactctaacaataaggttgtttcacggcacattagggtccccttaagcgaggtacttttttatcaaattaacatcctttttagatgcctaggccttactccaagtgtagaattcaccagacaaagtcatatcatctttactgtactgtctgtgaaactccaatttgccaactttgcaccgtcaatcacatacacgaactaggtactacctcatttaacttatatattaatttaatttcagaaggttcaacttcttttattcctatttcaactgcttatgaggctgtggttcaaaatttaacctccactactgacttttctttgagggagaggaagaaccaacttttggatattctcaaaaaggttgacgaggttaaaactcaagtttctaccaattgccaaaatgttgaggcccagtgttacgagaagcttgaatctgcactcagtgaccttaacaggatggtcgaatattctctagaagtcgtttctactgagcaaactgagaataagagacagcttaatgagattaactggtccgaatgctttgtagattacatgaggagcactcttttacctgctgattatctcaggtcctggcttcgtcattgcagactcagggatgaatttgccctgaacagctcacaacaaccactcaaagaactatttcctgatatatctcttgaggctgagctcagcataattccaaaagacacacagactcatttccaaactaagattcatacataatgtaccatagactttaaaagccacctcattaaactaatgcaactgcacatgtataaaataatatatataccatagaataataaagtatatgtataagttacgatgttaaagtatatttatgcaagttcatgggtactagagtgttcctcctcgaggaatggttttgtggcttgattatacatttcagttggttctgagtctggactcatgttctttacgacgtcaagagctcctagaaatcttccagcaagaacaaacacagttgcgagcactgagcgccatgagggtgaaagctgggctgagcctatgacaaacaacagtgcaactgatacaagttcaaggcatctccaaggagcctgaccagtttgtcttattaatctgtttgaaactacatttttcataaatgggagagctcccaccgtgaagaaacagccccatacttgccaagtcctggcagcaaaggggtcaaatggtaaatcccgaaccaaaactgtgaactctccactaaaaactatggctaatgggagtaatagagctccaattaggtgctgatggttgtgtaacgcgtttcccttaccatttacgacgtgtagagccctttccatgcatccggctctgaaaactgcagccaaaagagcgtaaaggcaggccacggtaacaacgcttcctggggcaaccttcgaatctgtagcgcccagaacaaacgccaataacagaaagccaactgccttccatctcaggggcatgtactcttctccgcaggcaacaaaacgagctgcatgatgggctgcaactgctccagacgccagaatcgggaatgccgcagtgcttggagcttttgaaaggaggacattcgctgatgataacattgcaacgtacgatactgtcggcatgaacaattccttcaaaagcttagaatctatgtttacaggggggaaataggccagtttggggaatgaagctccaaagtcgccaaggacccaggcagtccataacccctgagccagttgccaccacgtaacaaataacggagctgggagcacagtaacaaacagagtatgtaccacataaacattacttagagtcaagacaataaataacacttcaagtgtcaagaggcttgggtccgtaaagtatgatttaacactttcccatctgaaatatcccttataattatccatttttaataaagaactacaaatctcttaaaattaatttacaccctggacaggcgagttggttcacttggttcccgtttcgattctcatgaatctaaaaatgtgtaagatgaaaatggaatttttaaaacttaaaatacaataaagtaacataatgaattataaataataaaactcataaaagtgagcggtatttatggagttttaatggaaatataattaatataatatgttatatcactaacctttattttaaatcttttttacataaaaattagataataaacctagtatcaaatgattcttcccaaaatttagtctattttacaagttattttccatatgttcacaagctcaataaatgggaatgttatcgagtgacacacacatgatgcacacaacgtgcaacatttgatacatggcatttattaaatcataataatttaattcattttattttcaaaatttatcaataattccgagtctattattgaattatgttaatcaaaatttgacctcaaatatatggaatcaccttctccttaggaagtgcttcttaatttacttgattttaatacagaaaggcctaactaccgagaaataaaaattaaataataaattaaactgggttatccctgtctataaagagaagtttagagatttacgattatgttacacaatttgagtggatgttaccaataggggttggaagatgcaaatgattgactctagaagatttctataatattcagatcattcatttttgtttttttcttcccattctttaggggtgtgacatttcatgctgaatgcgtggattttatccatttcctcggataaagctgagttcaccaatcgatgtcgatccaggaggcttttcccttcaaataaacttgatactattacagcatcaaaggctgctccacatcctcctgatttgtctattaattttaagattgttggtgaaagtgcagatctaattttttcttcaactactgccctaaccatcttaaaaatttcctctaaaatattgaaatattaaatagtattctctgaatgcgcttaactgtaaaatatagatttcaaattacgattaatatttgtttattccccagctttttcaagtggcgggattctttagctatttattttatatgtattatattattccctagaactttctttataattaagttatttgattatatggtcacacatttaaaatttatttatgttaacctctagttactattatataacaaattctacacacacaattatggctaatacgtattaaattttattatattggaatttcctagatataagtttttaatctgctagttcacccgtatctttgtacctaataaagaatgttcttcccttgcttatggcatctccaactttgcgatcaagttttttatcatcttctggattttcctcatcgaatattatctcagccgataagttgttgtggtcttccttgttcagaagatacaccgcttttggttttttggtaattttattcgcatttgcatagccctccaatgcagacttgaccgtgaaattcttccagtcgttctcaggtggattccaagggttcttgaagtcttgaatatcaccatctaaaggttcatcagatgccataactggcaaagtgatattaacatgcttcttcagtggcactgtgaaagttgatccaaccttttcagagattataatttcattaacttcgtccaaatcctcactcattaggtatttctggagcaacttcttcatattgtctccgctttgtattccctttcttataattgttcccttcacaataatatcatacgaacggcctgttcttgttttcacctttaccaatacttttttttcaggatttcttattactctattgaacaaatcaactgaactcattgattcatcgctcgttaaacctttattccctcctttctctgagccaacactttcattagacctatttgattcattacctgtctcagattcagattttcccttcatatttgcattcgatatagttgattcattacccgatcctactagcgatttttttccactaacagttacattagacctatttgattcattacctgtctcagattcagattttcccttcatatttgcattcgatatagttgattcattacccgatcctactagcgatttttttccactaacagttacattagacctatttgattcattacctgtctcagattcagattttcccttcatacttgcattcgatatagttgattcattacccgatcctacttgcgatttacctaaaccaacacttccattagacctggttgtctcattacctaactcagattgtttgtgtggcttaatttcaccctccgaagatgtaccaacagggtttgttggtgtttttggtggatatggagctgcgttttcagagttgacggattctctggaccttttcaaggattccgattcagatcctgaacttaaactcgattgtcggataccaggaggaagaactcccaacttggcagggctaggagaattcttggtttttttgaaaatcttccttctacttgcgagtgggtaagagttttcctcatctgattcatatgaactgaaatttacatgaataacgttatttgcatcctcagaactcagggcccttaaagcaacatctctgaacgtaagatttccgtcaacagcatgcatgaactccctcccacgaatgtcaaactcctgcttacttccgtcggcaagagtgaaaatacccttaattcttaacaaaggattttcatctagcctgtttctaaggttaaccaaatctttgtaagccgaaacaggcttgttgatttcatatggagcatcttctcccatatcaatattataggtctggtgaccttttaatgactgagttaggtttgagactataagatgaagagcatctaaactaccaaggtgagtttgagggattcccaacctcaggagcatatccacaacttcaggatgaccattcaaaagctgtaggaatttaatactgtcgatttccacaaaatccttgaagttatctttgcccttggcatccaaataaacatgcgcatcctttttgcttttcaaaaagtcctcaacatcttttccgaccgtgaatgttgagccatagtcaacgttcttcgatgcctggggtttgtcgtttaaatcaacatcaaatttaagattttcgtgatttttttcttgcgatataggtgtttcaaagaataaagtcaaaacatggacgtggtccaaatcgctaactccacaaacctccagaagactttccaaagtcattccgttctgagacgttcccaaattctcgagtttacaatccctttcaaatccatcaacaattaccttgaactttccaaccagaattttgtccaagtcaccctgattctttgaaatctttgcaaacaaatttgtcaaaggctgttgcaaattactaatttgatcactagctgagacaccatctttagaaaggatattcactgagagtttacgaaccttttcaggggtttttgaatcgttaacaactgtgatgaaaaaccctttcttttttagttcatctattgggtgatgtaacagttcctctggcactttgtaagagggtaggaatgtactcttactagagaaatagaactttttgttggagtttgatgggttgtttcgtagatcttctaaaaagtcacccagagtttgttgtgtatcagggaagtgtaaatttagtgcagttccaggtccgttaccttcagggtcatcttcaataatgaaagagtaggttccacccaaatctctagatggatgattagagactccttttggaagttcatcaattccaaatacaccataattagtgtgtacattcaccttaaatgggtttccaggattaaattcgtcttcattgtttactatttccctgagaaagtcgtttagagtctcggctccattaactttgatatcggggccagtataactataaggcatgctaattctaactggggattttaattcattaacactctgtgtaacttttgttacgtccggaaattcagcagcacttcctttttgaggcgcgctgtaacttctattgtatattttgaaagtctcataattcatgtcgtaaaatactaaattataaaccctcagactcccatcttcaactccacagatgttcagaacagacctcatatcaacgatgtccaacaacgcaataaaacgacaatcaccctgaactttattgatgtatactccccactgtacactgtcaagatatttaccgtatttagatttaagtttttcaatcatttctccaggaataccatcttttggtcgaagaccttgggctgaaaatacagctttgtctccacaaacaacttttacgttaaacgacaaatccccatgaattgagggttcatagttaactccaaatgacattgttggattattgttaacgttttcaatgttaacacagttctttaagaactcattcaatgacattttaacgagcttagccagactctcgacacggcattggtgcttaacaccatttatcccaaccttaacgacatagctgttaactgcatccagattatttccgtgcatagtcttcagattaaggatgatttgcctcttaagcgcatcaaaatttgttttaaagtcattcactgggtggactgtttcggatctccaacctcctgaattatggccatcttttgactcaattgtgatattaagattatcaactttagtatcaggaaacaatgtattaagggttatgttatgaggcatatcttccatggtataggtttttgttacaaagttatgagagggctcctccccctttattgtaattttgtatttactaggttgagatgagtcaatatcctcattatcatcgatatattttgcgatatctgggtaaagattttcatcataatgaacattagtcatgcgatcttcttcgtcataatatatatccattgggattgtgcttcccattgacgagtcatatccagtttttggaccaacactcaaatctatacttacatgaaagtgaaagtaagacccattttcgggaataactgctggaagattacaaatttcgaacactttggacaaattagcctttccaaaatcttttaattttttcaagatctttgtattattacagggatacattcttccgttcttgatgagtgatatagaaatgtcattaacagcgtcaactgagtctccaaacatttgaacaatctttgaatagaactcagctacgggagaattaagtgtccctacgtttatcttgacaagagtactcaaacccaagtccatttgtcctttatatagtgtaaattttgcgataggtgaacccgatggtgatccgagtccatttaataaattaaaggcttcacttttcttcatttcttcaggtgatgctttaaagttcattttaacatgagaaaagtccttttgtctgtcaacaccttgacaaagagcaaacagtttttcaaccgttaaatttttgatcatataagcgtcacgaagtgtctccaaagaacactttaactctttaccgtcaacttcgattcttacatgacccatttgttcaggaggaacttgaattaaaaagtttctaattttggagttaagggtaggatgaggttctttcatattatcaaattcaacagtaacttcatttggtgtatttgttggaggaccttcaccgtaattaatattaatatcaccatcaggcctcaccgctgcctgttttacaaatttaaccttctttacattcttcaggtcctttattggtacgtctaaaatttcatcaaaatgaacaggtttatcattttcgtcaaatccaattacagtgtaggagtgcattggagaaaggccaaaatctataggttcttccacggccctgaggaaaaactccctaatggtttcgcgaggcttaggctgaattacaacattttcaaaagtaggcataggaggtcttgacccatcttctttcattgtgaacctaattttcattgtttcatcctgcttaggcttcctcttgatgaaatcctcaaagtttacatcatggtcatgatcatcataaaacctcaagtcttcgatatcatcatagcttggaaccgatgagaaatttttataaatcaagttcctaacttcagacggagataaataatcagcattaataagatgcgactctttgtcgccagagtccttacttattactactttgtatctcccatggtttctttgacgttcggacaaattatcactctcgtcactcgtcattagaatgaaaaccattgatcttatttctgatacatggacgttaagtgcagattctataagcctgaagtttgcattagttggaagctcgtcacaattaagcctacgcccatcaaccgtacgcacttctttaagtcgtactccttgtgtgtataactttccagtttttaagggttttataacaagttcctcatatttaccttctttctttaaaatacttatcaaatgatctataaagtcttgaataggaaattttactaatttaggtggtaatggtctacaccttccgttactgtccttagataaacaaaaagtatattctcgtcctgttaatggatccttccaaatcatttcaaaaggatgatctgaaacacctattcttatcctggaacttctatcatacaatccgtttgtccccagttcatcatcttcataaattttacctgctgaatctgagactacagtatagatttcttccattcttctgggatcctcttcaagccaacttcttatcttcgggttatgtctaacacttttaaggacctccgttctcagttcattcatactttctctaggatgtactttaacatgggttgtaaactccataccgtgcacgtccccatctacctctacatctctagcaagtcctgtattaagtacgaatttatctacttcaggacctccctcccaaaactccctcatttcattatgcttcgagttcttaatgtcgaagtggagaccaggtatatgccctttatatcccttcttttttagagctttcctaactaatctttcgatctcttcatctgatgctccgtagtccgcgtttactgtgaatcgcagtactctaccgttgtcgtattcaaattcaaccgggatttccattctgagatccgtttctgctgtaatttgatcagctctagttccaggtgggaaatgaccattttcatcagtattaaggtccacattaaagtttattttcttctttttattcattggatgaacttttacagtccgaatatgttcttctggtctaagtatatgtttttcatgaagtttttcatctacggcctctgtaaagtccctcttggttggatttgtcttgttcatttctactctaaatttatcataatgaccatccctatctctatataccacatcaaattgtggattaactgcaatcctaaacaatggaagagttgctgtcctttgctcctgcatgacatctacaacttcattaagaagcatatcatcagttacatttctgccctttttatcacttagtttaatgaaaaacaattcattaggagacaatatatgtccatccttcaacaatctatttaatatttcttcctttatgtatgacattttaactttaggattgtaatccaccgagattttgtatttaacatgcaaagtaccatctggaccatacacctccgtatcaaagttaaacatggccggtttatgattcaaataatacaaattaagaactttgctatctctattttgacaggattccgataatggaatttcagtcattacggtcacattttgatgatccactagatgttctaggtctttgtgttcttccaaacatccctggattgaatatgaatatactctataatctggctttttcacgttaaaatttttattgaaataatacacttgttctctaccaaatttgataatggatttaagtttttggctgacggggaatggttttgaaattaccactctatccataaaataaatatttactgtaacatagggaacataggtcaaaatcataataacttccttgggatatttttcaaagaaatcaaatacataatttttcagatccataaacttatcgttcattcccaccagacaatatgtagttgaatcatcctttgtaactgtactacagaaattttccatcctcttcctagttttcagcatatccttaaaatattttacatccacgtatcctccgtcataagtataactctcaacaataccagaaaaaggccttttaatgtgaattaagagatgaatagatggtctaactataacctcgacgtttttagttccattttccaccaaatgtttcatgtagttaaaagctttagtatcatcactatatttacgaccatttacggattttatcctgcagtcatgtaacggatccaatcctattgttttcattacttcactcttaaatgtaaaggcattgtcgaactgttcgtgaaaagccatgccatctgtactcatattgatatttctaagaactcctttctcaaatccagctattttgactgctattggtgtctataaaatttgttaaactaaataaaacattacatctcctggaaatccatcggctttaacatcgaaattacaatccaagtgaatttgtcctctacttttttgtttagaaagtgacacccacttaactgtacaacttgctgtgttctttgagagatggtccaacaaacttattgagttttcatctaaagtttcaagcttgaactttgcgcttaaaacgccatttctttgtctcaaatccaatacatcactatctctttcaatagtcacatttttaaaggtatgtgcctgatgcgggtgaaactacagacaaattataattaaaacaacttactgtatgtttcggcgccgttaaatctttaaagtttctaaaaacctgtttacccacgtcagtaaattttagcgtaggtcccgggccttccgggaaacctctactttcaaagtcatccttaaatgaagattttaattcttgatcaaatgaagataatccatgtactttcttagctccaggatcatactctttgtgtggtttaccttttaaacctatttctggtccatgccctggaaacattccgaatcctttatttggagtctgttttggactaaaatcatggtgtttgggagtaaattcttgtttaggttcaggaattttaaaagcacttcctcttgtaaacttaggccttgggcctaagggatgtttttgttcttcactattactccgaccattaacagtgttaaatattccattccttgttggcttatgagtaggctgttcatcttcagaatcagaacttgagtctgaatcggagtctgactccgagtcggaatcctgtttatacttataatttacttgggaaaagtgtgcaggttttgattcggtccatgtattggttcccatttttcttttttcaactggaacagactctgactcagagtcggaatcctgtttagaattataatttacttgggaaaagtgtataggttttgattcggtccatgtatcggttcctatttttctttttagaactttgacatcctcagttttggtagaatcaagctatggaaaacaaattaatatttcattattttacctgtattaaactagttggtttttcatctatgagatcgtaattaatgtacaatggcgaggctcccaaactaactgaaaggcctgaaaataaaattatccagcttacaattacctaatccttcttcctcagtatgcgctttagcaaaatttaaaaaatctccttttatcagtgataaatatataataaatgggattataaggtagacggttctattatgtctgcccagtcttatcttttcgttgtatacatgttttctatgtaaagaaagtccgtaacaacttcctttctttacagtacagtgatatgtttctagcatctttaaatcaatacaggattacatatcattaccgataatttagacatttttgttttaaattttagtctacttattactaataatttgccagttattgttaaaaacttcaatgccaatcattttaagacttttaaaaatcatacaaaagcttcttttgctctaaataatgcattaaaatgtgttagtctattatataggtgggagaaaatagttttagcaattcggactacaaaacggtttaatttcccaatttcgcaaaaaacgtttatttaaaaatttaaacatgtattcacaatataaaacgtcaaattaacctcatttgactgaaatttgtgagttctagacaaaactaaatcggcacaaagaattatgaagtcaatggttatttaattacacattgtagtcacattttaagaaccaattttgttaaataagaaattacaatacttactttatttatttggattaatgctcgtttatgagattattcaatacacatgtactctcgaaatatgcgagaattagttaaatacttaaataccaaacaaaaaatctagttataatacacataaaatatggtacaacaaatgtttacatgaactaagggtctatttctgaaaaggggtcatattacgaatctacgttggtttgaagtcagtgcgtaaaagtgcaacagaaaatctatataatttaagagtcataacactcgaacttaatgttttagaataattaaatatttttttttggttagaatatttgtaaaactggaggtttgtgatatatgtgtggaatcatatcaatattccatggtttagacattttgtggataattaaatttttacaaatcttcttagttattaagtctgggtcgcattttaattaatataaatttatttaatgtctataatacaactcataacagctcagttgttggatacacgatacacgatacacgagttaaaccttaacagattatgaaagatgtactctaaataaaacaaatagtgtttgaaaaattaggcgatttatagaaaactacaatcttcttcctcttcttccgcactttcttctggtagaatccgttggaattggggtgacgtcctcaattcttccaatctttaatccagagcgtgcgagtgatctataggtaatttgaaaaattaatttcatacctcaaagctgattgtgctcctggtcctggagtctttgatctagttccaccagttgcgcgtagtttaacatgaactgctgtgattccaagctccttagctctggcggctgcatcttgagcggccatcattgcagcataagggctagactcatcacgatcagcctttactttcatacctcctatgttttatgagtgattattttgggtattaagtttacctgttactctgacgagggtttcccttccagacaaatcagttatatgtataaaagtgtcgttgaatgatgcaaaaacatgagctacgccaaaaacatgttcaccctttacttgtggtcccagggtagtagggacttcagcgacttgggttgctgttctttttgctgaactcatggtaacctaaaaattaagaatccaccaagtaataaaatactaatagatttaattaaatatgaaatttagaacaaacaaatgatatgacagaaaataataaaaataacaaatgaggtataaattaatgatatataaaacgattataaagtaaaactcactttaaattgtcttccttagctacaaacttatataaaactgaccaataaaaaaatcgatataaataataactaggattttttataagtgtgaaactgataaatattttttatgaaattatcataaattattatataccacacgaatatccccatcattgataaaagcttataaagatttaaaaccctcgatttggatttcaaaataatttattatacttttatatatgataataactagacgttcttctgaagtatacagttacctgaaaaataaagtagcacagaggactgaggagtcagcttgtttccttttaccttcaaaacattacttgctgaaccaacagtaaattttagttgagaatatttctttgccaaaatgttccaagcgactctcaacaatttagactctgctccaattttcaaaataataacatataaattttttgagtataaattaatcagtcggagtatgcttcaattacatctccaactttaatatcatcaaactcttctagtgtgatccaacaagtttcacccttataaatttcaattggatattgtatcccttttgtcgatgttgatattttcccctaaatttaatttcaattcataaagcttacataataaaatatacgatctcctcttatgattctaacatttaagaatggattgatctttccgtatgttactacacaccgtcccgcgttcttatcctaaaccatatttactaagtttaaaagttacctcagagtccttagccacttctttaacttctgcctttccataaatggttacaattctgttctggccagcaatcctgataagttcatcccatgccatttcgagtatattatcaattttttctcccttaataagtttaatatttttttctgatagttttttctaaagtgttttaaatgttagattgttgctaagtacctgcattgcttttgaaattttataattgaatgcaatcgctactccaggccgtttgatcatatagacatcatcctgaaaatattaatgaaggtaggataaattacctgttttaaggttttggtatttgcatccaacacattatatttccaaatgtgattaattccataggagatcatgcttttaatttgttttcttaatgtctcagctatattaatttcatctgccctaatgattgcatcgacatataaacaatgattagtatacacaccatgaaatgtttgaaatgattttgatattagaggatatgttagttcttgttcaggggttatcatatcatgtataatatcgtcatcaacattacaatcgatatttggaacagtattggttgtgtttaataaattatttaaacattctgtaccgaaagttactcctgtgttgttgcttacatctgtattgttgaatagaaaacattcctggtgattttgttttctactgagtatacatttggatgatggattaaatacatgatttacatttattccatgacgattggttgtaataaaaccttcagtgaaagaaataaaatagaagataaggattaacaaaatgtattttaaattacacgagaagaaaatattaacatctttattcatttctttaaattaacaacagactatattacacattaaaatgaaaaatgagttatcattattattaaaatatttgatatttaacatttaattttaaataatattgaaataatttacagttggaatataatataaaataatattaatttattgataaaagaagatactgtgccacacttgatagaatcctcagaaaatcacattttttcaataaccttcattaacacacaaattaattttttatataaaatttgaaattgggatagattaacatacttccacagatttatcaacacttccttttaagtattttatttattgcacaccttaaaacataccacacttcaaattaaattcttatttaactttatatgtaattgttaaatattatttttgtcttctccatttgattttttgtaaaatttgttgttttatatatatcatcacatctccgctgatattgtgttatgtgtactcgacatataaaatactcttttaaaaaaattggtgcaattttacaaaataataacatattttatttaatataaataaattaatcaatttatgtatgattcaacgacatctccaactttaaaatcttcaaagccttctagcgtgatcacgcacgattcaccttcaaaaatatcaatcggataatccgtctctcttttcaatgatgatatttcaccctaaatttaatttaaattcttaaaacttacaaaaaataataactgatcccctctcatgattctaacacgtaagaacggattgatctttccatatgttacgacacaacctgctccgttatttctctaaactatctttactaagtttaaaaattaccttgtatctcttaaatagtttgttaacctctgcctttccataaagtgttggacgactgtactctccagctatcctcgtgagttgttccttggccatttcgactatatcattaatattttctcctctaatcactcttatgttcttttctgatagttttttctaaagtgtttttaaggatgaattattgttcattacctccaatccttttgatattgttgaattgtatgacactgctattccaggctgtagatatttatatgcatcattctgaaaatattaaacaatgttggataaataacctgtgttaatgtgactatattggcatccaacacgtcatatctccacatattactaattccatcgcacctcagctttttaatttcggtttttataatttcttctatattcaattcatttgagcatatggttgcataaacgtatttaaagttatcgaaaaagacataagggaatctttcatatgtgaacactctaactggatattgtatttcatgttcagaggtaaaattttgacgtattaaatcatctttgatattaaatggaatatttggaacaaaagcattggtcgttttagaaaaattattcaaacatcctgtattgttggatagaaaacatagcagtttattttgttttgaattgaaatgatatctggattttgtttgataaaatgaattatttagatttattccatgacgattggttgtaataaaaccttcagtgaaagaaataaaatagaagataaggattaacaaaatgtattttaaattacacgagaagaaaatattaacatctttattcatttctttaaattaacaacagactatattacacattaaaatgaaaaatgagttatcattattattaaaatatttgatatttaacatttaattttaaataatattgaaataatttacagttggaatataatataaaataatattaatttattgaaaaagaagatactgtgccacacttgatagaatcctcagaaaatcacattttttcaataaccttcattaacacacaaattaattttttatataaaatttgaaattgggatagattaacatacttccacagatttatcaacacttccttttaagtattttatttattgcacaccttaaaacataccacacttcaaattaaattcttatttaactttatatgtaattttatatgtaattgttatgtacttatttctgcatttcatattttttcaatttattacatttcttttcatatcatacaattatctttgttttttttaggattcgtatttgatatataaaatatttgtaaacagcatccgcatattacaaaataataacaaataaattttatatcatattcaaaattaatctgaatatgcttcaatgacatctccaactttaaaatcattgaaattttctagcgttatcccacatgtttcaccttcacaaatttcactcgcctcttctttggttcttctcaacgatgatattttcccctaaattcaatttcaatacataaaacttacattaaatagtatgcgatcttctctaatgattctaacatctaggtatggatttattgttccgtatgttactaaacaccctgctgcgttctttttctaaacaatatttactaactttaaaagataccttggaggcttcaaatactttcagaatttgtgccttcccactgagtattccaagccttttctctccagctattttccttaattcttccttggccatgtcgactatatcatctaacttttccccttcaaccactgttatgttcttttctgatagttttttctaaagtgtttttaaggataaattattgttcactaccttcaatgtgtttgaaattttataattgtacaaaagtgctattccagggtgtttaaatatgctcacatctttctgaaaatcttaaatgaacactaataacttacctgtgttatcttggacatgcgggcatccaatactttatatctccatgtattattaattccatatgacctcatcttttcaatttctgtttttattatctcaactactgactttagttctgcccttatgattgcataggcatatgtgaagttttccggatccatattctgaaatgttttgtgtgttttttgtcttacttgatctattattgccaacccaactcttattttctcctgtatataatcattttgttccttttcgtttaactccttcctactaatctaaaccattttatgttaatcatccttacatctgaggctaaatcagcttgttttttggttgaaaatgactggaaaggcattccggtatcaaaagtagaatccttagaaaaaccataagcaaaacctatttcagatggcttaacactgacaagatcttcaccattcttatctttaagtgatttcaccctcattgtatttatagcagaagatatataatctcctttcctaaaaaacttttacttttaacatcaaacctcaattccccgttcttgaccaggatcagggcgtagcatccagaagtttcgttctttcctacatcgatgatgtatccatctgaattagcggaatctggtttttctaatagcatgtcagaagattccagtgaatttataagaatggtttccataaggctgtttttactcgattcagtgtcgtttaatgttgaatataggatcatttcatattttcctccatggtgttccagttcgcacccaatatctgccagttttgttgcaacatcttcaattgtagattgtgttgacatgtcaaacttagtgagtacaaatatgaatggcttgtttagttttttgcactgtttaattgattcttctgtttctttagttactccagtatccgcggagattaaaattaacgcgatatccgactcttttagcatattatctcttattggagaaagtaacccattcgcaggagtgtccaatagggttgctgggtatttatgctcggcagtaccgaaattatagttggtatttgggtctggttttacaccacatagcgaactaaatagcgatgttttccctgaagaagttcctcccaaaattgccactactggtttccttgaatgaattggcgaattttcagaattctaagaattcgtgtgaaaatttaacagaaaatcttaaatattaaagttaataaattctagatattatatataaaatttacatgtaatttgttcagttcttcagcttcttcttcatcagttatatggaattcacgtttctcgataattaagttacgaagaatctttgccattttctgagaaatgcgaactgaaggattaattataattttagtcttgagtaggatgtatttgaggataaactttaggtttccttttaattctttgacatattctctaagagtacattcatctggctcttgatgtggcacttcatcaaacgttttacagattttttgggaaattttatttataacaggttgtttattctctgttgttacaccttgctcagttgatataaatttctgcattgttaataattcctcacttatttcatctttctcagttgttacaaattcatttttatctacacacaaatgtttaaatattcaaataccctcaggtgatatatcataaaccattcgatatttacttctcaattccaatccagtaggtgaatcaaacggtattctgcagaggtatcctacaattcttgggaaaatgggtttattcaaaacttccaattccacaatttcatcatttttgaatatctaaagattaatataattgtcaaaccaacctcagtcatcttcaatttaattggaaaggtcaaatatactcctgtgttaactaggaatacttgtgcatagttttcaccatcttcaagcttaaaaattgccatggtatttgttacaaatatgggtcttcctcttactctggatttatacttgtaggtaatttttttgatttgagggtctagtgatatcacgaatttgggtcttcccttctcgtcaaattcctgcggttcttttaacctgaaactcatcaagtggtctggtttgaataattctgacaattttaaatctgagaagtctggtggcatgtccttaatgctcacggatccctcaacctttttatcagctagatacacaagcgcctcgtatggagtgaaaaagtagtggataacgccttggtaggtttctccgggttttattctcttggtccctggccaattgtcctcatcatcatttatccaaatcaaatcatccctaagtttaaatgaaaaataccttaattttttggcttccaacttttcttccttcctttgcaattttactgattgcaaagggctattaggttcataagtctgatcactattctgaagtggtagttgaaagttgaacctattaattggatgaataggttgttgccaaggaatttgagcatgactttgggcaaatagagaactgccatataactgtgggacaagtggatgtgtatttagttttctactgtacatattgaatccattttgttgatatgtattgcgataattgatcatattaaatggaatattttgtttatgataataaggttgaattggtaaattattaagtccaacaggaaagtttgtatgtggattgatgcgattatatgcaggtttaaattttggagtatgattaaaattaggataatgtgtaaatccatatagttctgtattagaatcatgtttaatattaaatggaatatttggaacaaaagtattggtcgttttagaaaaattattcaaacatcctgaattgttggatagaaaacatagcagtttattttgttttgaattgaaatgatatctggattttgtttgataaaatgaattatttagatttattccatgacgattgttagaaataacagattctgtgaaataaataaaatgaaataaaaacagaattagtaaaatgtattttaaattacaatagaagacaatattaataaatttggacatttcattaaattaacaacagactatattacacattaaaatgaaaaatgagttatcattattattaaaatatttgatatttaacatttaattttaaataatattgaaataatttacagttggaatataatataaaataatattaatttattgaaaaagaagatactgtgccacacttgatagaatcctcagaaaatcacattttttcaataaccttcattaacacacaaattaattttttatataaaatttgatattggcttggattaacatacttccaaagatttatcaacacttccttttaagtattttatttattgcacaccttatctatttttcaagttatttattttggatgctcatttatttttccatatatgatttcataaacctttgaatcttctatttctcttactccatttgttttgcaatataacattcctgaaatgaatattaacatttaatgtttcaacctttcattaaattcatgttccagtattttatttcatttaaatgatgaagcaattccaaacattcactgaatgtcataatatcgtttctcctgaaatcaacttttaacaactgatttacctatttgcctcctctagcagtgatgttattatattagtacaagcatcattgaactaacattttaatatattcacatattgaaaaaatacttgttcacatacattcggttctcttttaactagtttacaaatcgacaaaataatcctaagaacggaaagctatttaatgaaaatacctcaatatctggttgatattaaatttaacggcgtcgtttgataatttatataagaattggcttaacaaagtaaccgtttcagttttaatttcctttaaaatatggaaaatgttaaacatacataaaattcaaaaatgaaaacaaggtttttgatgaaggaagtgacgtcttctggagtacaggtgaaaggctgaacacttaaattacgaaaatctccttactgaattcaaccaaatatgtataacttcatttaataattcggggtgaaggtaatgtgttagtgaatcttccttatgcttgttatattcgaggtagttgaagtgcgatttcaggaacaaggaaatgtctgtgttcgtcatatattttttctataaaataataaaagttaggaaaataaaacctgtataacaatatgttcaattattaggttgtgtattttataatcaaatactcgatttctaaaaaatgattcagttggtcagaaaccatgttacatttcaaatcccttgtaaagaagtaagaggtcatttacacagcacttataaaaaggatattcctctgcatcagataaatttgagtgttgtagaataaaatttttaatctaaaagatcatgatatattaattaacacaaaccattgggataataaatttgtattcaatacctgctttgttatacgtgaaaagtattcttgaaatttcagatactctaattaaaataatgagaaataatatgcttgattaacatactttaactctggaagcaaagaaactagtcttgcagaacagcttgcaaacaatttaaccgctgaatcacaattcttttccttccatgatgaaatatcttccattgtctcgattaatcttaatggagtcatttttggaaccagatgcatcttgtttgatgccaggattgacagtggcttaacataataccgagacataagatcaaaggcaaattatattcgaaagttaaataaatcaacatactctcaaattcttttaaactaaattggtaaatacttattatgaaataaatattatatatgatgatatttaactagattgatgcccaattacgattacaagagtagtcttttattcgttaggtacttcaatttctccgttatctaacttttcttgcaagtctctaggcttctgattatcaacagtacaacctattgcgctgcaggttccgagaacctccttgacagttcccttcatagttctggccatggaagtcggtctcattgtccttgcaacacccattaattgatcccatgtcaaattaccattatgttttatatttttaacctttttacgatcccttacaggttccttaagctccttgattaataatgcagttgcacttggtttaatttcaattttggcttgtctgttttggatagttaacttgactgtgactttaattcctttccaatttgctgtctccttggcgatatcatcaccgacttttttaggtgacatacccaatggacctaactttggagcaagaactgatgaaggagctacttctccaccaagttgacgcaagtagactaataaaatttataagaagtaaattatttcttaccatatactacttcgtttgggtcaggtttcttagccattttgataaggtatcttcctatagcaaaagatatgataataaataaaacgtgcaaattgggaaatgtaaaatttttattcagataaaatttataaaaaatgataaatataagtaatataaatgtaaatttatctatatatttttacgtgattccacaacccgcccccatcaaactgaattgatacttttcaaaacacatgattggcctatatacctcaccatttttgtttttgtttacactcaattgtatcaaaattttcactaattcgttcttctgtcactagagatttacacatacttaattatcaagtctgatgaataatctttaggtagaaatttagtataattgttaaaccagattaaatacagttaagttaaaactggaagtttctagcccacatagatggagtgtttttttcattgttgttacctaatttcatattgttattaaatcctaatccattaaataatgatcctggattaaatccagattctggcaatggtggtggtatcaagtgtggaactttatgctcagcttttggcccttgcatattcatagcttctggccttccaaatggcaatggttgtcctccgtattccattccatcgccattcattaatcgagcgtttgctttcatctgttaaaatttgaactaattaataaattaccctattgttttttataaattgcgctattacatcaataaagaatattgcaagggttgaacaaaataatgtaagatttgagataagtgctaccctgtagcagcttgccacgtatggaaaaggcatctgaatgttctatatttcgtttagaacataccatttgtgttcttactgccgttaaccacgttttgtgtgtaactctgttccaccataacgtgctaccgaatccgagggcccctgcaataatccaaacgaactaaattgatatgaatgtactaaaccttaccgctattattatggtctttccccaaaagaagtaccatattattcccaaagcaacaaaaactgtacatactacgagtataagtagcaactgaagatgttttgaggagtaattgtgacttacaatgctgttgtacccaagtaagttttcgtatactcttattctggctgaaatcccatctctacaggcagcaggacactcgtttacaaagaaatttttgtacccacccctgtgattttggctcgaattttgtattgccatataacccttcgcctacaatgtgtgataaaatttaatgtttaaactaaccttaacgttactaactcttctagaccaagtctgttttgccatatagttgtcgtaaactacttggtagagcccatatcgtgtctcgtccacagtgtgttgacgcttgcttgctttgtgaatgtagttatatgctaaattgaattttatactatgtaaactcactaatgggccctgcttctctccagtttggaaacaaaatgctgtaggccatacaagctacatatgctgaagcaataccacaacaaataagccataccgctttctgaattgggttggaatccttgtcccccccgtatccttctctcgttcttgccatgattaaaatttatattttatgttgcacatccgattttttaaaaaatttgtttcaatttaaatatttgattaaatcaattccatctatgtttctaggtatttttacttcgattatccactaaatggcctggattcctagtgttaaaaaaacaaatatttttcaaatatcagattactacgatattttttaaatatttgtgaattgcatactaacgtttcagggattctccaaccatgcacttggaggcataatgacccttggagttacgtattatctgtgtaccatagtcccctgaagactcccttgcttcttactttttatgtaaaaataaaataaatatcaacatatatatatagtatgaatgcgtattatatcataagaattgcaaaatgtaaatttataactgcctcatgatgagtaggaattttatgacgtaaaggagatggatttctacaatattcgggggagtttccccgtttttcaagtcctcggcgtcattatcaattagattcctaaggattctttagaaatttataatttatacctttgaaaggccttgttcttctcgtgtactagacgttctattaagttacaagcgaacttgtatcccattttcataatttgagagtaggtctgaaaacgaatgtatttaagttttacataccgattcaagtgatgttgagaagtatgcggtttgtttgttagtttgatcctgaggttggtgtgtatgatcctgggctttattatcagacccttttggcattgattcgtaaatttttgcaaaacccttcattgtaagtctatatagtatagacctagctgtctgtagtgacacaagagcattttcactgacctgagaaacgttaaactaaactcaaattacttgatgagtatcgagtttggacgaccggtcgttatcctgttccttaagcagtagattccatattctggcggatctaatccctaataatctctttactgatctataaacaaatttgtaattgtgaccaactaactcgaatattgacatttcctttatcattctctttgccttatgccaatccatgtagtatgattcctctgtgaatttatatcaatattaagctataccttgaggcctgtatactactagattatctggatgcctaataatcccatttaaaaacttgattagataatctgaagtgatagcctgagtgttatcaagggagtgtatctgagattctatgtcacggtaatggaggatataaggccattctctggtattgttattcatgaggacgtcaaaaacgagcttaatcgagtcggtatttcccactctactatatactaagtgctttatttcctagacgaatattttattcgctaaaatagatgttacctgtttaagtaaattctcagaagcaaactcgaaatctattttatagagacggttatcgtttaagttcgactgaattcctggcgaagagttataggttcctctggtcaacttttccaaaacattaaaaatttcatcacaatggtactcggggccctgttgtttattctaaaaatgatatattcctattggactaaccatcaggtgatcaaatgactctactgctactataaaatgtgaattaattagcttggaaaggcagtttgatataacataatctcctaaaaataatacacaataacaattcacttacccagttcggggaacgattctttaatttttttctgggatgtgattccatactttgaaatgtggagcagaacgtcgtaacaattatcatccagttgttgtttacagtttaggaggattaaaggtactataaagagcgacaacgcgttattaatgttaacagaatatagtacatgtgtaaccaaacggggtccagatgaactagtttcaagattatactccacgattccatggcggataagtataaccaaggcatttctaacaactttaaagttaaatttcgttgggttaaccaatttatatagcgatatcggacctctcaacagcaactgactggttactctggatgttaaccttccgaagtagtactcaataacgtataaaaccagatcatattctattaaatacatattagtggttttcaatctgatttttataggaatctctatctggaggaataaactgataatgtttgtggaagatcataataacatgtaaaattagcatttaaattaaaatatttataatgtacagatgcgataaaaatttacaacaaataatcattaaaatatcctccatcgaggtgaatttttcatcattaatgacaccataatttaactaccttgtccttcccgcctacaaaacacactcatcaaaacaagggaattttatttttacctgacgccactgtttttccgcagttactccagtccaatgtgtaaacttggtcggcatggccgggtaaatcgaacttaagtttgccggattctgcatcccatagcttgagtgttgagtctgaacttgcgctgaccaagtagttccctctacaactccacgctactctatatactctcccgatgtgtcctctcagtgttctcaggtattttcctgttattccgcaccagattctaaaaaccaaatcaaacagttaatttaccttatgctcttatcgaatgacgcagatgcaaaatatctcccattcgatgaaaaggatacctaaattaatttgaaattcatttttgtttattcgtaatgtttagaattagcttacatggtttattaactgttgatgtcccgttaatctgtgtagaggtttatttgaatcagagttaggcagccagataaacatagtattgtcgtcagatcctgaaaggagtctttcttgtccggattcctagggacagttgatgaattgaggctacttaccaccttgaacttttcgtatatcttcttcgactcctttatcatttcctccatggaatcgaatttacactttccactttcaaaattttcaggtgagaatggtccgctcttaattagtctattaacatttgacgtcaatgtgttaatccaatggccgtgaccttaattataatgatggattatcaaattaatacctttaaggtccttaacaagtgatccgtcattagtgttccagactttgatgagtgtatctctcgatgaactaaagagtctttccttgaattcagcagaccatagaacttgagatattccttttgtatgtccagatagtacacgtacacacacaaaactcttaacgttccatattctcactgtgtaatccatgcttccacttgccaagagtgggtattcatttgcgtccaaattgtggagtggttgccatgaaagcgctgttactgcctatgtatttataagcgtattaatttaaaattacctttgtgtgaccttttaaatcagtcccgctacccgtttttgggttccagattattaccttattatcctagacattataaatatgaaccgttgattaaataccatccctcctgatgaaagcgtgtacccatccggtgaccatgaaatactcataacccagttagtatggcctgtgaatgtttttattggtgtttgggtagcaagatcccatatccttacctacaataaaattatattatggaattaatactgtggtatctcctgatcctgaggctaaataaactccatctgggctaaattcgaggcataaaacagattctgtatgtcctaaagatttatggttgagaattttttaccctccagtgaagaagaacatctagtgatgggacggacgctgaatactgagatgggtatgtacgtaattttgaaaaccaattctccgctaaaatcttccttagatctacacagggcttcatctaaagtagttcttatttcttcgctcgtctccaaaatgaatgtgtatctgtttttttctacttcttcatcataatcactttcggccttcagaagtgttttaagaagttgctcaatttggtctctcgtaagactgcggatttaaataaatcggtttaatagatacctgactggaacacttgtagaagatcccaaataaacgtcattaacatctcgaaattgaataatgacctaaacaaacaaagtaaaggaaccgataatcaatgttatgatcaatgtaaatggaataaacaaatgaatatttaatttatgttatgatttaacttccgaatcgtcagaactcatccttattgttattcacattaatgaatacacttaatattttacaacaatcatatattggattaagaattccaaaatatagtacatatgcaatgaataaaaaattattgtttgactggtaggtttttatggcgatatgtttttggttttagtctaaaagatgccttaccacaactctgtgtggaaggcttcttaattttaatactatcaaaaaattttggatatggttcctgtagattttaatattttactagataaacaaaccaattcttcaacaattttattaatgtgttgcgattttactgattcttgtgtggaatcattctctaaatatttaatctctggaaccggtctgggattctaataaataaatcttaaatattgctaattacctctgggtcatctgtaaatatatattttctgttaggtttgtaggctgttggaatgggtttagggtttcttaaccttagtcctcctgtgtgttaataattttctaaagtaatctaacctttcgatgttacaaatttaagtactgctctgtcaatatacttttcttctatcccatactcccttttaattgtgttatattacattaacttactgaaccaagttatagagttggactaattgatgactcagaggtcttttttgtgaccttgctggagggttatgtactgcgtccgcgcaccattttgttagtgaaagtaggaattcctaattattaatattatttttctgtcatgattacctttgagagtgatcctattgatttcaagaactcaaggcaatcaaatggatttgccaactgggaaatatcatcaccatccaattcatttacttgctattaattattatttaagtattaaataccttgacaaattctttgaataggagttgctcgtactgtgcccacttaacttcaatgttcttaagcttctaaaactaaattagtgttgaaacaagaaaccttcaaacaatccagcatttcctgaatagtcatcatggctaattctttgctttgccaagagtctaaaatgaaataaaaggcctcatcttcgacatccaaatttctgcacgatgccgctatttgtgtaagttcactgtatctcaaaatactaacattctttgcgagagttttacaaagggctgataaaacttgcttgtttttaatgttccacctagaaaggcaattaaacatatccacaaattcagatgcatacatcttctcagactgtttaattattccatagaaaacttctaagaataatgattgaggaaacgagcctgatgaagcgtatacacttatgcactgaatcaaatgacggggttccatcatgggagattggatcgtgagatgcctagaaaactctgtaaaaagtcctttgtcgtagattttggcttcagtgaatgattctaaaactgaaagggcatcaaaaaacttaaatttggaggcattttctatgcaataatttgcggctttggaccaaagtaaaacatcatcaacctttgacttgaccacatcacttaaaaatattctgaactccctaggtgataatgaatccattattgaaatgtcagaaaaaactctttgacttgtaggcgttttatagtacgtgtcactaactgatgtggaatcagtattctcagacaatgaagacatggaacgtttgctgaatccattataatttacaatattgttggaatttaaagggtgtataactgaaaaggaataaaactttcggtaatttgctaagcggtccaataatttaaaatcaaaaccaagaaatctaaacaaatacattttaatattataataaaatggaaggttttaagaatcacaattgcaagaaaacaaacactcctcaccgttgtacattaattaatcaaaataaatattacacatttctatttaaaactttgattttaaaaatttgaattacattaattatgaaaataaataaagtggcccaaaaattggatttaattaaatttgaatactgacttcataatttttcactacacaatctgttttataaatgggttgctaaaatcacttgtaattaaatttgttttgtattatttttgtatgtgtatttatatatatataataaaatgttaattatttcacctgtgatatcacattagtttgaaaataaactatcatgctaaacaacctgcttcaatattatttacattctaaccttcttcataaaaatgagtgctgatggcgataaaaaggaatccgacttaaattttatgtcaaatgattttgatatagttgaacattttgacgaagatgactcctcaactgacattccattaccaactttcgacccatgcggctttcccaaagcgaaacacaggactatatctgacttatcattgtctaaacctcaggaatatgaggataatctgattaaaccactccaggatatgtctcttgatgagatcaaaaatgctcaaaaatatttgtacgaaaaacttgggaaagaaacatgtgattttataaaagaaagaagactaaaaaggttagtttaatgaaaaatattaattatatagggatgaagagagtaaaagagtgaatgaaagtgtaaatgaccagaaacccaacgactacacaccatcctctaatgaattgatatttaagttcaacaaaaatgagtttcaaaaatacgagtggatgaacccaccagagtccaaaactaaaaatgaagataaagatcaattgcaactacattccttgaggtttagctttgaaggatgcttgctaagtgaatctgaaacgagcgaacacacaacgtatgacacatctttgtacaaccatggactggacccagataagccgggttacacccttccagagttacttcacctgtcccagagtagctttaaaccacaagttcaggtagctattagaacactggctaatgttttgttccggtcatacaaagaattaaagacaacaaaaggttccaagtgtttttttgggtatgatcagtatagatggaacaactacattaatagagatttagacttgttgcccaaaattgtatactatatatgcgaatttcagttatcactaagtattttaacggattcattaaggtgcctatcacttttggtgtttggtgatagtgcattttgggaccagaataccgatacgaaagaatcacgttctgtttattctgttgtaccaattgaagacgttttattcgactattaccagttctattcaggagttgacatctactactggaatccactctatttggaccttttggatactgacttatttgacagttctgaccccaatctttgcacaaagggattcaagtttaaaaaagacctggaatcattttatttatcatcattacagggaaaatatgagtcacattcaaccgatgagttggtgagagagatttttgaaattccagagggatacaaccctgaggatgagtcggattttgtaatggataacagattgctgatgctgtcaaaaaataacattatacacaaaatgttgctaattatgaaaagatatgacagtaacacagtagttcaattttattgtaccttatcaatttgtggatttttggcatatttcaaatcaccattggcaaacgcattggcaaaatttgaaccattcaaagatcattatgaaaatctagtaaactcactaattagcaacaaaaacaatgataaatcaacacttcacctaagaggtgcagtattatatttgattaagtatctctcaatatacgtggatgatttgggctcttattttgattcctcatcctctgtagcactcattaagtatacagtaacccagtgtttcaacaaggaactttacgaacttagtataattttggatttacaaaaaactgaaaactccagagaattaaaaacgtactcttctgtcgctataaagtgtttgactgtctgggcaattcgaggatatgatgtcgattttttggaggagtttgtgcctcttgtcgatctagcctttttcaaactaaaagatagttttaacgaattcaaaaacccaaatgtacatcttgaggaattttgtgagccaatgacttcactcattacacatatttcaacatgtgtaagattaaacgatttccataattaccccgaccaaatcttcacaaatgttagtgatattgtttatttattttgcaagcataatgagtggaatgaggagtcgttgagttttttacacagccttctacagcttaattacgatcaccttaactcactaactaccttggatagtttgaatggttttggaggccaacttgatagtttatttaaaatatcgaatatactgttgaaaaaggtgcaggattcatttgagattccagatttactaatgtcacttacttggttcgaagggtatcaacaatcgggttcaggtgtgtgtttacataaccaggagctggttaaaaaattccttagcaggtccatgatgtcgtttaactgccttaatctagtccttaaaacaatagtatggtttagaaatttgggagagtctagcatggaaaagataactttggttaaggatctgaatacgttggatgaaggtttcattaaacttgccgaaaagatgattgcgaagttgaaaaaggtgtattttagtttgtataaaatcaagtcgttttatctcagtttctcactctatatagtcaagtcaataccaattttaaaaccatggttacagtatctgattaatttattccaatttggctttaatagctctgatgcactgtttacagtactggcactatcagtggattatgaaatgattgaagatgccttaatattgttaaagtataagttctcgcaaaattttgagggagttttaggctcctacattgagtttaacaagtatctctcaagatatagtgtcggggatcaaagactaccagtcgtttcattcctaggatatttgacctgtgcccccatccatattaccttaaattcccagtttaattttgaggatgaaatgaatttgatgtcgcaattgctctacggcagtcttagatcgaaattgttagaatggtgtgtccctggttatcagttcacgcagttggtgtactcactatgttcaaatgactcccaagatttgctatcaaatgttactgaaaaacagtatcaactgttaaaatcacttgtttttgatttaataggcgggaaaccagactataggagttatggtaacgaaaggcatgttgggaccagtagtgaaacaacacctgagaattcagacaccatctgtaaactttggttaaatgcattgaaaacttttatggcaattggacatgtaaagaatgaaaaaccatcactactacacaacttcaatgatgaagaagaaatgagtagaatgtgtagaaagttggtgatgaagtttaactcagggaatagtgattcacccattactgtgggactactcctgctgtttggttcttgtatatcaactgaagagtgttcgaacctagtttggtcagacgagtcgttgatgttgctaattggaagaaatttatggttggattttcaaacgtttagggtccactccaccctagttccaacctttagtgttggccaccttaacacacttattacacccttagagtcggattcagtttttaaattacaaaggaagctcttggagtcattctcagaccaaagcatggaaaaacaagaccccgtgctgtttataactctcgtgtcagttttgaagaattccagaaaacgtgaacttgaagaaatagcgtccagttcaagaagtaatttactcagagaactgttggtaaacatttcaagggatggaactgggttgataaattaatttgagtataggttaatggaagtgtatgagctctaactatccagccggaggattataccggaaggatcctgtgtactcattaaaattgattcttgtcgcaacagtttgtggtttggaagtatataaaagcacattattccaagtccaaatgttgcaaatctaatctaaaatagaggaaaactatatatattagataattatcaagaaaaatatataaaggaggtaagaatttaataaattagtaaaaaaattaaaatggaataagttaaatctagagagaaatgttactctcaataaagttatgaaaagtaagaggatgaactaaaattaaaatattagtgaattttataaatacacattttcttatttcagcagtgacactggggctgactagtaatttgaatagacccaatactgtaataatatcagaattatacataatttaataaaaccaatttgggttccaaatctttaatgtaagttatttataatattagtaattagattagatattctcccatgtccacaatttgtttaacacttgacttttttgtgtttggattccactgtttttttaacaactttactttttaaacctattttaatgtcgttataaaaatcattaaatttataacttttgtaaaaattttattgaattaaaattttaggaattgataactaatttgtaaacttcgattcataaaaatggcctcagtagcaactgaaaagttaagcaacagcgtcttagaatttaaaggagtcctctcaggaggacaccacgggtgggtcacatccatttcaactcctctgaagacagacgttaacacgatcatctcagcatccagaggtaagtcacaaccgcttaaatgatgaattataacccagctcatctgagtttcaactgctgtgaaaactaattttctgatgacaatttaaatatcttaataataaatctttagacaagagattaatgatatgggaaatgttcgatgaggatgtagatggtcaagtaggtgtagcaaagagggcattaacaggtcactcacagacagttcaggacgtttcaatgtcctcagatggtcttttcgccctgtcaggatcatgggatggaacccttaggttgtgggacctagtaaaggcatgctcagtcagagtattcaacggacacaccaaggatgtcaacagtgtagcatttagccctgacaacagacaaatcatttctggaagcagagataaaaccatcaaactttggaacacccttgccgaatgtaaatatactatcaccaactcaacccataccgactgggtatcatgcgtcaggttctctccaagtggaaaggaacccatttttgtatctggtgggtgggataaactcattaaggtattaactctattaaagaaataacccagtttaacagttttaattagttctatgaacaaatgattgaaactatataggtttgggacctaagaacatgtcaactgaagcacacattgtatggtcatgagggtgtagtatattcagtttcaatatcaccagacgggtcactttgcgcatctggtggcaaagatggagtagcaagactgtgggacatgaaggaagcaaacagcctgcacctcctggatgcaggatctacaattaacgcattatgcttctcaccttgcaactactggctctgcgcagcaacagataaggcaatcaagatctgggatctagaaaacaagaacattctcgcagagatcaataatgatagaacgaagaaggtgggactaccatggtgtgtttccttgtgttggtcccccgacggcagagtcctctacgcagggtcaactgacggaaatatatacgtataccaagtcagcaggaactacagctaccttacgaattaatatcagctctaatgtcatattattagttcacacctagtcaattcttgtgttatattcgcccgtccctcctgaccccaaaatccaacactctatatgtattttatatgtaaatactaaaccaaaaatggataatgaagaatccgtcaaaataaagagaataggaaaagatttaaccgtagatgattccgcggaagaggtcgagttccatttgtcgagaatcaaatacatagaaaacttaaatcacttaaaaaacttaaaggtaaaccttaaaaaaattaaaaaaccatatttcatgtagaagctgtctcttgtgtcaaatatcatacacaaaatagagaatcttgatgaaaatacagcactagaacatctagatctctaccaaaatcgaataaaacacatagaaaatctagaaaacttaactaacttgaggttactattactttttaagaatttttaggattctggacctctcatttaacgaaattgacaaaatcgaaaatcttggaaatttagataaactagaacaactgtacctcagcaataataaaatctctgaggttagattgctttaatactaatttcgcaggcgtcaaacttggcccattttaagaatctgaccctcctagagctaggctctaataaggtcagagactacggagatgtaaagcacctacaaacactaaacgctctatggctaggaaagaacaagttgacttcaatggtaaagatttcttttaaatccttatttaggcgattcctgagctcccaaacctggaaaagtgcagcatacagaacaacagagtgagggagtgggatgagtgtgtagtaaaaaatctcccgaatttgagggagttctacctcagctgtaacaaactcacagaaataccatcattcatatcatatatggtatttttagatagatttagcaaatatttagccacatcttctcatattggaccttggaaacaacagaatttctaagatacaaccattacctgagaataacacgcttgaggagttatgggtaagttttcatcttttaattctttcagttgaatgataatcaaatcgatactttgagtgacgtgaaggctctaggttcactcaaagcactcaaagtgctttatttggaaaggaatccactccagttcaagcttggtcccagttatcgcagcagagtcctggacattctcccaagtactttccacacattactcattttaccacagatctaactcaactggacgcaatacccacacataatagagtgtattaatttccacaataattcacatagcaataattttttgtatatatttaaaaaatgtatattatatgtatatgaacggattccgaaatttaccgcagataaatgacagtcaccagtgtcgtgggtaaaatattggaagatttgagggaaaagtcgcttatacactcaaaaagaaataaaaaacataagttaaaggatagtttaagaacaaaatccagtagaagtaatgctaaagtagatgaaattgttaaaagaagaagattcatattcaagcccttcaacaattctttaacgaactctgattttttcacacgacttgtgaatagttcaccaaaacctccagttttacggtctatacaccacccagttgttaatcacctacttaaattgtcctatagctcaaattacaggtttttacacacattctatacatatatccatatgatattgttattctataccatataaatattttataaaactcttttacttctctattatatcctttaggagttacagaggattggtattactgtctagtttgaagctaataaaggaatactgtagccgtaacggtccttgtaacaggatatacacaacatcccactcaaataagttactctctgacccagatgtcaagttcgataaggttttgttagtttctaaaaaagttctccagaaggtttgtttattttaaataacatttttaggttgggaacttgaaatcatacgataaaggccttctggctgaggtgccttatccaaaaccatcaccaacacttgggattccaaaactagtgctttgtctttgtccaagtactaaaaagacaaataggaccacggagtctgatttaggaactttaattcgatctgctcaggctcttcaatggcaggccgtctgggttcttcaaaacggcaacattgatcttctggaccctctaacgattcggtcatctcatgtatatttttattatttttacttttactaggagtgtattacaatttaataccataaaattagaaatagttaatttactaaattattgagtaatttgataattaattaattatcaataatttactaataatgtagtattcattgtcaacgattccttactcaagagggacaattgacgagacacttgagtttgcaaaaaagaatgatttgcttctttgccactgctgtaaagacggaattaaagtcgactctgagactttctctcagaaaataagttcacacaaggggattatgctcatggcaggaaacttaccctacgtgtcatagcaatacacatttatacaatttatgtatttaaatttaacttacacttgttcctccaaattatactgataaatactggttaggagctgttttcaaagagcacaaagttgtcagtgatcccgagaaccggattttcagaagatggcaactcagtcattgtaggatcagacgtgggttttgttgggagtatctcggcaggaagaaagtataccttagatgaccaggtacaaaccgcagtttcgatgtacttgattaagaagatgttctttaataaccttccatcgtcaccattcatacaccagtttactgccaacttttgtggaattaaagttaatttaaaataaggagacatgtaaagtacatagtgtggataaaatattgaacaagagctaattaaattatctataaagaattattcttgggtaaatagtcctggcggagtttcgagttgtacctcgggccattgggcctcctaaaaaagcctttgcttctgtgatttgacctaataataggactcaaatcgtgattctgacggcgcacagaggacccggaatagtacatctcgcttctcgcagaacaaacacctatatatttggaaatcgataggaaaccagaggagtaatcgatgggaccgttgaaggacctgggcctgtgtttgttacgaaaagtcggttttcgtggccctccaggcctcctgaaattcttgtttcgggagttgatgacgacgggagtgccgtctgacattttcagcccgaaccagagatctgaggggttttcgcacatgttgaacctgctgtcgctgtgaatgttcaccattccacaggtggagtcaatatcactgtccgaattactataagacgatttgtttatcttcgagtttgttttagtcgactggtactgcagagagctcgagctcttctttgcgcaccacaagtagtttttcgcagatggtttctcgggcaatccatttgagacacccagcaatgtctcgggcgagcacaccgtctccatgtcctccaggagagcgtccaagttcacgtcagacaaatgcaccacctcagtaaccggatctttgaccacagcagcttcaccggccgtaacctgattcaccagatccatcgctcagatctctaaagttaattatccatacctaacagctaatacatggatcatatatgtgtatataagtaagtttaaatcaaaattaaaaatcgacattatctttaccaagatagaaatataattaacatgctactactaatatggatatgataaaaacagaattttgggtatattgaattttacaaggtgaaaggataaatttacggtgtgaatttacctttatatagcaatatcctttgattacaccttttaaaaattatgaattaaatacacaaaatctgttaaatctccaccgtttacgaaacggggagcagatattattatatctgcataaacactatttgatgtggaaaattatctctcaattcatcttatgaggatatatgtaattaaaattaaaaatatatctatcgtacaattaataaacaactgatactgaatgtaatttcgaagacgtattgataaaaatctatactgtggggaccaattttgtttctaaaatttatatcattaaacaattgaatctgttaaatataaaaagcttatttcgttcaacagattgtgatctttgtaaaaaatttgtatatatacagtcatgcgctttgtatctttcctcatcttatacttcatttaaaatatctagatcatcatcttcagatttgaattcatttcctataatctactttattatttcatttaagtcttagtaattagatcctctgatccaatataataccttatttttatctattcattcacttaccgttttagtatttcttcaagttttttttaacttttttcatgaaattacgtattaaaaatacattaaatattaatttatgcatgaaacttcaaaaatataacagatcttagtactttaacttatttactctatttttatgattcctcatgattccacatgtgcgttggtttatgggactagaaattaaatttcaagatccgatttcctacttaattgatcattaatgtcattaattaattttaaacacaacaagaatcggttttaaattaattttaccttattggtagattaattatttgttagaattggaggagttgttgaaaaccagctgttctaggatgaaaggtgacgcagaacacactttggacttgttggaaactaattaccctagtttgtccaacttgatagtccagttgaagatgttcttgaccgacaagttgtaccacgagttgactggttcattgattaccttaatgtcggattcttcagtatcttgtgaccataaattgcaggttttcgagtcggttgtgcatcctctgaaggattctttcaatattctcagcttttgtaaacttttaaagctctcttcagaacttttaggtaattattcaattttaatattcaccattcagaccctaaatcggcactggaacacttgagtaaatatgataaatttatggaaagggatccggaagcatttatcatgttacaaatcgcaaaagtatcttaaattacttataatactttcaattatacacaactatacatgtatatacaaacgatataataatgtttagtcatatcattacgtgaaaagtggccagactaaagagtgcgatacattactcgactcagttcgtgagactgtaaacaactctctcgacttggatatttcagtccatagctcattttatcacgcatctgcttacatgaacaaagtaattgattgcatatacattatattactgttttatacttatgtattatacatgagtacattataataataggccactaaaagttattcgcaatgctataaagactgcataatgtaccttgcgtacacatcattaagtaagttttacaggtttattttacgtttagatgacatttctgaaaatgaaaggaaaaccatcgctgtaaccattaccatctcatctattctagcccccgatagcttcggttttggagaactggtactacttatacacctataaaaccgtttatatatatttaaatatatatatatatacgaaaaaagtatcttattttcatcagattcatcaacctataattgagcactatttgaagggaactgattacaattggctctacgaagttttattgatttttaacgagggaaacttgcaactttttgaagaggctttggaacgctttaaagggcaaatcacacactctgtattattactattaactattcacttttattgtgttaatgatgatttcaggagttaaacggacatgaaccggagctgagatataaattaacgttgatagccttaatgaacttggcgttcagaaaacctaacaaacagcggtctctatcatttcaggagatcgttgagcactgtaaaatccaaatggacgaggtggaaccctttatactcaaggcactggggtgtaatctcatccagggccacattgaccagacacagggaactattcaagtcacttgggttcagccacgaattcttgacactaacaagtaccatctatgcagttataatacacaccaactacttatataatatagatttatatacaatggtatattattgatctaggctagagttggttagacagaagctaaaaggttggataagttcaacaaatgaacttgtcaagggactagaacagcttattgcaaatccttccaattaatctactaatacactgctctatacggtttttgataaactgatatttagtcatccaatccagtgcactggagcttgatcagtcctgtaacgttgtgaaactgtgacttctttcgggtctaatactgacttttccttcaaaccgtataaataatctatcatcccagtgtatcctataacaaataaattttgggaagtgatggaatataataaattatacctatcattgctccattatcaatacagtagcgatcatccatggggaacagtttagcgtttcgttcctgcgccattaaatttgccatttcttgaagcctcaaattacatccaactccaccaaccaataatatttcatcagaacctacaacaatattaatctatatatatatatataggtataatgttattaaggagaaatgccagtaaatataaatataaatatatataaatatccttatgttattaactaggattaccagtaaatgccatggctctttctaacatttcaagcaacatggcaaatgtatgctcctggatactaaagcaaaggtcaactttgaactgctcatattcaaaggccgagtcttcacttaacatcagtttgagtttaaactgctcaattaagttctcacatttagtcagtaacccactaagggaacagtccatacctttaactacaaaagggagtggaataaggttctttgatgattttcgagcttgtaactctatagataaaccgggagcaggtttatttggcaggtacaaaagtcttgcgattctatccagcacgtttccaattgctatgtccagcgtctcccccaaaactgagtaaactttccgcttttcatcgtaggaaagaacctgagtgttacctccagaaacatacaggattgcaggcttcttatatccacttagaaaccgtcccatttcgacgtgagctacacagtggttcactccaacaattggttttccggtgataaaatgtaaagttttggctgctaaggctcctacatgtagtcctgaacccataccagggccctttgtgtaacaaatcagactcaaatctgataatgtaatccctgcaacttcaagagactcgttcaggagggaagccatattctccctgtgatgttttgagacttgccgaggaagaaatccctcaccatctggcggagaatacgttctccggacattagaaagaatctctccgtcccctcttattattcctatccctaacttgttggcgctgccctcaattcctaccacgtggaacttttttaaaaaatcttccgaatactcattcatttatttaaaactatcatctgcaaaaatataatttacacttcttaaacgggttaatgtttaagattatttacgagaattacgtttagaaaacccagagactgcacattagaataatttaccctaatctatgaaaactatcattataataacaataaaaataaatactatattgtgtaatgaagtatgatgaaaaattaaaatctagagtaaaaaattatatgaatgatgaggttttagctaccggcttaaaagattctttataatctctggtggaatccaacaatttagttctttcaccaactttaccagctttaacggagcttgcgctaagaaaatcacggtcccgatcgaaatggttccaaggttgctcatcgttctcatctgattgagatgcgagtagagctttttgttcagcgggcgttttcccccaaaggtcgacctgtttatgacgtttcgtaaattctttctctatattttcataatccacaaagaaaccttgctcgtgcatttctctaagacttaacaactccgatgcttcctcaactgttaactttgattctggactttgtttagacgattccttagttgactctaaggtctgtttaggtttagtatattcaccttgtgtgctaacttttaatcttatatatggtagtaattcattatatacggtgaggagtgatatattacattctggcggtctcttgaattgcgaatcattgcgttccaaataaagtgccttagataaatgtctgagcttctttttcagttgctggtccctcactaatgataaatcaaaagattcgcccttgtctatagtctcaaaaaattttatcaacacatcttctgaatcacattttcgtattatgtcttgacatattcttagaaattcgctctgttgatacacatatgggagagattccacatcgtctgggttggactcgtttaggactgaatctgcgttagaatagtcccagcgttgtaaaaaacgccttttagccttgtttatctttgtgccactaggtacattattggaatcattatttaaatcatcaggttgtgtgggaggggaggaacggttatttgaaggtgatcgagagggtgaattagaattagagtatggattaccgctagtggttctgctactgcttcgagttctaccatcactcatagaaccattttctctatacctactcctgcgatttgtatctattactagatcacgaattgatccgactctactggagttaaaacttgatctacgagtagtattctctattctatcatttctgtgagaagaagatctatccctgttggagttatgtgaatgtgaagatgaatgaaaggtattcgaatcacttgaaacatgattttcatatggtgaatatggcattatagaataaaaatcggataaaatctaaagttaagaaataatttttaaaatggattacaccataccaatttcttataataatataagttatttgttgtttatttgttttacagtccccatttgaaaattctataaactcatattttaacattcataaaattttatgttattttatctttaatctacactttattaatgggctaggacttggatttgtaaaatattacagttataatattggaaatgccacttttacgtgtgtaatttatcatttatcggatttatttttcaatatctctcaaaaatgccgttggatgtcaactcaaacctacgcaaactcatcagtcttgttgttagttcatagttatatacttatataattatacggataatatttttacatccatattgtttattctatttatatcttttatattatttcattgggtctgtaatatttttgtaggatgacttacgtgatgttggattacataaatatataaatttgccccggatttgcgttgctggaactcagagcagtggcaaaagcagcgttctggagagcattgtcggtatagatttccttcctcgaggggatggaatagttaccaggcggcctatagagtttcgcctaaaccgccttaagccttcgtcccccgaggataaatgtgatccctacatcgtatttgagggcaacgatgagcggttctacgactttgagaaggctcgaaaccacattcagaaactgaccaacgagagagctggggaaaagaaaggcattgtagatgatcccattgttttatctgttttctcgcctgattgcccagatctttcactaattgacctgcccggtgtaacccgggtccctctcaagaacagtgatcagaccgacgacattgagatgctgaccaaggatatgataatgcgctacgcctctgacccgcgcactataatccttgcagtcgtggctgcaaacgtagatatgtcaacgagcgacgcactccagttggccaaaagagcagacccactaggtgtgagaacacttggagttattactaaaatcgatttaatggatcagggatcaagcgcactttcaatgcttcagaatgacgaagtaccattaagactaggctatacaggagttaaaaacagatcacaaaaggatatctcagacggagtaacaataaaacaggctatcaaagtaagtttcattaaattcacaactacacattagataaacatatgtatacttgaataataaatattttagaatgaaacaaagttttttaatgagcataaaatatatcgtaccctgaacccaaacctttgggggataggctctctcgttgataaattaacgaatgttttgcttagacacatctcgacagttttaccagaactcaagcttgaagtgacaacaaggctaaagacggttagagacaggttggaacaaatgggggataaggctcccacggacccgaaggaacgcatagagcttttgtggcagctgatcagcgagttttgcgaaatgttcagcgggaccatcaaggggcgtttcgtgagcagattacacgagtttctggacgcagatgcagtttcaagtgtgcaaatcagggggatttttaatgatttacttgaccacttcatgacagtggacgtctttgacaaggtctcagaccttgaaatcgaccaggcgataagaatccacgaaggagattcacttccaggattcccctcacctgatacttttgaatacctaatgttacctcaattacagaaaatcgtaccctcagttcaagactgtttaggtatttttacatagtttctttaattactaggggaaatagatttttccacgatacatctaatacacaattaatttaatgtatagataaagtgcacatgacgttggagctgttgagctttaaggtagctgagaaggtatttggacgtttcccctcactgtgtgtgagggtccagagcctgagtcagcagttgtttaatgatgagaaggagaagactcgtgagattctggacaactacatagaaagcgaaacactgtatatattcacaaatgactcaaagtatatgattgagaaggaagaaaaacagccagaggagaatcaagcgtacctggacaaggcgtcacagatgacacagtcgacagtaaacgcagtgtccactacaatcgacaatttcagagggaggaagaccagatacagtccaacattcatccaagagttcaggcgacgcctcaacgtatacttctcaattgtgctaaggaatgttcgagactcagtaccaaagatagtcgggcatttcctcgtccgcaagagccagaagaacatgctttataagatttacactcaacttagccagcaggaagatcttgaccagctattcggtgagccagaccacatagcacatgaacggcagatactcaaggaacaagcatccgtcctttcgaaggcaattaacataatcaacaaagatttctccaaaggaaacgatttcgaccagagtctagaaagggatattattacatccacagcatcatacgcctcagtgttatacaaaaataagaacctaacgaatgcaactagtatatcaacagcaccatcaattcataattcatctgaaaacatgggaaaaggaagattcgaatcagttacagataacgtaaagggagctgaagagcctggaaaaagtagcctcaacaatgtaaataatgtaaaagaaatggacagagtgaattacagatttaccagtccatcgcatcacgcaaatccagtaaatatacataataaattaccgaggtccaacctctcaaactttggatcaaatatagttaacggattcaataatctaacagtatccaagaaaacgccttccaataatcctcttttcgattaatttcatttttcatattttaaacaaaatattttttacacacaatatattatataatgatattcatgatgttgatttctcttgtatataatgccatgtaaaaagtgcgaatcgaagttatcgaaactcgcaactcccgacgtgaagagggatggtaattccatatgaaataactatttctttagggaacagatgcgcaataggtgttaacaaattaattgaaaagaaggccaaaaaggataagtattaacttttaatagaatttatgccaaaataccaattatcgtgattattcctgataattatacataatataatacaataatatagactggaagccaaagggaaccaatgtaaaatatgtaaagtgtttttgcatataaatggaaagtattgcaactcatggtattttggaatgtgtagcagcatatgtttagcgcttataaaaacggaaggtgccacatttgcggtaaaaaaattgtcgacgtctctaaacatctcatgtcactagtttaagtggaaatcatgtaatagtaaataatgttatgtatgatatttgagtggtatgtattagtaccaacgggaatatgtaagtatatattaatgtagtggaaatattaaagtaaaaactgtcctaaattaaattttcaattattgaaatcatttggaataatttgataaaaggagttttgtcgggattcagaaatacacataacactatttaacaattttagaatacataataaaatgttgagagtaattttctgaaatattttaaactagtataatttatatttattcagtgagttcaatttcatcacttggattcactgcaataacattccattccaactctttaaacaatttgacgttattttggcagattttaatcatacaatagcgtaaaacattaggaaattgttggataaaactataaattttactctataaaataaaaataaaataaacttaattatagaataatattcgcaatataaatcaagaaagttaataacactcaactaatttgaaagccatgattagagacttaaaaagtcgactagagggctcaaaacccgcatttgtcaacgataaaaactctattttccaggatgttcggatcttttcaaaggtcccaatcaactcaaagaaatgcgccaaagtcttgacgaagattttgagtatgttgtcctgcggaaatgaaaagttgtcagagactgaatcgacggagatattctttggagttacaaggctttttgaagcagatgatgaaaggttgagaaggctgatatacctgttgataaagttgttgccagttaatgagactgaaatatttatagtaacgagttccttaacgaaggacatgaatagccaaaactacgtctacagagctaatgcaataagatcaatttgttatatcatgaaaggcgcagtttcaccccaaattgaacgatacctaaagtcatcgctggttgacaaacagccatatgtttcatcatcaactctactctgctcaattggaatgtcattgaggaactcagaaatgctaaagcggtggttttccgagattacaacatgtctttcaaacaagagtgaaatggtacgctttcatgccacaatactgctgtttatactccgctataatgataagcagtcgataaggaagttggtgagtatgttagaagatgatggagaacatgtaatatgctttataataagatttacagtttacaactcatcatttgtagaggcaaaaccactactacttaagtatttatcccacacctccccattggtaaaattggaagcagtcaagggctcaatatacctgttttcaaccacgtttgtccctaagggaggaaatgtaactaatgggacaaaacaatctaacggttccgatgacagggccaaggtaagatttgacaatagtgccaatgactataatgaacataacgatatcataaatagagtgttggaagtgttattacactttttaacaattggagacgtgtacacattcgcctcaatgcgccaaatttctaaattggcacaactaatgccagagaaaatacattcagcaaacaaacaattggagtcattcatcacttgcggtaatagaacactttgctccctggcactattaaccctgttgcagactggaagttcagacactgtagagagtcttttggcgcaggcgtccactttatccggcgactttaagcttgaagtcacgcgagcaattaagcgtctgtgcatctcacacccagacaagttcagacatgtgctcaagttcctggccgttaatttcaggcaggagacggcctacgcaccgaaggctgagatggtagatgcaacaatacagatcgtgtcagaaattccgaaagcaagaacaatggggatttctaacctgtgcgagttcatcgaagactgtgagtaccctgaaattaactgtagaattataaagtttctcggagaaaacataccgaacacgtctaatcccaccgaatacattaggttcatatacaacaggttaatgcttgagaacccactggtaaggagtgcaagcattgatgctctagagaacatagccaaagccctgcctgagttacgcacatgtatactattcataatacagtctacaaattcactgtataattttcaactccattctgatataaacatgtcacactattatatcagtactctggagaacggtaccggttctgtagattatttggccaagctggatgattttagtaacaaattaaatggtcaacgaaatggtgcatctgcaactacccatgagtacaaagtggataaagaggatgtatctgagttgatggaaatatataatgggctaggagaggaaaaagtaaatttatccaagctattaaataaactaaatgatagaataaatgatgttgatggagctgagccactggactcagtggatagttacgtgattgaaagattatcaagcggaagtagcacagaccgtacaagtgatagctttagtgatgtacaaatggacgtgccagtgaagactaaagtaggtctaccagctgatataatagaactggttggcagtgagttaacccctaccgtagatataagactaactgaagaggaggaagattataacgtaatggcaaggttatttgtaaacttaaatcacttggttattgaatttaatgtagaaaatactctaaataatcaatcacttgaaaatgtgtctattgctcttaatactaacgactgccacaactcctcatcatacactattgtacactccagtacaatagagcaactgtcctctaatgaatctgaagtcctatatatagtgttgaagaataactcaccaggtaatgagtacaatagtgtgctgatgggaaacgtacaagtaaatttaaagtataaagtaatttgcccgactgaaatatacgaagattcacttaatattaacaatctacaccttaatttttccagctatgtgtgtaagtggagtttaactgaggaggaattcagttcattgtgggaaaatttagaagaacatgaggaagtagggacgtataacttacaatttaaaagactccaagactctgtagatgaagtggtaaagtatctaggaatgagcgtagccatggaaaaaaatgtaaataagataacatggataaatttgggagggaaatttctgggagagtatgaagtattggcaagggcttcatttgcacagccaaatcagtcgacttgtatgctgaaactacaagtcaggtcagacaatcgcgttgtatcaagattattactatcacaacttgaataattcatttcaggacaaattgaggaattgtattgttatcgatattactagtattttgctggaatttcgaaaataatgacaataattcatcgggttacaatttctccgtgttcgtttatttttttaaattaattttattttttacattatatttaattttaaacaatagtaatatttttatctttataattttattaatatcgaaattgtgttgattgttgtcgatggattccacagccgaagaaactaaccaggtacccgagaataaggaaatgacagatgtatcctcccatttccaaatatttgatgaacctgatgatgaattggaggaatttgatgagatcggtactattttagtgtttttatattcatttaatataatttttaaatacttcaccggttatttaaaaatatttacagttttattcacaaattttagaaaacatagtgactgttgatgatcctgaaatagcagattggaacgaagattgggaaactgcaggtaatacatattcgacccatttatatgtgtacaggatgggatgatgaagacgcagaaagtgattttgtaaagaaaatattacaggaacttgaaaattatcgtaaaacgcataacaatgaaaattaattgctttataataaataatatatactagtaaattaaagtgttatttcgcatatttgcttaaacgatcacaccttacgtacgcctcccttttaacttctttcatatgattgtccaatataagattcttaatatcaactagtttgtcgtaatttcgaacagttttatcgtgttgagtttgttgaattatgggagtaagaattgcgatattagattcactgacggaaacttttaataatttaatgttcttattattataaatgattagacaatttgttaaaataatgaacgacttgaaatcagggaaaaactttatattcctgtttacacaattttctaaattgtactttttgtagtagaagttagtgatttcttgtaatttgtcatttaattttgtggattttgagaataaatttagttcttccaaagcgttgtggactttcagggtcttcacatttttgccgtaagattccacgaatcccacaatttttactccatttttaagtgttatcgttactttattattttttattgattcaattattctaggcagtaacaaactctctctaaaatttatatggttgtttcttttcttatttatcatgtccaacacattttaagcgttttagaatataaacataatatataaaatgaattatgttgttaaaaccttaagcatgttaaattgtgtgaaaaatattaagtattgttgagaggattctcaggtgatttcttccactacaaaacaattagtattttataattatttggtgaatgtgttacaagtttgtagatcatatctttatattgcgataatttgagattcggatattcttcctttaactcagccatcttgcgctcttgaaatgccatgtaagtctatacaggaacagttaaattagtatttaaggttatttatataatgtaatgataagttaggtaaaacttactgttttgagtgatttttgttccttatcaatttgtaaagaactcaacacattatcaattccagaagctaaacattataaaatgttaaataatcattatataagaagatgtataaaacattaaataaagggataaatagatatagatttattagtatggtatacaaatgtgtatggtataacctgtgatgagatcaacgtttttatcttcaagatcaagttgttcaaacaataattgatggttttcattagccattaattcaccgtcatttaataccaaatattcctaaatatttattgagtatgttattataggataatctaagttaatagtagttatataagagaaacctcttcttttagagaatccttttgtttttctagttgcaatagttgattctttaagcactctgcccttgtaaccttcggtacaggagaaccctaacagagattgtaaacagttacatataataaagttaataaaaagctgataaaaggtgataaaaaaccttaggtagttttttattagaattaagttcagactcttctttttctattaatttacgcaactcggcacgcttctccaacttctcttgatgtttacgtaactgttcattctataaaattatacacagttatgatacatattaatataatgttatataattatgaaaaattaaaccttccgctcttgcttagctttatttaatttatcatcgtcttgccagagcttatctagcctttcttgctctttaatttgagcggccagctccttctgctctttccgcctctgaagggcctccacggccttagtattaactccagaatgcttaggcattttatatgcatcaaataatgaaattattataccacattatataaactgatttacgacattccacaccacaacacttctcataaattataaatattgtaaataatgattaaattaatttaatagtaattgagaatctattatgaataatttattggatatttcccggattcctatctatcgtaataataccaagaatcacaatcgaatgataaatacacacatatttttgttccttatttttaaattaggctaatacttatagtattaattggttaatcttgttcagtagtattttagtgttcacttagtcccatataaccttgttatatacctgcagtacaatggaagtacagtaaatgtgtatatttctatcgcattcctactcatatttatctaatttcaagcatagaaatttgtgtatttatagcataaaattaagaaaattaaattctaacttaatttatttaaaaatttcccaatcttgctcaaatttcctctcaatcagttttatatcacacaaacttaatgtaataattttatcacattgttttataatagatcaacgtcaaagaatagttttaattataaataaaaagcgcaaagtcgaaatagttgtatattaacgcagtaaagggggaataggaggaaatgataaaagggcgtgtaaattatgagaagaattattgttaaaaatgacaaatcgaaatgttcaaggttttgtaacgcagttctcgataaagtaaaatcgttgtttagcaacggagatttaactactaataaatgttttgttcgaacagccaccttcacattattgtgtataccttatggtttattttggctgactagtattacttggtttttgagtcttaaaccctacggatatctcgtgccgacctttataaccattctgttcgttgtttctatcctactcttcttcttttgtagtttcagtaatcctggaattattccgaaacaaaatccaacttatgactcttatgatctttttacgggattcaacagagcatgttataggaacaagcattccattcgggccgacaagccccaatttttaatgattaatggtaggtacttgaggattaaatattgtgaaacgtgtaacatatatcgaccaccaaggagtgttcattgtagactatgtgacttttgtgttaacaggtttgatcaccactgcaagtggataggcaactgtattgggtacaacaactacaggcaatttatcgcatttgttttcaccacatttgttcttatcatagctatgatttgcttatctattgccagggctgtttatatcaccagagacgaaaagatgctaaggctcataatagaaactaccacgattcttgtttatacagtcttgttctgttggttcatagccggcctgactgcttaccactccttcttggcttgtacgaaccagaccacaaacgagcagttgaagggcgtttataaaatcttcaacccttggaatcgcgggattttccgaaacatcagggaggtttggtttgtaaaacgtaagaaattgacctatgaaaccatcaacactttcaacaagttcatgtataaaagcaccaatggtgactgcgagaataaaaatagtgtaaaaatgagcaaaatatacaatcctgtgagtatatttgataatatcggaaatttgaacttaattaaggactatttagccggcaaaagactaactcttaattcaatcgaatccatcaattccagcagtctcgaaagttcatcttcttgtgagcagaattactccttcaaggaattaacttctaatgagtatagacttaacaggaccaatgatttgttgtatgattgctctgacgaagagcatatttccaggtccgatagtctcaagagagttgccttcagcgaaaacgtccagaggttcaattctctaaactcttcgattaaaactctcaaagaaacttaccatttcctcaaaaacgatctcatcaataacaaaatcggccgcgtttccgacgacagtcaacttgatagaaaaaacttaacacgaaagaatgggatggacttcggatgaaaagtcaccattaacatgtaatataattctctatataagatatacataattagcaaatgtgtaaatattagtgattaaattccttatggtttgttctgataacttcatatttgcttctcttatatatataatataatatcgggaacgccatcaatccaactaaaaattatttaaatttaattaaaagtatacctaatgtaacaatttttgctggtgactttaaggtgttattaacgtaattcttgttatctgaggccagcgggtgtttaattctaataacgttgtttttgtttgttttctgggcctttaaaatcgcgacgtatggtccaacattatcaccattctccatcaacaactacaatatcattatcattattgaaagttaattattaatgaatgagtatgggagtgtagtgattactttatgggttccatcacagtaggggaactttttactttgccaacatctacaaacacaaactttgacatccttggcgtcagttggcggaaaagtttccacaatctacatacatgtattatgtgttactttttaggttagtataacaactactaatcatccttaataaactaagtgaatacaataatactaaaatactatgttaatggtgtaacataggtacttgtgagaatttttggaagcgttttgtgttaaaattgaggctttctagataatcgagtggactggacatttaagttcaaaataaaaattaataaatttcaaactacaccatgtcaaaattagtgattcagattcaatgatttaacctgatttcacttcattctaaaacacaccataaccttccatacacaaaatcaacacacaaccttgtacacatatattctcaaattattaaatttaataaatttaaattaaaataataaaacactcttaaataaaatgtaaactgtgttataactttttagtatgactgattttcctgagtcttgggtgtaataggaaattatcaatatactgccaaaactctcttgacacagatgcatcattatgcctatgtgatctacttattctaaacacctaagtcacattaaactacactataattttatctatgtataccataattttatctatgtatactacaatttcaactatatattctaagctatgtagttaataaaaatgtctaagttttacttttatatcccaactgcacatttcactcggtactatatctccatcatgtacaaatagaactcctctacacaatatttagatattttcatagattagcttgtataactaagtgacatgattaaccatataatttgatacttcaaagtcatgaacatatctataaaagactcgaacgggtagttgttaaattgccacctttctcctttcacgttgagaactacgcatacgacactgacccagtcgtgattggtaaatctggatacgtaggaattctcaacaactctaaatttaacgggtttcttccctactgtatgcactatctcaactgcattcattggtaaatttgattgtagaatgccatctaagaggatttaatgattatatgtaaatatatgtggttaattatatatagagcaggttgcgtgtagtttggtaccatttttcatagattggtgttggtcaacaaattggtgatcttgtaataattgttttatattttgcctggatattattgagctggttcccgaaggaactattattattggccttttgcgatatttacaacatatctcatccactaccttcatcttactcactaattcaaattattatacaaatatagtaaaaatgtgtaaattgtgttataaaattctaactaaattatcagtaaataatctaaaacatacttgattttgatgaaccgtgatctgatttgtgtattttcttcacactatctgaagttgcgtctgccttcattagtatcttttcaaatccttcaccatgtgctgttaataatgagtttctggtcctcacaggcctctcttgtatacatgtcacaaacacgaatgtgttcaagtattcattgagctgattgttatttgacaaattttcattggttcctccattttcatcagactttacatttttaacactactgtgtaatttactcaaggaggagtacaggttatgtagtatatctttaactgttaacttggtggtactagtcttagaagaggtttctaatgttttccctgggattttaacatccaattggggattaactgctctatattccactttaaaattaagcaattctggtgaaactttaatttcttccagaatagatttaatgcgatctctttcaaggatatttatatacttaaagtctctgtcggtaacgaattggtatgtgtactcttcacgcagaagcctaagcgccaaaagtatatcggctataaggtacatttctcctcgtctgctggtaagtcccgaaggtgatagaacgttgatctgtagattaaaatccggtaactgtgcgacaagaaatccctcagaagcattcagaaattccaccacataattgttgataattatagattttaggagtaaaatagattcggtatttggggaatctcgccaatattccgaaaccagtgatggatcaggtttcaaatcccaacttttatcaaattttatgtaattcccctccatctatcgtacaaggccttttaattattaagaatattacgtaagcaactccattgttgtgtttttaaaatacaaatatgacaaataaaaatagtaaggtcatatacatctcccgacgtcaacacccacaatttaatacataataatacaccattattattatattttgtttctaataatttgtacttcttgtattgtttttgttacattaaataactcattttgttaacacaatggatgataaagctgagcccgttctcataagggccgctggtataatcatatataacgttgatgtcgagtcaaatgtagtaaaatatctacttctccggtcctcttctaaacccttccactggactccaccaaaaggtatgtgttaaacctattttatatacgtttgtatatcattttgtttcctcaactattagtcatattggaattttttatatatttttattttttaaatacctgatttcatatttaatgtatatagtaatttattccttgataggcaggttggatcctggagaggattccatagatgctgctcatagagaaacactagaggaagctggccttacgaaagaagcatacattctccacgatgacttcaaggatgtatgtaaaactacttttatctccactttatcactgtgaatttgtataaatatggttacaggtgttgaattaccaagcaaatggaagggacaaggaatgtgtatattttttagctaaaattgctgatttccccaataccaaagttacactctcaaatgaacacactgattttgcgtatgtctaactcagttatatgtttgacagtggtatatttatgtttagatgggttggaattgaagatataccaagatactgtgacaaagaatcattgcgtacaatgttcgttaaagcccatgaattcctgtcaaaacattacaaataactaatctataatatcgtgttgtattctcagtatattattgactatattagtgagatttgtcaaggtttaacttcattgcttgtcttctacacaattcttgtaattcctcggtgttaatatcagacggattaaaaaatacataacgaactacagacccacgaacaaaacaatttactacagacaactacaaaacattaaatattatattaccaggtttagaaaagaatcttttttatacatagtaagattagtgatagctgagtaaaaaaataccagatgtggatagcgttcagtatcgttagcagtgacattggtgagcttgatgttgagatattggtcgacagagtggagtttgcctgagatttgtaaatcattcttcagctcaacggtaaccttcgcattcttctcaaccaaactttgaaagaaattataaaataactaaaataatatattattttatatataaaaattaccattattcatataatcatctatatgtactgtacaatatactaaataatagtatgtcatccacaccataattgtaagtgatttaatcataaaatattattataatttaaggaaaatataatgaaataaaggaataaaggctaaaaatataaattagaatgaaatataacggaagtggaattttagtgaattggaatgtgtagtatattttttaatgatttcttaattaatttgcaaaatattataaagaaatttcttgttaattttttaacaatatctaggcattgtatccgagtaatgttgcactgggtgggttgttgtttatcacacttttattaccgttgttgttacacaagtactaatcgattcctacacttgtggactggccagtaataaaatttgtgggttaaaataataaaattatcattaaattggggagagaaagaggatgtaggagaagaataatgaattggcactgttatgccatgattgcacctgtgtatgtgtttattacgttgtttggttgtcgttagtttattcactctctaacgccatagagctttaattcatgtatttataaccttatagattacctttttatatacaattttatatctttcgtggtataaaattgttgcttattcattattaattaggcgttttaaaaccattctttaactgaacgttaacctaataaatttatcgatttctattaaatatgaacgttttaaaatttcccatctcttatctaatcattctgatacaattttcatacaacaatggtattcctcacactattttgttattctacacattcctaatattttacacatttttatttacttgtgctatttaagtattttttaaattaattttagtagttaaactttttactccaaataaatattttaataatttttgtaaaatttgttgacacattgtgaaatgtgtaatattaatttgataatactattttagtgttatgtcaccctgtatctgaggaatctaatgttttgcgatctccgaaaacagtgttttcaccccaactgaccaaaagccttaaggaacgtttaaatcacttcggttcactgggcccttctgatccttacaactccaaaaggactgaaaaagttacagaaaatttgtctaaagaagaagaaacccgacccaaggaagaagacactgaagtcaaagaagataatacccaaactgaggttaatgttaatgaagaggagaatccagtaaatcaacatcaagaagaaaaagttgctgaagaaaagctcaatgaagaaaaggtcaatgaacaaacggtcagtgaacaaaagcccaatgaagaaaaggtttctgaggaaaaagtttctgaggaaaaggttgaagaaaaggtcaatgatgatctagatcctgcctatatctctaatgtacccttcgatacatctagcactgattccacaagtgataaggaagagaaacctcaggagcctgaggaagtaattaaagccgagaaagtagataatttgggattcaatttacctcctcaaaaacctcttcaaaaagaaccaaaatctacagaattaaaatcttcagaactaaaatctacagaattaaaacctgctgaaccaaaactcaataacagaccaaaggatagggagttcagttttacagattttgatggctttatggttaataaccgcgaggatttgttaaagtgcattaatgaccctcacgactttgtacttgtgctcgatgaatctgaaagtatgtccaattacaattggaagaaatatgtaaaggaagttacgctcctccttgcctcctcaatttcacaccttaataaggataatactctgtcaatagtacattactcaaatgttccaacccttagacttaacttccaaaaaattgatcctgaggctttccaaaatactttagataagatcaatgagatgttccagatgagacgctcgtacggcaaaagttacactggaaaagcgctcgaatatgtcagacagcaactcctgcaccttcctgaaatcccagagggaagttcttcagattctccgaaagccagtaacaaagtggttatattgatgactgatggggcagcaaaagatattgagaaggcctataatgagtccttggcactgaggtataacggagttgaactgtttgtgttcgccgtaggatttgtgaatgaggaaaactgtaggaaactggtcggctgcccgaatgaaggccactgcaccaatgttttctattcatcatggaactctatattactacaacttcaggagcttctcaagttcatgtgcatagatttgggacgcaacgcaacctgcaaggaattctggtcagacttcagtgactgttctcgtccttgcggcgggggtaccaagagggcgactttcctcaagtttacgaccttaacggaggcaacagcaggttcagatggtaaaaaaggtctcacgtgtgaggatcaatataggtatacaactgacaaggttgtacgatgtaatgagcatccatgtccgcctgaccagtctacacttttgcaggatttgattaaaggaaaaaatggcctgtccactgacactgacatgttaatggaggtgaaaaagcacttgagagatgataacaccgttgatactcacatgaggacaaagaatcttggggatagggttcatcatagacatcattctcacagttatgcccctaaaaaagtgcctgaaaaggagcctaaaccagacccagttgggactaaaattctaaatgacttgctggatgggaagaaagaacccgatcctctgcctttccatttgctgggtgaaaatgagcatcatgtacaggtagaacgtatattggatcaaagtgaagttgatactccagtacgtaaacataccccaacatctcccactaaaccttcaacaagtcactctactagacatactcaacacgctcaaactgtacatactccaagtcaagcaactgtatacactccaccttctccaactgtacatactccaagtcctcccaccgaagaggattcaagtgttcaaactgaatctgatcagtcagatttagatctaccagaaactccattgaaagttgatcgagaggtccagacaaagaacttagtggatcaggctatgcaaactgagcgtgaaaaggttagcagctcttcacagacagagaataacaaggttgatggaagttcacaaaccgtgaacaacaaagttgatagttcaactcaaacggatcccgatacgacacaagagcttggcactctaacatatgatagattaaaacagcttgtaaatagcgagcaggccacgaaaagtggtccaactgaagtagtaagtgctggcttggatgttgtgaaggagggcgtgaataaagttgatcaacaccttaaggaaaccatacaacaattacaaggttgtttactagtgatatattagtagatatagtcatgtttatctttgtacatatttttataggaggaagatggaaattatttgtattaaagtttaaacaaaaatttaaacaattactggaaaatgaaaacttcaaaaaactaagtaccatacctgaacattttataaatagtcgttaaaatatagatatatattgagagatgagagtgtaataattgtataggcgctgtattgatagtaataatattatcggcaatatcaatatcattcttttcatatcttttcctcagagagtaatatattatctaattattcagaaatatcaattattgtaagaatattcacccgaactacaaatcgtgtgaatttaaataatgtttgtttaggagagagcctgtgcgtcggttatttgatccaaatgatcaagagtttatgaacgcaggagacggagatgatgtggaaccttcagaaaactaccaagtctcgaatatggaggatggaatctgggcctaaggttacacacatctctgataacaatcaagttatagaatatattctcacacagttaaaggttcaatgaatatttgaggggatttgtggataagtagagaggtttaatggtttaaatcaaatgcagtttaataaattgtttaaaatgtagtttaaaaagtcaaattaccgtaataaatcgaatgtagtttaataattctaaaatggaagcttaacgcttataaaataacagtgtgataactctaaaatggtagtttatactaaagttggtttaaatgtagtaaaagatttagaaatggatttaatgggtttaattgtttaaacacacaatggggtgtaattctatttaagctttagatttaatctccaagctaattttttaatcttttctatacatactaacttgtttttattttgttttatcagattcttacattttttcataggattccaactttttaaactaatagttctattcattaatagtttttaaaactattttaaatataatttcacgagcaaatttctaaataattttgaaaatgacattttttaatttctcccttaacactgtacaaaagttaagatgtaacacaattggtaaattgtgtagaggattggtaacaaagagcgaagcgacctgcacccggaaggtgtatggcgaaaatgataaggtaaccttgggcccacccacctatacaattttttcaccagaggtgtgtctaacgctaaagctaaaacgtgatgaattgacgggcgacaacggtcttttgctgactggaatgacccgtttgaaggacggctctaactccttcaataagaactccagaatctcctcagttctcccaatggagactctggatcgcctgagtgaggctataactagaagttcagaacacccagtcacctttgaagctctagacggtggctcagtagttgtaacaaacaacagtgatactttttcgataaagttatatcccagcctccctggccttaatctaactcctggaatgcttccaacaaataaaccaaactcccacattaattttacagggaatcataatgaacatgctctactcaagcatgctctacacgacctctcaacttcaaattgttaatttattacacagtttacattattatttatttaaacttatttataagttttattatttcagttgtcgttctaggtatgaactctaaagtatacggacactcatgagttacacctgaagttcactgttaagtctcctatcacttaactcatttattattattaatatatctgaaactttgaaaacatgatggccagcatattaaatataatattatttattctcatcacaattacctccaacgttttatcatgtaaccaaagggatatacatatactcatattacatagctgtataataaatgtgtagatgatagaggtttatatcccgacggtataaagaaaccaagttcctactgtcatagagaattggacttgacaatattagtggacgaatcctcgagtatcatgaaggaggaatgggagaaacttattccgttcctgaaatctcttgtgaaatcaatcagtatcagcccaaactacgtgcacttgtcagtggtaacattttccacctcaattaggtggttaatatcatttctgaacccatctggtaaggatgagaacttggccctaagagttatcgacgagctgaagaatagtaagccggtgtttggttttacattcactggtcaggcacttaactttattactgaggctgtttatcaatttggtgctagacagaatgctccaaaggctattatcctcatcaccgacgggtcctccactcagcctaatgttacttctcaagcctcagcaatgctcagggaggctggagtaacaattctcgtggttggagttggcatggctagagactatgagtgcagagcagtggctggctgtcccgtcaagggtaattgtcctcatttctttatgactaactggaatgagattatcagaaaggtaggcgagttgatggctgaggtgtgtgagaccatacccagggacgcagtgtgtcagcctcactggtctgagtggtctgaatgtgatgcaaattgcggaaatggaacaagatacaagaaattaatgggagtgacaaccatctcagaagctactgtgggttcaaacggtaagtctggaaggacatgtgagatgatttatgagaacgctgaggtcccgaaagaggagtgctcagttgagtgtgataatggagatggaggagaggaaattagcgtgataggtgggaaagagaaaaaagaagaggaaaacaatttattaaaagagtatgagagatacagacatgaaggagaacatgagcagtatgaagaagaaaccaatactgagaatggtatccatatgtcaaaactagttaaatcatcaaggaattataacttgttatacttgttacagtagttaatcacctttaaaatcctataataagcagttttgtatttgtgtttagaggagtttaacagaggtggagctaagattgctggaggaatagctctagccttgttaatgattgcaggcgctggaggttacacatactacaaaaagtatcaattaactagttagtatttgtatgtaaatgtgaaaatcacaagattaaaaataataaaatgtgcagaaggaaaggggtgactgattctggcgatttggatgaagattttgcagattctagtgcgaatcgtggtgtaagggagagtgtgggtgaagcttacacagtaactgatttagatgatggactctggagtcaatccaaccaataaccaaaataatataatttatattttctacccgtaacttagcacaattaatgattaaatgtattttattgtatataatatgtaacataactgtgaaatgtattctattaaatggaaatgtaccaaattggagattgtttggcaaaaatagcagagttgacgctttggctcaggaactgtacagatataacctcaataaatctgaccaacacactaccagtaaacctgaagttgtagattctacccttgaaaataaaaatttaattaaaaatttttgtataaatcagcaaaatttaattttaaaagagttactgctaccttctcttaaaaattataaaccttctaccaacacatctaataactctaccaatgttaaaaacacacagaaagtataaatttatttatttatatataaatattttataatgtgtagtctgaggataaatgggagttcaaagtcagtgatgacagtaataggataagatgttccgttttgtctgatgttccttctggcacggtgatgcttcgacctcttaacagtaaggccgaatacacttcacttccagttctgataactcttttccgtactaggacaaacatcattaagcttatgtacccgaaacacaatataaacaacatcgatcagttataccattatgcctcattacaggtatgacatactcagttatacaccttaacaccttacgcaaatattgtataataattttttagacaatgttgatacgagaaatgtgtgtaaatgacagatttcgtcgtttgtttgttggattaaccctgttatatggtattaagatgagtcaggaaattatattggacctgtttttctacttaatcaggtctaaactattttggaatcgcacggtttactcatactggtcccaatcgctgtctgtgcccatacctctccttatcttaactgttaacaatgtcctcaatatgttcctaaacacagttggttttgtagattccaagttaaaggaacagctcattacactcgagggcctaatgcttaatagtgacttaaggaaaaggttcaaaaatgtttatgttaaagactatgatgggtcaattaaattacatcaaaaccatcttgatacttaatgtattgtgtttactacttattattgtaaaatcatactattacaagattaatgacaagaaaattaatttgtggtttctggttgtgagaagtagttagtcaaatcagcgtcaagtttagctctagtagcttcgccgcccatgtaagtatccaactccatatcctaatcaagaatttgcagctgttcatgaaaattgataaatatgttatttaaaacgaagtttagagataccatctgatctgcagttttttgatccttatttttcttaaaattttgtttagttctcatatttttattgaatctgcgaaaggcgaaattgcgccttggacgcctaaatcggcctcgcctagcagggtttgattcgccctgattttcaactggcgcttgtcctcctccaaaccttctcaaagcgcggcctttaaatgttttggccttaaatacccttcttactacagtattattattgtgatatttattggaagttgcatagtataaaattcgttaaatggtaccatttctcctgttattatttgtgttgttattgactgaattgttgtttctgttgcgaaatctataatttcctctaggatttctggtatttctctgacctcctctcacattctcaagtacattattccttcttgccattactctccaactatcagatatactttaattctattatttagattattatatttaagttgataataaattgctataattattatattactattaatatatagtatgaaattatataagcctatggggatctaataactcaaataccatcattataacatcaaacatcacaaaaaacactgtaaaccactaaagcatgaaaaaaataatttaactcttgaattgcaaaatttttaattttacggcaccttttcttcaacaagatctaatatatatacttattatagtatcagtattaggtagtaaaaaagtgtactaggacgacgaaaatcactcttctgattgttcacctcctttttgtaatcttagtgttttcctcctaactcttccgggtcttgctccagcgtacggcgatgttaatgccagttcaatgtgcttctcagaatcaactctgacaaggaatgatggaatatccaccaattgcctatgaacgcagatgtggcgttgcctgattaaacaacgtgcgtggtgaattgacttggccagacccagcttaaacaccttagtttgcaaccttctctccatcagctttgagagtgttagtcccaacacgaaatccaacttttgttcattttcattcattaacccatatctcaccatacgtctcaacagagcttcacctaaacccatgttgaatagatatataaaattatttcatgttaagtattataaataaatttaatgataccttgaaaaagacgtttgttatcttttggatcaagagttagtaggtaacgtgctgctgatctgatttttgaaagtacgtattgtactctccagacttcacgcttgttctttaaaccatactcaccgatcaatttcagttcttgatccaacctttcctataaataaaattattatattgttattggaataatggatgattttagggtatcagaggtaaataattaagacgtatgaaaagaaactttttcaaagggtcttttgggatttctagaggtcctactataattcctatagcttccaaccatattattacagagtcgataaaactagtataaaagtgttataatttggatatatcataaatattgggccaaaacaataaatatcaaatgataaatgagtgatgaaaatgaataattgcgtgaataaggaaaataagtattattgttgagtggggcgtaatcttccattacacccgatactatataacaatcactcaattacgccatttccatcaagattccatacacattataaaattagacccatgactcaattgtttgcttaaattaaaatcggtaatcataattatttcattatttaatatcataatttctccaaattttgataattttatcatctcaaacatttttttctaaggtaaatttacccacatattatttgaatgttattgctttttgtaattacttattactttaacagtttactttacaccttatttatctaaatacctatcacatattatatagtttaaataaaatattattttttaaaatttattaaattttgtataaatttaacagtttcttcaaatatatttggtatattattgtcgagttggtacttttgttgtttccagttttggatgtgtacacttctcattttcgctataactaacttccacattacctctcccgcttccacttcttctactggtttatagcctatctctacccttctacccattagctccagtcttacaccatctgatccaataaataaaatctttacaccgtcaagatcactggttttgttatttaaatcaaaacacatttgtgctattgtcagaaaaatatgtctatcaattagacaatttctacctcttcttagatgatataataataggtttgattcatccctttcgtataacggtattgaacttccattaacacacaatccatagtttttctctataaagtgtgatattcccataggaaacaccatttttacgttattaatgttattcagttccttaaattcttttgccatatcatcagcggtcatgttattatagtatatagtacatatttgtggtacaaatggtgaactgtcactgtggtataaccatatatcccatatatactcttctcttggaccagtttccgcatctttctgattatcatctgtgtcggtgtttagatttggtaatcgaatgctaaatggataataagaaatatcataaaaaagcacattcagtgcaaatgatgagggaaagtcaacatccagtgacgttaaatccactgggtttctatgactcattaataacttaaactccttcttcaactccaataacacgttaatgaactcattttgcaaattgattccgttatatatggtctgcgatagttccaacgacttactcgaacactcatccagtgacgcattcctgtcaaaaatggaatatttaagggtctgtgaatcaaatctattgactgtgtgtaatagtttgagttttttagtctcgtttaaatggtcaaatgttgacttgatcttcgacagtgatgcatatcccatctgctgatccttcatggactcatcccactccagtggattttctttttcatatctcagcgttgttgacatacatatgtttgttcctatcaggtgccaattttcacagtttaattcatgtaatttactcagaaactcgtccgataattctatattttcttccttacttgatgtaatttcattgttattattttgattattagtatcttcttcgatattttcatccttgttttcattatttgttactgtgaagaagtgttgtattggagattccttaatgatatttccatttaagtacctcaacacacgctcatttcccactccataggattctaatctgaacttcatactaacatatgattttaaaaaattactttaaaattgttttataaaatttctttaaaagttagagataatttttttcaaaatctccacacatatttgtacacaatatcgaaatcaaagattccattaaaattctacacacaatctgaaaccattaaaattctacacacattcaaaaagcataaataagtaataactgtttaaacatatgaattccaaaataataatattgtaatgttttgttaaaagaatttggactgaatctgtaatgaggggcgatcaaatttttaggttaaaaaatcactttctacgtttagcttttctatcatcgtagactctgcctgcatcggcttttttggctctttcttccaattcatcccatgaaagaccttcatcttcttcgtcttcatattcctcctcatcttcctcatcttcatcagctaatgactcactgtaatcttcctcgctatcttcctcctcttcatcagtttcctcatctttatactcctcgtcctcatcgtcttcctcctctcccgtttcctcctcgtcatccccttctccgaggaaaccgtcaaagcctccgctctctacaaacgcctctgtatcctctagtattgttttcagtatattagtccactggaggttattctttccttcataccacacaatatccaactcattcagccatctctaaaatcacacaaatacatccatattatggcatatagtcaataaatggagtgattacgataattaagtaaaataaccaagttgattacgttaattaagttaataattaagcaaaataacctagttaattacgttaattaagttaaatgggtgtaaaaatacctttattgtatctaggtattctattgggactaaatcaactcttttaattggttttgagtaatccttgttgacgaatacgatgtcaaaatttctcaatccgtgttgtactctttcaagtgacacaatttcaatgtcactgagtggtaaaacaaatggtggccactccaccaggtgtactaaacagttcactgttggtagcagttccacattagatttcagtggtactccagtaaacatcaactccctaaaaattttttgaaaattatttacattatttagtatataatttggatagtattagagataattaatttgcaataccttattggtaaatcaactttcattgtggtgacttcctttagttgtgacacgaattgtttgaaatcggtgttaaactttcttttaagttccctttctctcatttcctccagcgtttcatctgggtcgttgtacgatcttcctcttctgttatccaggtcatctatttgagttccgacttctgagaagaactgtacgtccaacgtcttcttcttccccactagaattggcgactttaagtggaaatgtaagagtactatcagttctctttgacacggctggaatattgcatggcgtacattggcataggatatgtcaacgttatcaactctatctctagaattcaccaagtacctaaaacaccataagaataaattaaaagtggatgtaaatatgagtatataggtgggagtgagtgtaaatgtgtagacaggaaccttaatccattgtgatgtgcttctagaaatcccaggacacgtcttgagccgtgtactgatggtctgatcatgaggtccttcagaactatcctctttcctgttctattcaagttcaacttctcttggtctgccaatgttaagcccatatcatcgttttctctctgtttcatctgcttaatcagttctttcaaactcttaaacacatctacaacatatgtaatgggtttcacatacataactaatactctaaactatgtaaaacgtactttgtaaatgcttgacatctttggatttgtataacacttctttaatgaatattgagttttcttgttgtagatctggtagagggttttgatcagtttttgctgtatatgtgtgtgatcctgggacctgaaagttaattctcagcatgtagaggttattattctcaggattgcacgtcacattcttgatcatcatgactgaaaatggcaagtgatacccattcactggcaacatgactacttcatttctccaatcaacgaatatctaaaacacattataaattgtataaataaattgtatataaattgtataggtaaattgtatataaattgtataagtaaattgtttataaattgtatataaattgtatatatatatatatataatgtgtgtatagatgtgtattactttgttgggtgttagttcatttgagaagtaatcgggactttgaaagactttgattttgtccattttaacgacttgtttttgtttcgagtcacctgcaaggcctgaaccatctttcactcgccttgttatctcttcaatcttaagctctcttaacttcttctggtgtgccaataaactctccatctcctccttgcttactccacctctatttctcaacctatgggttattacattccataatttgttaaagagtttgaataaatgtggtattaaaaatacctctcctttagtatcacagtctcagcgtctttgagtatttgtgaggatacgactggttttttctccttttcatcttcatctttctcttcctcctcttcctcctcttcttctaattcgtaggaaacgttttccaaccccttgcttacaaacgaggttagtactgtgactcctgctgtggtcgacacgtggactgtgtctccaatccatacggcaaatttcttcccttcgtgtatctccagaaatccaacactcaaatgaaacaccatattatcccgtatcaagctacaaattatccatcattatgctatatacaatatacgtatttagtaaatatataatggcactttgtgttatcggaggtgatgaggaagttggagtctttgaattcaagcccaatagtgtgaccaagtgactttgttaaatagtcttcatgaccctgtttctccttcgcgacaaagtcgtagacgttggagtaaactgagccgaaagtcactcctggtttcaatactgtaagtgaatactcgaaaactttcaaggccaacttatacacatctttcatatactaaattataaatgaatgtctcaattatgaaacaagtatataacagcctaaatgttacttgtgttccatcgagtattaatgttctggttaggcatgagcacatttcggtgtattttgaacacactgagacgataattgtgcctgggtcgtgggaaagatcatcatcagtcggtttagctccaattgaaagcaaataattacttccactctgcacattcccgtatatcacttccatatcaccacccctcatctacattacacagtaaatgaattattaatatataaataaattatatagagtggtaagtttatacgttgaactttttttccattttttccagaaacttcggatctttttgtatgtttagggcttgtgctactatggacgaatgtgttttcttcgactctgaatccaacacttcttcaatttggtttattagtaagcttttcatcacactacatgatagttgtgctgactgcttttggatttcctaaacccattatataccattgttcccgaaattgtgtgattgaatattatttaaaaggtaccaggtcaagtgttgttctcactgccatgattgttgagacatcaattgagacatctctgcgtgcaaaatcctttacgtagtcaaggcagaagtctgaaaagtcacccaagggcttcgggtcatttaccactccaattacgccctaaaattcattacactcttgtttatattagtgcaaaactatccaaacggatgtaataaacaactggacataataacccacgttaaatgacgcaaaaattttatttagtgaaggttcgtcattttggcctggtactctgtggtagaatttaaccttttcgtaatgtttaaccaaaggttccaaatattgccctaaaccattaataaaacgatgtgaatgagtatgaatgattagaagcattgtggaaaactaaaaatgtgtaaagtgaaccttttttaggggaagtcaggattgaaagtcttccatcagatgtgaaaactattaaggtttctgggaattgaaaccccgtcaaccataacctattagtaaaattaaaattagcgcaaattatagaacagcaatataatattcatggtctgtgtaatgaagtatgtagagggtgaaaattaaaaataattaaaggacaaaaaactgtgaataaaaataatataaaatatactgtaaaagttctgaagttgtagaattcgattcagactgcgattttccagtgcacacgaataataagtcgattttttcatcttcttgtcttttgaagatgctcagaagtctattcagcttaagagcaacctcctcaaagtttattgacactgaacccttactctctggcataatttacgtgttttattgtaaaaatgtatctgtcagtgacaacatcacacaatgacacataaagacgaattaagccaaataactgaacgatttaaaaattttaaaaataaagttattataaatgtaatggaaggaaatatatagaatgaattttaattttactagatccaaatatgaaattatcaggtcaaaatatagtataaaatatatttatattgtgaaaaaaattcctcaataattttaaatctattttacctcaagtttaaatttattttaattggtttatattaatttatagaattatatattaaactgtgtagatatagagataggtagtgattttggtgaaaatttatagtttgactgttagaaggttaataatttggacaaatcagtataaaacaatattatcaagggtatttgtagcccatgttaactgtaagtctttattttatatgataattaatacattgccaccccatcagtcgaatattttttattattataattgttaaaataattaaattattggatttgctttgttgttgtcgggattataaaatttaatcaactggctaaatacttggaaaattgtaaaaatgggaatggacgacttatctcgtatttacatcgggaacttgcccgaggattgctcgcagcgtgagcttgaggaggaatttgagaaatttggacgcatcatatactgtgaattaaagaagtcttactctgggtctccgtttgcctttattgagttcagtgattcgagggacgccagagatgctattagggacaaagacggttacgagtttcacggcaagaagcttcgagttgagcttcctttccgctacaaagatgaacctagaaggccttcaggcagacgttatcgcacaactagacgtggtaaatatgttctcgaggtaattttaccgtctttataattgtatttactcttactttatttatatcagaaaattctctaaaagttaatttaaacttattaacccacataatcatatataatttaagcataatatgttgtataggtgactggattaccgccaagtgggagctggcaggatttaaaggatcatatgcgtgacgctggagagtgtggtcacgctgacgtgtttagaggaggtgttggtgaaatcactttcttttccaggagcgatatggattatgctattgaaaggttcgatggttccacgtttagatcccatgaaggtaattcttctacatttacctatttacaattttactctataaatatacttattaatatacaccataatttattgtataaatatattataggggagaagagtagaataagtgtgagggagaagagtaggaggaggagaacgagatcatatagtcgtgatagagggagatcatatagcaggaataatcgtagatcaaggtcatatagtcgcagtaggaccagaagtaggagtagaaccagggacaggagtagggatagaagtagaagtcgtgataggaatagagatcgtacatcatcaagatcgtattccagagataaatccgactctaggtctagagataaaactgtctctagatccagatcataagtgcattatttgttacaactcacacaaatcaataattttataacctgagttgaatcagtggatctttcattttaaaaaatcaattttttctcaaaattattacataattttatattttattttatataatttacattattttgtgtagtaaatgtatactgtttagagtgagttatggaggattgggattcgaaatggcgtttaatgataaagcgggaggacgaaaagagagtgtgtaaccggattttaaatgagcgtttaagggagaaaaaggaacttgaggaagaaatcgagtgtacctttttcccgaaaacttacaaatcacaccctacacctggtgttacggaacctagcacatcaagttactcagaaccggacgctgatgctcttttaaagttgttgtatcccataattagcgaagaggaagagatactaaatgagctagaccagcttgagcgggaggagaagagtcgcatcatggagctctctgagctcattatttcaggcataataaagtatccagaggagagtttggacaaattcttgtcgttttacagagatgagaggctcagtgacatctctgagcttaggaacagcaggattaaggttataggtaaacttcatgaacttgagcgtgaatttaatcttgtatgttcaaaagagggtctcgacccacaagcatttgctaaaatcggatttgaaattaacaacataagaggaattaaagaggaactcttgaattcaataagcctaaatactcttaaaattaggtgtaaaattaaacaagaatttgatcaaattctgaggtctcttaatccaaaccaatttagtcacaagaatactatggttaaaaatacaagactagttcccaaaaactgttattatccttaatactcttaatgtatttaatatatgagtggagaacattaatcaattcttaaatccatgtgaactggctccattacaactccatcgcagataaccaactcagcagaatctcctgataaagttattaaagtgctaaatgggttgactacctgtgcaaatatctctttctactgctgaaaccatggcgtttttaaccaaattcacaagatcctctagtgagttaacttccggcttaactttctgattatttccattcaactgaataaattaacttattcttaaaattaccaaattgtccaggactgatatcaccagtgacgaacttgtgccctgagctgtatacttttcataattataatttccaactgcgtcatacccacacacgactcccttccctaaaattaaatatattacaatagttgacactttaaatgtgtataattaatgtgtaaaaagtaccttgttcgtctatcccgcacagaatattgaaggtgtaataggggaagaaacgtcttccatacaaaacagttgagagtaattgagcaatagcgttaaatgtgggttctctgttatgagtgtatcgatacaactctatctgcctctgcaatacatgattatacgtgtttatgtttaatataagttacaatatttgtaacagcatttgtaataatatttaactgtggaattcattacttctagtactgattgtagcgcgagcatatctgcttgcattcctgatgttcccaaaatacacttatcagttctacaaccatgttaattggtttaatcaaattaaattaaattgtccgaattaaattaactaaactgttttccgcaagagatcaaataattatatctgaatgttacagtttgaatagtttggttgagaatctggtatgtatcaagtatctctgggagagtcttgtgtcggcggcgatgactgcgtagttgttccacgtggcggcaatgaccgttctaagaaattattatgaaaaataaataaaacaataccctccattgtttacgtatgggttaaatctttcctccggacggttcattttaaaatatattctgaattcgttcaccacatttatgctcaggattccatgccacctttagaattttaaaattatcaattttcacaaattaacaaattttatctcatctttaaaattaatatttttcataaatcattaactaatattttattcaagtttctcataaattttgataagtatgagtctacacatacaaatacacatacacataaagcgtaccaaatatgtataaaatatattgtatattgtatctaattgtgtatgttgttttgtgtatgagattaccaatcattcttgagattgataagggcgagttgatgtacaggtcctaggtgtgttgagcattttctctggagagtgtcattgaacctgctttcgagggcgttaacaaacgcttcgcactcatcgaacttggttctgaacgattctcgatctcgcaatgcggcctcgtctggtacttcttgcgtgtcagatgctgaagtcgacactgtcaacgtcgactcagtccttgcaaagccgtcttctccgtagtagtagatgtagcttgacaagctcagcttctcacttgttatcaagtactcgtcgtcgttcttgaatgtactaccgtgatcgtacccagaatattcgttaaatccagcgccatgtacgttaagtgactctgacttaacgtggcctagtgtgctcctaagtgtgttatgggtattcgtgttatgcgcaatcgtgttatggttcactgtgttatgattgatcgtgttgtaaactggtttgttgagcgtgttatggcgaattgtgttattcattgtgttgtgaattgtattctggttcagtgtgttatgattcgttgtattctggttaatgttgttctgcttaagtgtgtagttgagtgtattatagttttggccaactgtgttataatagctgtgcgggttataggcctttcctttgttatctgctgtgttgtacctgccattgtccttattcagctgtaacttggagtataaatcatcatacaaactcttgacattagtgtatccgctaccgtatcccttaagtccattaaacaaggagttattatacactttaccggtatatgtgctagtattagggataggattaccattatacccactattacccgagttaaataccctattctcagaatcgtacgagttagttgaattaaacactctgtcatttgagttgtagactctgttgtcatttgaattaaatagtctgtcacttgaattgtacagtctgtcactagagttgtaggttctgttgtcatttgagtacttgggtttattgttgttgaaagtgttattggtatttttatgggtattattttggcttagtaatggaatggtataaatcttgttggacgatgattctacgcctttacggcagttttcatagtccttggcgcttacaaacagctgatacttgatgagcatgaggaactgggcctccaggatgttcatttcggccaccttaataccaccaacctgggcgtagaagctgttggagtagtacacgtcgtcgctgaacttggctgcaagcatcactgaggtgatgaggagcctgtggatgttgagcactgagactgagaacttgtgcatcttcatgattctgtcaatgtaaaccagcgcgagcacgaagcactcattactgcagttgacgtaccttgcaattcggacgaggtaatcggagatcgggggagcgttgatggagttgaagcaacttagggaaccatactcaggcacgacgtcagacactatcttcgtcaataccacaccaagtgcacgaatgaaatcgtcactcacagcacgtactgcacagtccatatcggattagtgtttgggaattctcttggtatacaccctatgaagtgtgagtaaaaatctaaacggttttacactcgtctgtgtatagttgtcaacacttgtttataaattcctaccaattttccttttttatggtattaagtaatagtgtcaataaaaatgaagcctggaaaccaatgtacattaaatttccagcgggttttctttctactcctctttgctaagtttattccaattcagagcgttatgtccttatcataccttaaattattcctcagaagtgtgagtttttaaaatttttgttgatctagaagtaacaattagatttatggtataagatgacaaatgatcagaataagtagaagaaagcagtagacggattaaaatattgtgaaatgattgaaaattttgggaatttaaaaatatgaattatataacagtgtgagaaatgtgaaattggtcagaagagaataaaataatttacaaatagcatcccacgttaagagaaagaaggggaaacaacttccatagcctaaaatgaaagggaaataatttagggccccttaaaaaatataattgctgtggaattataatttttcagggtgattcaaacgtttcggctatggagataactgtaaatttttcctgccttgtcaaagagcatttaataaattcaaaaaattacatttatccaagacaccccattcaaactctcaaccaattcaaggtttgtattaagcatcttctgtactgaatacccacacccaattcttgtggtaaaaaattaggggttttttgtgacaacgcccgatactaaaacatgcatcccagatctcacgccccatgtctagcagaagccttgatttgctctatttggcccttaatccctcttttatctaattttttcaatttcttacaattatttacaacttagtctttccgatcgtggtcagaaattctcatttaaattcaaaattttttaatgtgtaaaacgtcgattcgacacatcacacattagaattattttatttctatttttaatacattatttatttaagattctattattgtaattcaaatccaaaattctttttctatatcaatactatgtgctcaaagatgataccacgttatttaattcttgacggtgtatttattacacaccgagattccacatcttatcgtaaaatttattttttgaagtttttcattattctgataaaatatgtttttcttcacaatttttagtgttattcttgtttatgtctataattacagatccttacacatctatatgcctacctcacttggaacacatttacatatactatatgctattatatatcatatataatatactttaagtgacagaattgtttctatatagttatatactaggaatgtgtagagaattaatgaaccatcgttagaacagccagttgaccactaataaatcaaattatgtaaaaaatacaatagtaaaattgaataagaatgaaagaatattgtgttagaggatcaatgtgtattctatgtttaactgcccaacaaggctttcgggtgatgtgccataaagtataaaccgtgatgttttagttatttatttgtatattatcgtaaattaataaatgcccccgaattttataaatttataatttccactaaacagctgttagaaatcaattttttacctaaacacattttctctatttaacatttctatattacacaaggtaatttaaactttattccactttttccctgttattttaccttaattttatctaactaaaataaataattattttcaatttttcatcaaattattaaattaataaatttattaatttaatcaaatttattaatttaacggaatattgattgaaattatttttagatggcagttgagtgtgatcctcattctatatttttcggaatgatgggcgttgtatgcgccatggttttttcaagtactcgattactcaatttttatccgcttttactcatatcttcccctatcttatcaactatttaaatattattaatttgaatagatttgggagctgcttatggtactgctaggagtggcgttggtataagtagcatgggtgtgatgcgccctgatctcgtcatgaagtctatcattcccgttattatggctggtgttctcggtatctatggcctcatcatttcaatcgttattaccggaaactgtatctttacactcacaaaaacaccaattacacatccaactacactatttttaaccatttgcactattcttaaccatttacactattttcaaccgttatgtacatctaactagagtagttttgactgttatattagttttatgagttataaattgatttagatggtgaaccgggcgagtattcacacttcttgggatattcacatttagctgctggacttgttgttggtctttgtagtcttgtaagttgtacactaataattgttcaattattgatattacatatttgattaggctgcggggttggctattggtatagttggagacgcaggagttcgtgctcatgcacagcagaccaggttatttgtcggtatggttttgactcttgtatttgctgagacactcgcactctacggtctaattattggacttgttgtcgctatgaaggcccccaaaggactctgtacttcattcctcaaataattttatcaatctcccatatatattaccttagtatatgtactttagtataccatagtattatctacattagtgtctagtatatatgctctagtacaacatagtattacctacattactttctagtatatatactttagtacgacatactgtagtatactatggtatgtagtatatacaccctaatatactctactatataaatgttatacatgcataactatgcaatagtactgtatatactatagtatatatggtggactgagtgagattataaatttttgaggcgtatttggtgaaaaaagagtagtctccaaagctgagtcacaaatccaacgctttcttcatcaaggaactgttcaacgtcggctaaaagctccttagccttggggcgttccttgagcctggagaagataaactccacgacgtcattcacgagactctcctcatcgcccatgtactcgagaatgcaccgtctaatccaaggctcaattaaaatactcaagttagtggaaaacagtacattccactccacgtcaccatcaaggacatcagtctttggaaccatttcccaaatctgatcctcagtcagggcagtctttacctcctcagcctcctcagaaaataacttgaccactgaagtggaggattctgatgctgagccgtgagttgagttagaatctgaagaagttaacttagggtctaattttaccctcttatttgactcgttcttaacattatttgtcacatctttaccggaagttgcggaactggaagaaacaagctttactgaaatctttttggctttattctcgtcctgttcagccttttcatccttcaagtcatcttcaatttcttgctttctatgctttaagttcggcttacttttccctgctaggtcctgctctatgagtttgtccctcttatatggagggacttcgaaaagagccttgatttttcgaaataacttgtcctcctcctgggcccaaatcgacaactgctccttatacttagtgtcgtaatttcttttcttctgtctaagcttaaatattctttcggcctcttttttatgtatggtgtaatcctttgttaaaccggtttcctctctctctttcaccttctcagtcttatccttcgacggtttctcgcttctttctctgcttgcgcttgactccgttaatcctggagtggctgcgtctgttgcagattcggtctctccttcagccgtgttggggtgaaaatgcatgtttatcaactcaatgaactcgtttctcagctttaccttatatgcttcaaactcctccaccacctcctgcttactcttttctggcatatttctacacatttcttcgatctttccttctctccaatcatcaatttgacactttactctcgaattacaactcacctacatcattactcaagtaattgaagagtgctcacaagattggtaaggtacataaataacacggtggttaaataaataacaccgtaattgaataattagctccatgtatgtaatgaattgtgtacctttaatttgttttcaccgaaatccaaatctgctaggcattctatggcgaaataggctcctcctggtgactcgaaatcacagaaagcaaatgtagaaagcagcccagtagatgggtcagtatgcctcttaaaatgacttgttttaccgcatttctaaatcatcataaaaccaatgtagtagataactaactagatgtgtataactaattagatgtacataacttattagatgtgtataactagatgtaaatagttgaatgtacagaactaaggtaaataacgagttcaatgagtaggggagataaaaacctgtaggaagttaatgacaaattcgtttgtggtatcgacagataatccaccgacgtatacaacatttgccagcttgggagtatcgtcccgttctggcactttaacaacgacagggttgagtagattatctatgagcgttttcatgggatattggattcctgagggcattttagctgtggcattgccgttgagcattccaggattaatcatttgtgggttcatcatattagggttaatcattggggtagtcataagtggaggtgtaataatattcgggttagtcatgaggtttggcattggaggctgcgggatcacagtgggtgcagctgttattatattcggctgtggtatcagaggtccgtggaatccaaaaggtgctacatcaatattataacagattttaataaacgttttagataaaaatagtatgaacatacgttgaattggaggtgggtgaaatgttggtgtattggtattgacaggatgggtttgagagttagaatttgaatttgaggatccagaattattatcagaactttgttctttcttttcaaaatctaaagaaataataatcagtgactccatatgtaatgagtatgtagaaatgtttccgattgtatcgttacacaatatgagatattgtatgatataactgagtataataaatactttgattatctggaacgggctgtgataaattaaaagcgtttaattgaggagcgatcccatctaaaaattataaagtatattattgatatacataattttatatatagctgtatgggaaatactcatcatcatgaaggggtttggctgctgaatcatatttggtgcgatattgttatttccaggcataaagggttgttgaagaggtggctggaactaaaacacaaattaattttacggtgaacaactatataaatacgtaaaacagtaaataaacgttgtaaaggtgataattaattgaaagattcttcagactaacgtaatcatatgtaaaaacttacaggtaagtttggaggaaccccttggttctgctgtatgttataattcatcatagaagcccattaaacaaatttgaaatataatattaaaaatgttatgaaatgttttcaacaccataaccgtgagctacaaatcttgttatcaaaagtaattatcaacacaacttcatcttaaatacccaatttttactattatttttatactttaattatgtctatgtcatattaattattaacgctatttaatacctaatttttataccatttcatcccagttcaaattcctccacttaattcttaatttaattgtattttaattaaattattctaaattaataaatatttgtaaattttaattacattttaaatcttaaaatattgatttaatagtttattatattgtgtttatggaatctgagtatgttgacttgactcagtatgtaattttaagggaagacttacaaactgacgggaaaccttggcctagaggcgctcttatcgcacaagcttgtcacgcttggtatattcgtacacatacatattcctagtttacatatgtaatagctcaaatattctagattttagcatatcagtcaattctctgtataatactgatgagggtgtgataaaatacactagttttgagaatctaccgaatctaagaaccgttgttttatctgttgaaaacgagtcttccttgctggactatcacagggttctcaccagtaatctggtcaagagtcatttattcactgagaagccagagaatatcatcacttgccttgccactgtccctattgacaagaggaaagtagggtctctcctaaagaagcttaaaacttttaagtaatctctaattaagactacacattattacattattatagaataattatgcctagtaaaagtatgagtagtgatatataaagggtaaaaaacattagatacattagacggcttcaagtgaagccctgattacaactagattacttccaaaaaagtcaatgcgaaactaattctaagcgagtgatcgctggtgctagaattgaatactagaatccattctgcacaaatgttacaactgttgagggagagtgagtggcttatgccctctcacctctgagtctcctggccaaatgtacatcttttggcatgatggtgaccctcttggcgtggatagcacacaagttggtgtcctcaaagagaccaacaaggtaagcctcagcagcttcttgaagtgccaaaactgcgcttgattggaacctcaagtcagttttgaaatcctgagccacttcacggacgagcctttggaagggcaattttctgatcaaaagctctgtggatttttggtacctcctaatttccctgagagctacggtacctggacgatacctatgtggtttcttgacaccaccggtgacgggagcggtttttcttgcggccttagaggcgagttgctttctgggtgctttaccaccagttgatttacgggctgtctgcttagtcctagccattatcaaaaataggaagtgattttaaaaatgtttatttgccacacactacaaagtagggcacaccctggatcctttgtcatattaacccctctttacccacaaaatttcacctattttcactctgtatttttttaaataaacatgcatttagtgttaattatatataaattaatttggatctaattttttagagtgtgtaaatgtaaaattcaagatcgaatttttaaaaaagtgttttccactattttttaaagattcctacactatcttgatatataattattatattaattttattttattaaataaaccacaaatttatttatttcccaaataattataaaattggcggatttatcataagattcctcaataattcacctcttttcgagaaaatcattagtgtaaaaatcattaaaaattttaattatataaattatttacgcactcgtcaatattgtcattgttttacataaattataacacatactcagtgtttataatttagtattaaaattcataaaaatgccaaaatccatgtcaaatagatagtataaaataaataacaatataatattagttcaatataaatgtgtgtttattctgtgtgagggtgtaggagtgagtaggaacagacttctagtgatttttcactagaatctgttaaaatattgtaagataaaatataactaagtgttagaagtgatggttaggtcagatggtttgggtagtaatttgtgggactcaatggtgctttaatgtgttgtcctgatctgacaccacaaatcagtccttatcgtatttgaatattacacccagatctttagaggttagtttttttgttttaaatattttattatattttaatatatcattttcttctcaccgcttcttttttacgttaatttgattattttttggtcaataatttttggccacgtctagtaattcgttagatttattttttcctccataattttatcatatatcatttcgatttttcttatcttagcttgatctaataatatttcctagtaaaatatttttccatttcaattattatttttgtatttcattgacaaatatcgaggtgatggtatgtaatatgttgtgtaggtgaaaaatgagcgcgaagggcgtagctggtggccgtaagaaagcggcaaaggctgttacaaagtctgcaaaagctggcttgcaattccctgtaggccgtgttggtaggtaccttaagaacggcaggtacgcaaaacgcgttggtgctggcgcacccgtttacttagccgccgtactcgagtaccttgttgctgaagtcttggagttggcaggaaatgccgctcgcgacaacaagaaatctaggattgttccacgtcaccttcagctcgctgttaggaacgacgaagaactctccaaattccttggtggcactaccatagcctcaggcggtgtcatgccaaacgttcaggctgtattattgcctaaaaaacacaaaaaagatagggattaaacactctttgaattatcaaatgtactttttacacagttacacatttttaccagttaaatttctacacaaccaaagaatatcagcagttggttaacttatgttttaggagtaaatactaaggaaatagttttatttaaattgggattacactgattacaactagtcgggcttcacttgaagccattaatcttttcttgaatattttacatttttcaatacattttaatattattttataaattttacatcttgtattatagtttgtttttctagtatagttaagttttatttgtaacggtggatggatgagaatcgagtatctctggattttctaacagatgaataccttccgtgagttatagttaattgtaaatatctagaatcaattgacttgttaaaaattgttttaatttattatgaagatgtttttttgtaacaattatgtaaataaaacctaaatccttcctttaaaacttataaataagttgtgtaactaagataaaataataattaccaggtgataaataatgtttaggggagaatgtagcgataatagcatagatgaggaagaactcaacaacttcctcatgggagagctggcagaaccagcaaaaccgaaaaaagcctcattcgcagataaaataacagctaaaatattcaaaaggaagaataaaaagaaaaatcaagagtaatataaactacacatttcttatacagttaaataacaattagatagggataaaatatatataaactccgtaatataaagataaaactccttaatataaagataatttagtacattttatacaaagaagagtgtaaggaagaagaagagaagaaagacggcatctcatagtagtaaattaaacccagaactagaaaagttattgcaagaagcaacagatttatatctaaataaaaactttgaagaagcagtaaaaatactaaaggaactgattagaagagcaccaggactacatgacccattccacatgctaggactaatataccagaatgaatacaacgatgttacaacggcgaacagctattacctgctggcggcacatttggttcctacagatactgacctgtggcaaagaataggagaaatgagtcaagaaaccggcaacatcgaccaggcaatttactgctttaaaaaatgccaaagagatcaagaaggacaaattaacgaacaagcagtttttgcactggcaatttgttacatcgaaaaggtaaccaatttattaatttagttaaagtaaccaatttattaatttagttaaatctactcaaaaatatatttggtacattaatagttaaatttgtgtgtaataaaaatgtgtagaaagactacgataatgcggcgaagaggttcttggtactgttcaatttacatccaaatgataagcttatcgcaaatgaactttccagatgttttcaaatgataggagatttgcactcaagtttgctggtgctgacagcgtattttaacgcaactttggactccgaaatactagagacgatcctggaattgaatgtaaatttatgcttgtttgaggagtgttttaagatattggagagtatctgtaccacaaacagtattgagcctaaactattaccgttagaacacttagtttactatgtaatctcgtgtttgaacctggataggccagtagacccagagctagacctgctgcataactcacagttaaatgtaaaatattcattcctgatcgcaaatcatctttgtccaaatcatttagaattgtcagtttcatggtttaaaaaggcgttttcatcaatagtctcgagtgaccagatagatgtaccaacaacacttaagatatcaaagtgcctgacactggatagtaaccaccatgaatttctagttaaagtgctgaggacagcacttgaaagttaccctaacaactccgagctcctgattaatctcgcagatattctcctacagctaggaaatatcaatgaggccgaagagcttttatccaaactcacactaaacgatttggataaaattaaagatatcccagagtaccttttacataactattttaccaatatttcatattcctaagtattgtaattaatgattaggcctattggtgaagaggagagaaatgaaatgtttaataagcttaacagtgagatagaagagatagagttggaatacttaactgaccccagtgcccgcgtttacccatgtttgctatcatatggtaagacagtatccctggataaaacgaagttaaatgagtgggttgatacatatctgaaggtaataaaggattgtgaactggatactgaaagagcaattcagaggctaagtaaggctaggattatgagggcatcaaaactaaataattttaaccatagtttgaacagagatgaaaactcaattttcatgaaaaatgagcctaaaaagacaacactcaacaagagttactcattccttaaggttaaaaaggaattaaacctaaaatcagccgaagatattttaggtatgttcgggactactctgtttaattctaaattaagattaattaccagaaattttattaataaccctagattagacaaatttccagggattagatttagttatagtgtaatgattttgttgaataatttttataggatgggctggatatgagaggttaatatttactgcaacagtgtttatgtgtctatgtaatagagttaaggaggcagttgaggtgcttgaactcatttcaaacaataaaaagaaatacaagtcaaatttagactcagctgaaagaaaatcattgatcaaaaccgtggaaaaaattattttcagtatgaattacggtaattagatattttcgactagtgtaattgtgtgtataaattctgtagaatgcagttcctttggaggattatttaagatagcaataacaagtgctaggaatgagtttttgaaggatccagtgaatggaagtttggaaggatattcaaggatcttggggactgggaaactagcacatgcagctcttctaccactctcatcatcaaatgaaagagacgccttgctagaaaataggtatttccgcctctattcctactttataattcatatagctatttacatcagttatacagttagttcgtaagttatatagttagttcgtaagttatatagttagttcgtaagttgtatataaagttcattagtgataaatatattctgattagggcttgggtaacaaggcagttgttacagtacccggacaacttccagctgttaatgttgggagggcatttttgtacaatttcgggaaactggtcatatgctaaacatgagtaccaaagagcatatcaaaaggagcaaaatgactcactagcttcactttgcctagcaacttcatactttaactcactcaacaatagaatcaccgatgtattctataataggaatttatttatttaaacgatttacttaatatcaactgatagaattagtaaacacgatttagaatgtgaacaagtcgttggtattgggaatgacatttctgcaaaagtatgtggagcttaggatgagaagagtgcaccaactgggtttgccggaaacatgtacactagtgttcaaggctgagggaatgtataacattgcaaggtacattcagattctattaattaattcatagagcttatcactttcttaagttgtttaacctggcagtgccactctacgaaaactgcctggaacttgtatctagtattggggacactgatgtacccagtgacaaggaagttcagtgtccctgcattctctgcgattactccagaatgccaataagaccaatgccaagctcatgtaaaggattcactccaacttcattcattattaaccacgtaaaactacaaattcagagggtataacattacacattacctatgtattcattataatgtaattttacacacttttagtcggccgcctataacttatttctaatccactcgcaaaataataaccagatgcaagcgaggtatatttcgtcaaagtatataatctggagctgattccacacatatattttaatatttctggtgtttaaaataatctagtaacaaattgtttttattatataatcatggaatctttgttaatataatgttatttattaggatattgtagtaaatgtgagatgtttagtcagtctgggattaattttaggagaatctacaacactgccagagctgacttgatttttaagataaattgcagtaaatttcaaattttgacattttataatagaaactactcatattttaattttaaaaaccatgaatttgttttttcacccaaaaattctaatgttatcaaagctgatacaaaccatgttaattatgtacaacacagagggataagaaccagggtaatggtatctaactttgatagtactcactacgttgttacaaacccaaatactgcaaaaaattggcctccagaacatgaccatggaaatccaattagtagagaaagctgtaaaaagttaatgtgtgagttgaatgaactcgaaattgaacgtctggagaagatgcgcaaatttaacgtatatttactcgaaatatattaattttatgtgtttagatgcctgagcttaatttgggagaattggtggaagtaaaatacgaactctcaagaactcaacaaacctttgctgtattcacaggtaattttaattaattagtttttcactaacccattgaaataataaaccataataattatcattaggatactgtgttgatattagaaaacggggtttaaactcgtcgtttagtcttaaaaacgcctttgatggagttggagttactcaacttttccccctatactcgccaaggattctgaatgtaaaggtacatttactcattaattctatcatatgacaattaactctggctaaatgataattaattctattatatgataattaattctgtcgatatgatgataatttcaggtagtaaagagcttgaataaaggagaaacgagtgattacaagcccataacaagggattacagatacaaattccactataacgtgaggcatagattctctaaaaagagaggagtccacaaacccggtaccttttttacgaaatacgtacacgcacaataattattgatatttggtgaattaaatgcctttaggtattcggagctttgagataagactaaagaacagaattgctaggttgaaacagagctactatagaatgagggcggaagccggtctccctccatacatttggcctggtccatacaacatcaataccagaaaacgttcaaagtataaatatacagctatttatctctaaacaccattataagaacatatgtataatgggtttacaaaatggtatagggaagttagaggtgaaacgtacagaagaattggattatacagcttggtaagtattccctagtataaattaatatattgcattaaattgttgcaggatgagcaaagagcaaggagtgagaagcttagtaagaggaggaaaaaatcagcttgggggaaatacaaattaccaggcactggctaccttgataaactctcaaaataattctgctacctttattataaatattgattacatgtgaatgaaattgagttaaatattacagcgttgggagcggttagtacttttacagcatttatagccccaaagtcccttttcaacatcataaaatgaaccccaaatctgagaatgtcccaacatcttcgcctcatcaaactcatattccgattctctaaacaaataatcatggtatggtattaggtatgtctaaatgtatctgaataagggtaaaataacattgtacttgaaggtaataatatcttcttttgtaacggtggataggggtttgagttcttcatagttgtttacatattcagaggctttgaaacgttcaattaacttctgtttactttccaatgtctccttctctttccgttccttcgtttcattgaataacttctccaactttgtcggatttgcgataaaatctacatccacccccttactcttactctcccaagcaaacacctataatacacattagccactcaccaataagattatgtactaggattggtattataatattataagtgcatagtatacttcgagttctttgggtttataggtttcttcggagttgaaataatagttgtcacctttaaaacaggtatttacaccaagtagcgggtcttcgcgcattgatcttgatttagggtcataaaaggcagaattaacatcaagattgataaggtatttagccgtgtcctctcgaattctcaaattcctagtggtagtccgcgtcttatcatctttacaatcaaacgtctcattcttcacactaaattgaatttatgaaataaaacaataaaataaataaataagtgaaaataaggtaaatgatttggcacctgtgttctttggattcttcatcagatgattggtcatctttagaagtgttcatgattttgtttagagcccgttcttgttcaagatctctgaattcctcaactagctgaaggtgacttgaagggtcgaaaccagaccaacgatcccgagttgcgtcatatcccttatcagtgttttcaacaatatattcatctgggcaaatgttctcattagtgaattttgctccttttttacgtggacgctcgacacagctcttagcgtcgtgagtcatggcgccacaattttcacaagcgcccttcctaaacttaactgcgaccttgttcgtaacacctctgagtgttacgtaatctattggagccttttgaacctcattaacccgctgatggcgtaaacctgttcaataaacattttgtatttttcataaataattggaataaattataaaaacatacttggttcaccctgatctaaataccaaggagctttagaaatatattgagggatatgagggtttatatcattccctaactcatccttgagggcgggaacagtaccagccctccgggcttcatccaactcacggtcccgcttcaagctttcccttgatttggaatttattaaactcattgttaaattttacactacattttaaaatgtataaactaaatatactcaagatataaattgttaggctaaccaaatataacaaatgctgaacataatattaaacattataaactttaattaagttccatattttaaaatggatttatttaagatgattaattggaaataattgatcaagaagtgtaagaaataagttaggaatccataatgtgttattaaatgaaaataatcaatattctatagaatattatatataaaattgttatatagattgaaaatcttaatttaataaataattgactaaaatgcaaattttatgctcactggcaccggtaacccaagagataaatgaattaaatataaaaacaatcagtactatcccgattcctttccatataaaaacatacttataaaacatgttattgaaatatataaagacaaaatgtgtagcctttaaactgcataagttatatctgggggattaggaccacaaagaaggataagatacttaaatttctggccttaatattaagtgatataggcataacatgtgcctataagtgttttgtatattatactttgacattttttaatacttttgactgtgtatttaaaaattgatacacatttattcataattgaaaatgtattaaacttttaaattttctctcttttaatgtaaaatattccctttaatttaatgtaatttcgtttgtttaataatctttcatatcgcaccttaatatttgtcggtaaaatgggaaatcaaggccagcttctgagcttctgctccatgatttccacagcaaaaaataaagggacccttttaagaaatgtagctctcgtaattactggtatttctcatcctcaatatttatgtgtagtttatatgtatgccggagtcatgttcatactcttgaggcatttttttgaagatttaaccctctatggactcggtattattggtggattcaacctactcttctttctattcttcatcagcttcattcgagtattcattataatcttcctatcttaacctaatgaatttaactaaatatttatttattagttgtcgtgagtttacaattatttttagtctgccgtgacggatcctggtgttgttccattgaattgggggttttatatgggtgatgatacaaagaggagaaggtattgcaaaatttgcaatgtttggaaacctgacaggacacaccactgttcctcatgtaaccgatgtgttttaaatatggaccaccactgcccctggattggaaattgtgttggattctataaccgtaaatatttcatgcaactcttagtgtactcaattttcgcacttggttttacccttttacaatcgtaagtcactccagacattgtttatagtctcaatgataatcattattgtagagtattatacttgtataatgagaccattgagaattcgatggacgaatttgatgaagtcggcccaaaggccgtctcttacatttacgtttgtggtatgatctttatcggacttgcccttattattgctctcattccattcttacaattccacttcaagtatactatatttattaatactctatatatgctattgagtacaattctaacactataattttcagattagtattgaggaactcgacaacgatagagaatttggacgattctaacaaggattcggggatttatgacatgggggtcggtgctaatttacaacaagttttcggtgcgaacccgctttgttggttcgctccttgtaacctgcctctaaatagacctgttggtgacggtgtaagatggtctcagtattgttacaatccaatacctgataaagtttaattctttcaacatactcactaattatccatggctatatatttaccagtgaatacctcattctatgtaccatcgaatatacaatgtacaatatacaagtgtataagaaagtgtaagatttgtaaaaaattaaggatcatattacaaattatattaaatataaaacattaaaatgaaaattggaatgattcatctggtttccttattttttcttaggtttttcttttggaacctgattcaaatccaaaccaccaagaagttcttgtagtaatagaaatttgtattctgttcttatgtcttctgggaaatcttcaaatttcactttgttgtttttgcttttcattagtttaacgtattgttgaactttgtatcttctttgttcaagactctcagtattttttctctttgcgggggtctttgtggttttcttttcagctggtagtggttttgggtcaagaacaagttcgccaatggtcttttgtactgtcctgtaacttaggtatttcttgtgtttttcgctgaacgcaactggtctctcagcagactctattttctgtacgtgcccttctactttgtatgacttgagctggtctgggactgcaacgagataatttttctcgttgtagtgaggagcaccgggcatatacttgtacaagctaaacaaatcacattctccgtacaacttctctggcacttcttcttttgcaactacactgtattctccaagaacaatgcctaaagaacattaatatacatttagttttagattaatattaaaattatggagggtaaatagtagaaatgagtataataaagtaaaatatctaggtagagtaatacctttgaaggtcagtaaataattgtgtgcagccttagacttttcgttgtctccgaatgaggcacatgttgcaatgatgtggtatgattttgcgctttctttagcgtaggtgacagaggatttaagtgccttctggactggaatcttggattgacctaattctgtaaggcaagttgtgggtaatatgtcagatattccaaaaaatactttaaagtcatccctattgaatttaagcttgacttcactataattacccttcaagtggcctgatggtcctgattcattaattgttactaagtcattcttagtcgtgaatttgaagccagtgaatactggacgttcgaatggttcattgtcaatttcgaacttaatgtcatcataggtcttaaggttaaccttgccaaatgattgggtgctttcgcataataaatttgattcgcctatgactagtttagatttctcgtcaagcgggattatgtccacaaatacagggtgctggtatactccattcactgatattccgtaagtcgtaggaacgaattttttgaggtcagcctttaattcggatgcaaatttattgtttactaatgctatcattgaaaatgatgcgcccattttgttcgcatgtgaatgtgcctataataataaattaacaaaataagaaaatataaattagtagtataaataacaagatattttaaataaaatgaaatcaatgtctaaatgactcacaaatgcttcatctaaggagaattcaaaggcatctcttactgatttatactttttatgttctcgtacttcacggatcctacacaatatatgtaattgttcttaggttatagttaaagaatataataattagatttttgcttacaatatcttataggggtttagtttcaaggtgtggaacgttgaatttttcgaatcaaagaatctaacaagcgtgttagcgaaaaacatttctttttcttcttcaaacaggcctttaataaaattttcaagcattggcatgaagtcagattccttgcatattccagtattgtcttcgcatatttcaccggcaatcatttgtttccttattgtttcaacagcagtatcatcaaggaaaatgtacaataagtgttcgtagaaacgttttgacttcatcaactccattgctggttttactctatcagagtatgccaaactaaaaaatcatgaagttgttcatataataaatgtgtgcttatttattaatatctatgtttataaattacctcaatggttctgtgacagtgacacgataaccatctttcttttcttcgtcaacaactgtgactgaaatatcaccatgatcagatgtttttggtcctagccagggcttttggcagtcaaacattcttgtaaagatgtatgttgcgttgtcgccggatctgaacatggaagatgagaatttggtatcggcagccaagcatggaacaagactagctccaaggtcattgattcttgaaaatgagtattcttgggtgaaaaccgattcactcaggggattaggggtaaacattccgcctcttaataatggctcaggatccacatacaaagtcattttttcatatggaaatttgttaacaccagttgtatcgaaggaaaggttgacagaaaaggtgtattcagtgcctgtcttatatgatgggtcaaagaaaaactcgacgtactttaagccatcggttttaacttcaaatattccatcaaatgtgtttagaagttcaccactaacatatttgccgacaagtttttttactttcgaatcaagctcgaagtgcaccacaagtctgttattgatggcagctttgatcttgaattgcatgacaattaatccagatttcctgaccaaatagggtccagttaccttcacttcggatgatttaggtgaataaacatcagataatgcaactggtaccttgggaaagacgttaagcggtaagtttccacttttaccaaccaggctaaacctaagatagtcagggtcgtacaagttcaaaaggtgtttatctttactcctgaaaactattgtgatcttgtggaacttgtcgttgtcgtcatctgttaatctaagattatattcgaattcaacggagagtctgtttaatgaacgggtgacgcccttgttcctgggcaacaacttgttcttatcataatctgcttcagtgggaagtccaaagaactcctggtcaggcctgccggcagtaagcttaagggtagctttctgtcctgccaacttggcattagctgaaaggtataccttcatgacattgaagttgtcaactttagttatagcgtacattagagtctggggtacattcatttcgactttagcagtgcctccatataataaatatctccttgagtgggcgagtttgtagaaatcaccaaatagctctttaaccacacctgagcattcatccgcaacgaacttatactttgtattagaactaatctcatcattgaagtctacattctccaaatcaatcgaagctacataaggcttgaggtagaagtgggctgagacttcagatgacttatgtgttaaatataatgactcatcagttcctgagaggtccatgatgattttaagggttttcatattttctaaataagatttgactgtactataagtaactctgcccttttcagcctcatatttgcaagtaaggtagtaaagttttggtgtacaatcaggcttgcataacttagtttcatctaattttttgcctgcaaatgactttggtaagtctatcacaatatcaaattgggtaggatataacgtttcgtacttgattttctcatccgcagtaaattccaaactcaaagtttgtgaaccgtttgaaggtttacgttcaaatttggcttcaattttgaggttattgcgtaatggcaattcgtattttggttcagataaatcatagccaaagtagtatgaacaaaatgctgattggaaagaattcttctcgaagtgcttcatcataatcgcagctgtaataggtgttttagttaaacacttcatttctttaatagctctttctttgatatgatttttaatacccagggccaatacaaactcgtcataataagtacttatactggtagaacttaaatcttttcttaacgcgaaatctgctgaaaaggtatataaaccaagcttcaaagtatcttgaaaatgatagaaattaataactagatcatctgttgattttatagttttaatttcattttctaaagaagtggaatcgttaacacctatgggttttgaaagtttgctctcaaggttaaatataatatccaaaaaggcgtagtttgagcattttcctatgaagccgccacctttaactttttctgccaaagctgcataagatgcgtcatcaactttcgagtctctgactttagagaaatcgccaagatattcaagtttagagttatgttgtaatttgagattcaatgggtacagaagagagaatacaaaaaaggaattcctttgagcattaaaatccctggtgctgaggttcctttcaactattagttcgaaatctacatggatattatctttatcttttgtaattttagggtaatttttcaaccttaaaaatgggaaatcagaaacgttgtgacatcttacaatgttaagtaataaaaaaaatgcaaatccaattttcatttttttataagaattttatataaatataaatatatggatgtgtaaataaatgtacatgtaattttaaaggcgtacataaaataaagatgcgatacttgtattcaagtacaaagggaaccatagtataaagtacgaaatatacagaattgtcaaacgcaagaacttatttaaatatattgaagcttataaatgtattagaattagctattgaatgatataagaaaaataaaaattttgggggaactaaaatttttgaatatttataacgagacatagctcttgttaataagatatataccattttaatattaaaaataaattaaatcgggtaaatataaaaaaatgtgtaataaataaactaatctgaaataaaattgattttatgaggctataacaatactgtttaaacaattaaattaactttatctatataattcttgattcatttttcatatgtttaaattttataataataaaaataattttaatcctaatttagacattgattcatttatttataaaattgattccataaattctaaaaactatccttatttaaaacacttttccgcttccgaggtattttatttattagttctagtgtttagatttacaaatggaacggaatcttaacttccttgagctcgaactttggtaaaatgagctctggaaacatcgtacacatttttcaagacggtactttatcactaaattatcgtttaactcatgaataacaggaaacgaaacattaactgacatgttaaaggaaataaataaggctaaggaaagtatttttctggagatgtacatctttgatgattctcccgtggcagaaatctttgcaaacgcacttaagatcgcgtcattacgcggctgtaaaatagttttactattagactacgtaatcgaattgcttatataaaccaatttgcctattgttaactagttcacatccataaattttattttagatttcatactagtgaattttgttttagattggttctattcgattttccagtaaaattcagcgtgaattagaagaattaggagttgaaatccactttttcaaccccttaagactgaacaactctataggaccaattacctatagaaaccataagaaacttttaattattgatcagaaaactgctttttgtggatcactcaatatttgccgtaattcagtcggagaggatcttggaggtgatggtggatacattgatgtcagtgttaaactgaatggtccatcagtatacgacctttgcatgtcatttctgggatcacttaaaatagctaatgtacacattgacgggttgacaatttcagagagggctgaaccaatacccggcggttctattgtccaaatctttgaatcaaacactagaaaaaataaaaaagatgttcttaattcattgcttctggtgatttccaaagtaattataatagtttcagacttatttatacataagtaacctgtggatatatgaatttaggcatcaaatagcatacatttgtcaacaagttactttatacctccaggctctctgagaaggtcgctgatctctgccaagaacagaaatctcaatataaggatgttactttcaggcaactctgatctccccggtgatacttcatcgacttactacatccttaagaagttctttgtatctattttacgctattactcacattttatctataaatgcactagtttaatagttaattagaggagccggtttgcaaagcccttcagggataactttagagtatttatgaccaagaacagacactaccacgggaaggtaatggtggtggatgacatttggagctccatcggcagttttaattgggataggttagtaaactttactaacataatgaaataggctatcaagtagaaggaatatggaactaactctgggcattttcgatccattagtggcacacaaactgaagcaaattcaacttgaaaatgaaaaggagtcttacgagtatactagaaatgactctttaaacagattgaagatactgaagatgtacgactgcatcacgtaccatatcgctcggttttcgggtaaaccctaaatttttatgatttttagaaggtaatctcgttgatggcctatcaaatgaaaggtttaacgttgttttcaagaagactttcatacgaacattcgtagaccaaaacgttagcgagatgttcctaacctcaaatatctcatccgtataaaataataagctgaaatattccaatctataaaattttaaaatgaaaactcttcggtaaaactagatgtaaataatgtttaatatgaaatgtgtaaattaatgtttaataatggaatctgtaaattaatgtttaatattaaaaataaacgaattattcaactgataattactagtggttgatgttaagaatgcgtccaatctcgtcggaaacttccgactgtgatacatgagagtcgagactagacaacaaatagcagtatttttgaagttgctcattcgacttttgcacccactccaactcagtcccaagcctttcaaactccttcttatataccttctcagtcctgtttagcatatccttcaaagccatgttttctgactttaaatcctgaacttgggacctcaatttggaaactagaaaattatggtccaagtcgacgtcgtttacaggaaatggagaagaatcaggtgtgttatcacctttgttaaagtaagcaggaaatgtaagtgatcttttgggaagttttgactgattttgacagattacagaatgagttaaattgaggttttgaatatttagtttggactgaagttggcattcaagctaagaatttattaaaaacgaaagggtacctttttaacaacttcattccaattataaatttcttggtctaaagactaaaaattattagtttttaaacctacctcgactctctttttaaggtttgagcactctaaatctttgtcgtgagagtaaaccctcaaagtaaaatgatccttcaaaaggtcagaatgttctaaaagctctcttgaaaggttttcgttatcctccttgagtaaactgttctcaagttcaagttgctttatctaagagtttattgaatgtgcagagaaataccctagttgtatttaacctcttaaaattgataaagtcgttatgttcctttttcagagattcactgagcctaccaggaatatgtaagatataatataaaataatttggtatgaaattactctagaattttatttgagttgagggttaaaatttcacgaaaatggttgggatcgtgaaatggttgattttcgcaataattggtagatgcacttctattttttaactcatttggttttccaatcataagaaatcatatgtaactttggatttgaaggatgtgtaacgattttgccctgttcaagtgcttgtgtatcaaacggctgtggtggattctgtttaaaatagggcaaatcaagtgatacaaaggaatgaacagtgtctagatttattttattgagatagtttttctttatagaatcaatattgtcctttataaccctttcgacatcatgagattttgaaaatattataaagtggcagaatgttattttatccagacagtttcccttaaaattcctcaaatccatttcttccttattattaccccaaactattttttctttttgaaagtcataaataaatgtggattcagagtccttaataattccgtagattaaatcttcgtctgatttcggctcctcgtaatcaacatttaaaaatttcaagaagttttccagacctgtttttgctaaaacgtctttagatttatttgatattaacatattaaatgtatcatctggttcctttaccacctcttcgcatgttaagcttaattcaggacgataactaacacagtatctcaagatttctttcatatatctcttacttattgttttcacaatcaatttcaaatgtccgtaatcgcagtctttactctgtattcttctgttcagataatctacgaactcaagaaaaagacaaaacacatcctcgagaccagcacctctaagttcaaatttagtcagaaagtatacgaatgctaactcgtcttcagtgggtctgttttctaaaaccaatattccaagtttttggagaggatccacgggtttttctttcttttcaacttcagccgattcatcaacatgcttgagtattttgtaaagttgtgaaaataagttcaatatagtctctttgtgtgattcagcaaactgtagattattttcacccgtctttagatagtcaaaattttgtatatctttaggtttagatattttagataaaagttccattcttgatcttgaagacttgcggaatgccaaacaggccagaagtccccaatgtgatttcataattttccttccatggcggattgtatcacagaataatgatcgtgatccgaatttagagtttttaaataagctttccaacacgtctaacctattattatccctgcatagtaacagtactctgcgataaaatccatcaaagactgaaaaaattggtaacgcattgaggatttcttctaaggataaaaaatcagaaaactttccagctctatattctacgtaatgttttattccatttctaagtcctaatccaggataaacttttgaagatttcaggagattatttaggaaccttgaatacacagctccaaacattggcgagtttgagagcacgctagatctaaaatcatgaaatagtttatgtgttgtaatctcatttcttttaaaacacatccatctgtaagcatttgtgttacattaaactaacttgactatctcaaggaaggttgacttaaccttggcaaaatctttatatgtagactcatcctattattatttatatttgtataaaattacctgcactctttgtaataaattttcaatcgtcgtgtattccacatcggcagtctgattaagaattttgatgaatcgttccctgggattcttgtagtatggaagtctgagtgaaactccatccctattgtacactttttgatttgcgattcttttttgtacatgtgttcctaatttatatgagtttattgaggaatctctcgtccttatgattggacttgcgataaatgctgttttcgttctcaaagattccacacatttatatataattatgtataatacaatatgacatttcattaattatcattctccgattgttactgtcaaacatgactgagttttactcaggaacgccagtgcctcaccactatttttatcataacattccaaaacctacaattttcataaaatccaaaaaagcaattaatttattatgaaaatacgggaaattgagttaaattcacaggtacctttacgtttgataaggaatcttgagagttggcaactagtgtgaacgggagtatattgttgagatctgtggttgttgagaactctagcttgactgaatctgactctgaaaatgtgggaactacccagactaatgaatctgggttagaatccacatttcctccctcattatagtttacttttatgttatcaaatctcgagtgtaggacttgaaatgtgagatcggtgaacgtaagttcagagttatttgttatttctatcactactacacattctgtggcgccctcactaggccaacaagtaacacttagcgggaaatcatcctaaaaacccatttgaaccactgtgcaattgtgtaatttatgtttatacaaacttgtagtatgtgtttatacaaacttgtagtttgtgtttgaaatatataatttatatgtataaaacatgctacctctgatagtttatatttccatttaataattgagagtggttgtgccaagttgaacccgttttgaagttcaattttagatttagtaaccatttttttgtcgaccatcgggtgatatttcattttaatatccttatttgaggtaaactaagaaaaaataagttctttaactaatacttgtagcgatgcggactgtgcttgttcctcaaacactgttgtaaccagttctccttgtacgttcagagaatcaacatctataaactagttatttttagagcaaatacctccgtccaagtgtagatttccgttacaagtctcgatgatttggacaacagctggtgcctcgccttcaacaatcttggcaatttccttttccttcaacttcttaattgtattatatggtgataaattacgagcctaaatattgtaagttaattataatggtacttgtaattggattttcggttcctgttgaacaggtggcggttcttgataactcgagtgagaagtgggatatgaaggatcaataaatagtttatcaagttgttttctcttttccatctttgatgacatctcacgcctcttctcctcctctcgaaccttggttttttcgacctttttgtgcattttctcttcataggagtccatctcaatatacactttaatctggtcaaacgccatgttttcaccctgattattactcactaactcatccatgtaaaagagtatgtcaaaaatattcttgagtatattctcttcgttaataacgggtttaaccaaattctaaatatttttaaggaattgtgggtgttttgtacctgaactatttcacataaagtctttaggactattaaatcttcaataatgtttgagtccaaggtcgtcattacaaatacatagaaattatcaaccagttgatatagaaagcggttcttatcgctttcaacaaaggtatggtcaccacctaaaaagtaattttattagtatgaaaactgacttttgttctctattaaccttaaaaaatttgaaaaacaagattctatttcctccctagtcatttgagtgtgctggcgagataccaaaatcctcatctctgaggccaaacccgtactgagaatactcatttgaaaataaacaaccaaattaaaaaagaaataaaagtaaaattaggttgttcaatgagtttgattatccagatttgcaaaaatattaaaaaataataaacagtttaaatagattgttaaaaagtttaaaatggatgaaattaattttaataatactcatctgtggattaaaattaaaaacatttggaaaaatataaatatgaatgatttataggttagaatctgaacaatttcccaccaccagatacacatgacgatctaagctaaaataattttaattttaatgtaaaatatatgtataaataaattggtctatgtagtgaggatgaaaaatgccagaagtaaaccaaaatagattaactatttcagaatctcatgtcgagagcttcaacacatttatcgaccattattctttcaacatggtcaacaatatacctccagtatacatcacatataatgcagattccttaaagtcctttttaaacccaaaggatactccttactgttagtgttcctaatctaacaaaataatttttagacgtaaaagttagtataatatccctaaaaataggatatccaactagaccaggctcagaatgtatcggaactagccagaagatgtacccaaggcacgcaaaaataagccatacaacctatgaagcgccactggtagtcacattcgggatcaagtttttcgaatctgagtctattatcacaaaggaggtgccagtaggtcatattcctataatggtcagatcaaacagatgtaatttgaaaggttggttttgtcaaatattaaattactgagaatattccaaaatgacaaatttacaggcttatctggagaagagatgatcaaacagggagaagatgcagacgaaccaggcggctattttataattaaagggaacgaaaaaatgttaagacaacttatagttccgagatctaattatccaatcgcatttaaatcagactcaaactcacagaagaatgttctattcacagaatactcaatattcatgcgatgccaatcgtaagaatagaagttagtgcttaagaattatttagggatttggatggtacttgcgtctctaattacctacacctaacaatcaataaaaggtgtatgttcagagttatcgtaaggaactcgatagttctggtcccgctctttttactcctgagagctttgttgccgttcctgagcgaggacgaatttaaaagaaaattactggaaaattgctcaaataaccaggaaatgacagtgctgtatcatagaatatttctggatatggtacagtgcgacccagtcctatcggatatagacttcatacaaaatagggtaattcaaatcgttaatctaatttttagtacctctaccggttggggaaggcttgttggaatcaagttagtcaatatttacacccaggatcaacgtttgaagaatgtgcacaccacctgataaagtattttgtcattatacacgcaaaatctaatttggacaagtttcgaacactcctcttcatgtttaataaactagtgaatttgtcaaacgggaatattcaggtatcagaatatacatttaaatgacataatagagtgagagctatgattcctttgcgttccaagagttgttgctgccaggacagtcatattcgtgtattttgaaggagagtttatacctgtccctgactagaataagaacggtctacaaccttgaaataaataactttctgaatcacctgaaaggtaattaactcaactgttaaatttggttaggtaaaagaggatttaagagaaactatgctggagttggaaagctggaaaatctagaccaggacttggaagaggaaatggtaagaaagtttatgaactccgtgaacctgttcaactttgcaattaacaaagtagcacctgaaattacgaaaaaggtccaccactttctatcaacaggcaatgcatttaatacccactatgaacttaaccagaacaccgggtttgccctggtgttggacaggattaactatcacaggttctcaagtcacttgagatcagtgcacagaggaaacatatttatgaagatgcgttcaacacaagtaaggaagctgctgggggaaacttggggctttatctgcccagttcacactccagatggagcaccgtgtggtctgctactccacttatcacaatacgcaaaaccagtgacaacccccaacaaaccctcataccttaactctattaagtcatttctgaagtcacaaccgctacatattagtggatcaacgaataaagtaaatggtgggaatgatagaatacctttagtagttgacgggatcccaatatcatacgtgaacttagaagatgtggaggagttttacgataagttgaagacatcaaaaaaccttgaaaagttcggcatgtgcagacactttgaaacatgcgcaattagagataagtttggagttttctcatcgatatatatcatgacttttccgggaagattggtgagaccggtgagaaatataaaggacaaccaaatcgagctaataggaccaatcacacagttatggtctacaatagctataaatgagtacgaattgaataaatcccacaataaactattggatttacaagctaatccgagcgctatgaataaagttcaagttccaaagcctttaaagagcctgaaggataatgaattggacaactgtccagttctttatgaatacgtagaactggatatgtgttgtatattaagtttgtcagccagtttgacaccgttcagtaatcataaccaaagcccgagaaacatgtatcagtgtcaaatgcttaaacaaagtgtgggaattccattccactcacagttctacagatctgaagtgaaaacatatgtgctaacaagtcttcaaagaccactagtggcaactaaggaatatgaaaagatgggatttcaagattacccaacaggagtaaactgtgtagttgcgattatagcgcattcaggatttgacatggaagatgcaatgatacttaacaaagcatcggtagatagagggctgtttaactcatttatatacaagtcgaaagtgatagacttaaactcccaagcgtcgagcaccaaggaaagaggtggaacagtggaatatttcaataacatggataaagatagtaaattaatagtcaagaaactggattttgacgggttgccacgactgggagaaaaactaactaaaaatagtccattttacagaatagaagaaaggggtaaaaataatatagtaaatgataaagttgtaaagtatacagaggaaccagcaatagtagaccaaatcacacttgtcggtaaatctgagattacagtgggagacaaaatcagctgcccaggactaaaacatgatagagcaataattaagctaagagtgttaaggtcaccaattgtgggagataagtttgcaagtcgacatggccaaaagggaattctctcagcagtttggcccacagaggacatgccattcttggaaaatggaattgttccagacgtcatatttaacccacacggcttaccatcgagaatgaccataggtatttttcaactactcattgttaatgtgaattatactgattgaaaccacatataatattgattattctttgtcaaatcgtttttaggaaagcttattgagggaatggctggaaaagttgcctcaatttacggaaagccccaggactcaacgtgtttccaggcctattattcagaaaaccctgagaacggagatgaagaaatggaagaagtggatgtggttgattatttcgggaagagcttaattaaatcaggatatgaatattacggtacggaatctatgtattgtggaacattgggaactgagatacagacacatatttttgtgggactgatatactaccagagactaagacacatggtctcagataaagcgcaggtattctatacttaaaaataagtgtaataggtgagatcaactgggccggtggatacaataacgaagcaaccagtaaagggaaggaaaaatcttggaggtataaggttcggagaaatggaacgagatgcactcatagcacatggaacagcaaatttactgcaagatagactacttcactgttcagatgcacatatggcatatgtctgtcctaaatgcggatctatcctctcaccgtcaatatcatccctggaggcaaacacgaaacggcaagtctcaatatgtacaatatgccaagttaactgtaaattggtcacaataccatacgtcctaaggtaaaataaccactaaaataattaaatttagatatgtcgcaaacgagctagcgacgatgaatattggaataaagttacatttgtcacaactgggatctagaatcgactcataatttaatacattacatatatttgatacataatggaactagaatgaattttttatattttctaaaatttatagcaattttaattgcaaaaaacgggaaaggacatttaaatttattaaatagaaatcttaatgagacaaaaatacattctttatttgaaaaaggtaaaggcggtgaggcaaataagtctaagtctgaagttgagcccatagtggaaaatgagtcaattaactttaaaacaacaaaaatcgtagtaggattaggtaagataatatgttaacaaattttttaagaatatctgggagcgggatatgatattgttaaggcaaacacgatgggtgatgccgaccaagcagaggatttggggtacagagccccagtgatagatttcacgtgggcacaaactgatgtgggagttacaaacagtctggactcattacaaccagtaggaggatgggtaaggcctaaagtgtcatgtggagagtctgaaaatgtacaaataagcctacataaaaatttttattctttgcttataatggtttattaggttactgaaatagagtcgataagtaaattgaaagatgttacggagtctgacgttggagtgaatgtaaagattccaaatgttggaacaggatcattgaacacacaatatcaagaattgaaaaaagattcagaacatacaaacaataaattgtatacaaactcatactactgtttcacctatgcagctggaatacctccaacacttgattggtaaataatatttagaaaattataattaggtccacaactgaggattttaatttatcagtttctgaattaccaaagaaaattaaagactatgaaaagtgcacaccagagggatacaagaacaggataaaagaatgcaaggatctggttaagtggatggagtttttctcagagtttggaacacacgttgttgttcaagtgcatttgggtgaggaaccactaaaataatgtattttaggaggaaagttaactagatatttgagtgttccatctagcataattgaatctctggcaaataaaggcttagatgtaaatgcagcaataggagcagtaatatcaggcgtttcagcaaacatagcagtgggagtgtcaaagtcagaggaaagcgaaataaaacaactaaaaaaatcatcaaaactaaaatttagtgttttgggaggaattcatcccgatagaaacatatcacccacatcaataaggaaatggaaatcaacagtcccaagatacccaatgcctataaagattgatgtggagagtataagtacattcttgccaagatcatattataactcgttcaaagaagcgttgagtttttatataacactaaacaaagctcttccttgggatattgagcaaaagaataaaagacttatgaccatgaagtcactagtgagtataatacaagtattaaaatgtttagttggtaaattcaaagcagatattagttacaaacaaaaatgatgaattacctgtggccaaatgtcaagatggaaaaagagtgctttttggattcattataaacattaacgaagatttaagcacctctgtgtattcatgtgtacaaaataagtaatgattaatgaattatatcttttcagaaagttttgcaccattgatgaaattcaaggaaaatctacagtaattatatatacactttgcgggaattcattggggcttgaattcaaaactatttatgaaaatggaaatgacaaagatgtaaaaaatagggtgtttatagttttatagattttggaatgtgacgatggagatgaagtagttactggatttaatatatcaataaaggataacagaatgataccgtgtaaaactggcgaatcatcttgtaagagtgaaaagaatggatcatcaattataatttgcacagacaagagattacctgaattaagagtaaaaattatattatttacacacatatacactaataattaaatatacagagtgttgaaactaaaagtcagattgtgaagaatggtaaggtcgattttggagataataaacaaacactttctggtttgtttaaattttataaaaaatttaggattttctgcttgtatcgatgaaaagtcaaaagtagaaaaatgccagccgtttgctaaagggtgtaaattaatcacaaaggataattgtatgtcatcgttcggctggggaatttttattaactaacatgtattaaacatttaatataatgatgatttacacaatgcaaagatcatgctctttttattcgatttagcagaacaactttgagtgtgtttctggcaaaattgtatgtcgtccaaatttaaagtgtctttttcgggaaagtttgcaacatgtcctgataactcaataatgtaactaaactaccagtaatgattttgtaaccatcagagcaagaaactttgtcatcagcgtagttgttggaaactaaaactttcagttgaagctacacacaaatatgactttgctgttaaccttgttaatattatccagttgtgaataacacaaggcccaaatgtaagaagtttcattatcattaagatcatatttgcaagatttatttcctaaaaatcattgttgtatggttatataccatattcacattcccttattgatgtaattatcccgtcaactgtaacaatcactagcccaatttgtatcagtgaataatttgggcattctatttcagtgtttttctgtaaattacattgttagaatatatttagcataatagtttacttacatcatccgcgttggacatcttcaatatttgctccactccaggttgtaacccataagaacatgttatccagtgaaatgaatgctctacattttcataggttggaattatgcactctttcctacaaatagtgaaataaaaactattatagatatttattaacattttagatttgcagtagctgacgcctagtaacttttcatttccgaatataagagaaatgcccatgaggacttttgaccctctagggcatttgattttattatcacggttccatgaaacaatagtagtcccattttcaatctgaattaatattctgttaaatgagatacctccttagaaagttcaattgaattgccacttatcatctttaatttttcgtagcttataccgttcagtatagcatattgatgtagggcctgatcataggattggtgcatagccggatgcatcaatgtttttaaactagtcgaaacaactccaattggcattggattttcagctacagtttctgcccagtgcgcaaattcattgtcatccattgggaaattaggcattttaccacccaacaccgacatttttttctggccaatttcatcaagcctagatttcttgccacccatgtctagattcaacttaacattgcctgagcctaattcagttctaacttcagcttctatatctattcctttcttcttgagttcttctaaagttgatgaatcaaataccatagtttggtttatcttaccacctacacaaatagtacatatacatatgtgtatgttatgtagggtatactatattgtatatacccagagtaagttgattattaaaatgagtcccaaacacctcaaagaatttaatccagggcttaatagacttacattcttcatcagataaattcaatttgttatcaatgttacaattttttattactttagaacttaagattggtagtctggaaagtgtgcggttaaagtactcagtatatccccttgaaaatatattaactaatattcataccactttaaatttaaaggaattccaacttgatatctaacgcactgttcagttttattgtatatcttctgtcgttttgatctaaatcatgtaaaatttttgcatgcatacttgaagttcattaaagcgtttttgtactctagggaaccagtaaatgaattttcgggaatatctccattcaatttggtacttgctgataaagaatccttaagttcttccaaattgcttatttcatttatctaattaatgtaataattagtttacttactttggttgatctactacatgaaaacacaggtctgacccacccgccgactgggtgcaacgatcctaaagtaggagagtatccttcggagttttttctccaggcaaattctattattggcgccctgtatccagggtctaacagcgtcgaatcactcccaacagaattggcgtaaattgaatcgtagccaaccccaaggtagtctgtgacataaaattgatataatatgttataccaagaccagggcatccacgatcaaactcgctagtcatgctatttgccatcatatcctctatatcttggtccaaaaggttttctattttaagctataaacccacacacttacacaccaacctttatttttattttttggagttttattactatttatgtaatcagaatctggatagttaatgcctaagtaatttaaactagcaagtaaatgacatgattcagggaaataaattagcataaacaagggtatcaaaattttaactctcatttttgggttaaatagggaattaacatattaaggaataaaatataatttatagttaaagaaatattatatggaaggaattaaaaaatgtatagaaaattaggaaggaacatctaagaatctatgagaaaagaaattgtataaaaatatcaaatcttaaatcaaatatcttattgtttttttatttttatgtttatataaatttttatttaattaaagatgaaaattttattttaatcaaaaatgagtgtgtaacaaatcaggtttcataatcattcatattatttttttaccgtgatacaatatttaaccataaatatacaaaattcatttagtaatgaatcttgttaaattatttaggtatcaaaaaatatattctgcggttcctagaaggggaattgatgagttatggaagggtatgtatgcatattagttttgctaaattaatatttaggtggttatcttgacccggatactccatttagtcagaaagagaagctttctaccactggttacccttggccttcttaccttctacgtcagaaaagttttgaggatttaagaagcctctacttttcatgtttaaaggagaagaatcttctcctcggtgaaagatgggctgcacttcaaaaccatattaagcctccaaaacatggaagactcaagaaggtattttaaataaaggatttaatattcaggttaaacttaccatgaaacgtatacttggtgttataactaggagggagatccaccaacagtgtttaagggctaaacaaattcttaaagctcaggtattgattcaaaatcaagtaaatcacataattctaggaagaaaaggaagttcttgagaccaggatgtttaaactgaaggaacttttaaatgaacttaacttcaagattaagaggttgtttcccaacattttattacctgtaggtcaaaatcgcaggactctttgtccaaaacaggatggcttaaaacagtttctaagattgaaagtgaaatggaagagattgagctgaagctacaacctcttaggaaaggtttgtttttgggtttataattgtttttcagaaactcttcaactcaggaccccaaactggcgttacgagaggaagtactcagaccttccagggagaatcacctggaacagagactacatacctgcactaaagaatacactacacaggccatttaaattttattgataatatactgaataaaatacaaattaaattaaaaattaagaaaacgaccaatcattggtggtatgtactacataaaatcccttgtactcgcttaatttaacctctggtaggatctttctactcttcttgtgcgatttggacttcctcttcttccgttcaaccatttctgacttagcattttgtgttttaacttcgttgcttgctttcagtggcttttcttggttactattgtacagctcatcctctttagataccattctgaaagagtccgacttctcttcaaatgtacgttgtgggtctgaagccatagattccaagctgtaaccagaaccatcgtaaatttgtctcttttcctcaaacttatggttccgcgttaattcaggttcaacagtcgaatctaaatacttaatatttctggtcctttcagactttagatctgaactgtccaattctctaggctgagttctatttgatttcccattcacaacacaaatcttctcgtatggtccatcaactttgtccaataacttatctgatctagggctagtcctctttttaggcgataactttatcaaactaactctttctgaatctccaatcgggtcaaagatcgggtttactattgtccaggagttttcaataatttgtaattcagttaattcattcagctctgatagttcattatcacccaaaaccatatcaaatgactgataagattcaatgttaccacgatcagaatcactgcatattgttgacatttctcttaaaggcatcgatctagagagttcaggcctctttccagtttcctccatttctggttctgagtatttaaccttcttaacgtcactttctttgagtttatcaggtatcttagggacatacaattctccttcaggacttaaccttaatatttcaaggtcttcatcaacaatttcaggatctgttcctctatcgaccctacgttcatccacagtcaaagtacatttatcggacttagttattgatgttctagtcaaggaagatttgtaatttatatattcctccagatcattagtagatgttgaagcatccaatttgggcaatgacactgtggaacttgacttacgtagcgtttcaggagcatatgctggtacactagttctcagtgaggttgaagtagtttcatctactttcgcttttagtttactgtcatctgatgttgatttgtcaacatttgaatgtatttctctagtaaccactgctttatcgtctttaggttttactacatgcgttgacaaggtgagccattcatcactacgtgtcctgtctttaagtttagttctcgagatttgcttttcagtcttcctttccagtactggatatgaatatgtgtcataagagagtgattccatactataaccttgaacaggttccctcgtaatcttatgcgggaattcatgagccgaaggggcctttgtaatagtatcttgagcaggctccttgtagttatatctgttatattctgggttcctcgtaactaatttattactagtcctttcagtttctttacatgctctactgtctgatttcgagggtataatcggtttaagctcataaaactctaaaacatattatatttataaataaggttacctctaggcagagggacatggaccatgggttttctgggacttttttcttcagaacttcctgttcttttaataatatcaatcaatgcgtcaatctcctcggattgctgtctgagatttaatttttgaaatgtgtccttatttttaagttgcttttgagccctctttaacctcagatcataaatagattttttcatcaatgaattatatttatctctattaaatctttggcctacataattgtgctgcgatttaacatttttcgacttgataacattggactgtcttgccatttccatgataatgttcatcttttcttttttcgccattgatatgacctgtaaggtcggattccgcgtattaagatccggcatttccgttatcttatttaaatgagaattatttacaaaattttactaaatgtgtatgtattttacactttatctttggtcctattgtctaaccaaagatactttctatttttagaagggttttattatttttatattttcgacttttatttttactttcacgtttacttttctagatttcgcgtctctccttccgtgcaagtcccagtgcagttaggcactccatgttttatcctacttggtttcctccagcacattttggttttttacaattaattaacttattttttcttcatttaatttttccattatcccaattttcggaatctggctctttttcctctcattttcaagttggtctctcagcctccttcatccacttatcaataatttaccatttccctgaaattactcactttcccctttgattaaataatatgtatttatgaaaatttaaaaaataagttaaaataaggtttcgttgaaatattctgttgttccagcctaatttattccagcctttctgttctgggctttctgttctaggcttcggttaaaattaactttggataaattgccatcgccattaactcctgtaggagtagtttgcaggcgtagggaattgtgacttgtgagatttgtgtcttattatcgcatgctgtgcactggaatgagctgttgttcaggtttgctactgagagtagtccgcagaaattgcaaacgtgtactctgtatgcgtctgattgatcaaataacctttccttgagcatctttgctgctccgtgtgatatcatacagtcacgttccatttctccaaacctgagcccaccttctctagagcgtccttctgttggctgccttgtcaacattgttactggccctctagctctagcatgtattttatcctccaccatatgtttcaatctttggtaatatgttggaccaacaaatatcttactcgccatcaggttacctatttattcgttaatttagttaatatatgtgtatattaaacctgtgaatccgttatggaaggcttcatttccgtatctcgagtatctgcacttgaataaacggttagaaatctggtccagtgtcattttactgaatggtgttgcgtcaccttccataccaaccagagatccaactttccctataaaattatcatatttcagtcaatatactaatatatatatatatatataaatatattaatatatataaattgttgtgtaaaaagttacctagtaaacactcaatcaggtgtcctattgtcattcttgagggcacggcgtgtgggttcatgataatatcaggtactatcccatcacatgtgaatgggagatcttccattctaaacgtcattcctatcgttcctttctggccatgtctgcttgcgaacttatctccaatttggggcactcttatacttcgcacctttacttttgtgaatttacaccccttgttgtttactgttaaaagaacgttatccaccactccattttcgttaggtctcaggcaacaactacagtccattctcaaattcatttcagaggtgtattgtgggttatttgggtctgcttccactggtgatgatcttcctattatgatgtcatctcccaatactctgcttcctggctcaacaagcccatcattatctagtttcgagtaatcccccctcttcaaatttaagaagtttcctactcagaattgatatatgtaatagtaattagtaattatatgtaattaactagatgatttgtacctgatgctgttggtttggtgaacgactcgataactgtgctacccaaatacttttcctccgatgaatatgtcctgttgaacactgatctaaacagtcctctatcaattgatgactgattcatgattagtgagtcttcctggttgtatcctacacgtgttgttaatccaattaagtatacctgtgtagcacataattgccactatggagttaattcctgcaggtagttctctaaaccttaaaaactccattgatcttgtgcacactaatggcttctgtggataatatagtacatggcttagagtatccattcttaagttatagtttgtgctgtacactcccatggcttgcttccccatagccgactggtatgtgttccttggactctggttctggtctgggaagggtataatagaggcacacactcccaatatcatgctcgggtgtatttcacagtgtgtgtaactgttgcagtagttattattattcacaagatcgtctggaaacattgctatcatacatatctcctcctcctcacaatcaatgtactccaccactcctgtctccagcagtcctgaccaggtcaattgacggttttctatcatgtcagcgtgcttctttgttatcaacagtcggttattctcaactatatacaagggcctcattgaacgacctaaaatcatttttatgttgtgaaaaaatttaagttaggtgaaaatattaaaattgtgtaaaattatgaaaattacctgcatctgtgaatattttaatctcgtttgacatgatatctcttactattgacgtttcgctacttatatttcccttccttctcagctccaacagtacgtttaccaaagaatctggctggttgaaaactcctacccaggtaccgtttaggaatatcttaactctgtcttttatcaaaattggacttatttcatccaaagagtccattccaaactccagcaaaaagtccaggattgtgcttgataggcttccgacacttatataacacatcaatgctaggttctttaccaaaccaacggcttgcccttctggggtttctgctgggcatatcattccccaatgtgtattgtgtaactgtctcggctttgccattttcccttctcttcctacaatttttattgttttaaatcaattttttacctagtggtgtgtttaatcttctaaggtgtgacaaatatgatgcaaatgttaaacgattcaagacttgtgaaactcctgttctcactacatttccatccttatctcttccccaatttcctaaatcatcatttaaaccaagaattaatatatttttgggtaacatgacttaatattagttagtttaattaaacgttatctgggttattaagaatacccgttaggagttgatattgtaggccttgtgttatttgtgagcaagatttaatagctcctgccacgtcaaacgagcgtcctgaatcaatttgattttttaggaacctttcaacatccttggccagctttctaaacaatgtcccaaagctacttgccattagggacccagctagatctagtcttttctttccgaagtgttctctgtcatcttcatttatacgtcctaactggtttaggagtagcctgtgtatcatgtaccccaggtaaaaacactttttagactcagaacccacttctgtcccaacgtgtggtaagaagtgacggcgtagtgtttccttagcaaaatttagacgctcctcgtgaagtgctcccactgtagggcctcttttacctaatcaaacacatttatgcagttgactatcaaatttaactaaacattgaataagtatatacctataaagtcaaggcattgttcttgtgaagtgaattccgaacattcttcaaggcttgctctcattaacgacagcatttgagtgtctgagaaatcgtacactattctctggagtatatccctgtctgagatacacccaagtgctctgaaaagtatcggaactggtatatcacttctgatatacgggagtactgccaccatcttatctggataaaatttaaagttgaatatacaataaaactatctacaaataagcctaataatactttttgtgagttgcgaatttgaaatcataattgtaagggatgtaactccctggatgaagtcaggttgtgatctaagctgtgcaactgctgaatacttggagtttttcttattgaaaacatagacgaagttgttcgccattctctcctgagctattaaaactctctctcctccgttaacaacgaagtaacctccttggtcaaatacacactcgccgatatctgacaaatcccggtcgttaaggcctctggtccagcagtatgaggacttgtgcatcattggcattctacacagaggaactcttgggtacactgtggagtctgtttggaccagctttccattttcattaacaaatgtctcctgctcaatgtcaatgtacacttgggaggcgtatgttaagtttctcagtcttgcttcttgcggccatatgtgtttgaaaactccatccttctcttccaccgaaggcttgtttagagatagctggccaaattttaatctatagagtatactattttcctcctcctcttcaggtcgataatttggctgcggcctaaataaaagtttagtataaaacgttcatacgtgatctcaattggtgggtgtgcgtctatgatctcctgcatacgatatgttatgaaatcattaaaactttcaatttgttggtgaaccaacccgtgttcattaaaaaatgaacctaatcagtaaattacataaatcacataagttatgaagaaaatgataataattattattaataatgaaatggttaaaattgtatgttgatatacctatgaccttccaggtatcctcctctgtgaaattctcatctacagcctttaaatattgagagtgatcaagatcctgatcgatatcatattttgggggtgagtattcggaaaaggtgctgttgatgtattgagattctaagaataaaattgtttagtgagattttaaacaaacctgataacctttccgatccagaaacgtgttgtgtagaagtaaaataaaaatcagaatccatttataaatttaaaacttaataaaagtccacttgacattggtaatgttgcctccccaccatcaacttgacgaaatattatttacttcaagttaatttatttctagaaaccaaaacacaaatcaattagacttgtaatttatttgtatttattttgattcttgatataagttgagatacataaagttttaaacataaacttctatgtacgtttcaatagaagattttaaagatcatctcagttaaaataaataataaaaatggacaacagcaatgtggcttatcagagaaagaatcatgtcttatcggattcctcgaataggcttaaaacactcgttaagggtgatcacgaagacgacgaagacgagttgaagagtgttccagccttggatactagcaaaaaggactcaaatgcattggaaaaaaagaaaccagacacgaaggtcgctaatgttgatgatgaggatgaagttgttgaggaaggagacccaaatagagtacgcttgtgtgggtacctgcaattacatttgtatttcttttctttgttattcggaggatttgtttgctactttcgacaccacgaggcaataaaagatacctacccgaggtttttgaagaatttttaccttttgctcaagagaaggaacgcacatgtatttgcagaacatgggttcaaattgtggaccaatcttagcgagaaaacgaaaaaaaccatagtaagatatttcagttatggaacaattttcctaaacctttatccagttctaacttcaccttccaagccaaggaagaacaaagatggagaggttattcccgatcctcaaagagaagcccaggtaaagctcaacaagactgttattaaatatggttcgtcctttttcagaactatctctgcaacccttttttgtggattactaggctatgatttggcgtataacctcccatatctcaaggctctatttaccagaaaataattttctaacaacacacaaaactatattataaactatgttatctaatataaaaaaatatgtattttaatattctgtacttctaggaacgatgttttcttacatgtaggtagtattctctggcgttataccctcagccctattgactgaagttaggagaaattaatttcacaaaatcctctcaattttttacacaaacttatttcaaaatgaaaaaatattacagttaatattttgacatggtttcaagtaaatccttactaaagcatcaagtgtatgtagtagttacattaaacatacattataactacattgtcgaaatcattcatatttttagactcccatcaacacgacaagacttggaagaggataatcatggcgagaatcacctggagggtaacgggtctttcttgaaaacagcagtgtttggaggactagatggttcgtgatgaattttttaaaataattgatttaggagtccttacaatgtttgctgtcgtctcaggcgcagttggagctgcagtttcacccaaaaagatcctttcactgtcacttggaagccttcttgcttcagctttctccatggcatacggtgaatacgttagcgccagagctgaattggattttgtgaactcagaaaaggctcgagaggaattgttagttaatttaaactaatatattaattcagtgagattatgaattgcccagaggttgagcagaaagagatgtttgacatatacaccaaccggtaccacttctctaaatcagacgcaaatatactggtccaagtttcatttaagaaaaaggttttcattgattttcataaaatattttaggattttttccttaaacacatgatggttgaagaactaggaattatgcttgactcaactaattcaacacccttgaaaaaaagttagtacctttaaatcaataactatatttaatcatatacgaactaattttagtaacttgttgaaataatttataaaattttaactaataaatctattcaggcctcctgatggcctcaagtttcatagtcatgggattattcccactcctcggctacctattcctcgtactttttggacggggcggaagtgacggcgaattcttcacgtttgtgttcaccgtaatcttcagtgttctgggctctgcattgctaggatacttcaaagtaagttaaacatttatatagattgaattggatgtaataattttcagggaaaatacttgaaacagaacgaattcctctcagcgttttacatgacacttaacggtttcgtagtaggattaatttcatacttgatcggactgttaacctcagtattttaaaggacggatgttgaagaatttttaaaattttaattaaacctggggaaaaattttaattacgggttttatttataagattcacgtaaaggtggactagaggatgtaaagtataatatttaaagaataattaggctgtataatattttaatttctcatttcggtcatatgtgtatatataaacaacgaggttaattccatgaattctagatatttagtacaagttttgacgaagaattaaatataggggataatgtgtaagatgcgaagatatacgattaagtatcaaaataaattcaatggggtggctgattcatatttatgactaatatcctgaactttttgggctacacagttcccattttcatattcccagtgtacaaaattaattttataattccagggcaattccagttttattaagttttatttagttctgaaaatcaccgagtatcaagtttcagccaagactaacacccggtgtttctgtattttaatgactaaaaattttatttgtgactagtacaattcattcccctcttaaaaatttgtaaaatattgttccattcccttcagattttccacaatgtcaggattttcagctttatcgcacgttgacctcactacaatcccaggtgccccctcaccccgtgcagcccacacttgcgacgtcgtacaaaatttcttagttattttcggcggctggtcaggaagagaagcgctcggagatgcgtacgcctttcacctgaagaaaaagagatggtatttactcaacttgaggttagtagagtcttcgggaaggcgtgtaagacaatcgaactttgttatggatagaaataaccacgcatccgcagtctacaacaatgaacttttcgtatacgcaggccacgatggctcgaagtggctcggagatatgttcgccatagatgtaggaggcctggaagaaagtgtgtctggacttaagttcggccagtcagtagacgtccacgtaagaatagttgacggaacgggaaaggttccaacaaggcgtgcttgccattcaatgactctggtaggtcaactgttttatacctttggaggctacgacggtaatcagtgttttaacgacttggatgtgtttgatccaaccctgaattcatggtctcgccttggtaaacctcatggaaagaaaccagctgctcgaaatgcacacacaatggtgacagatgggagaaacctatacctccttggaggacatagcgggtcagttcactttgacgatgttcacatgtattcaatcaattcacacacatggacctgtttgaactgcgaaggaagggttccgccaggtgttaggggtcattcctcagcatttcacaagggcgagatttatctattcggtggatataacggcgacgtgccattcaacacactatatgttttcaacttgaggagctcaacctggtcaattcaggacgtttcctacgacgaagacattgaaagaagacaaagatgtaccatggtaacactacctgacgggctgtatatcttcggaggttttaacgggactaactggctaaacgatcttcattctatcaagttttacaacactatcctaagtaagatattacacagaatatataaatctaaacttattatattaaatgtaaattaattatttcaaacataaacttgtatttaaaaaattgtttaggtggaactaataatttgaattggtatgttaagaacgtgggaggatttatgaattcaaattcattttcggacgttattatcatggcatcagggaaggagataccagcacacaagttaatattagcagctaattcaccatacttcctggaactgttgtctaacgataatgaggaacagggaaaggaagaaggacatacagaaactgttaatggaacgagtggagaggcatcagtagcagaaaaaagagaacccaagaaagcagttattgaattgaatgaatggagttttgactcagtaatgaagcttctggagtttctgtacacagcgaaggtggaagatttgggtaatagcagccactacagagtgtgcgagatccttggactagcggacgcatgctcagtggtgagactcaagaacctctgcgaggagattctggtcacaaaactcgatatcgaaaactcatgttacctgttaaagtactctaagctgtacaacgcagactatctaaggcagtgctgcttcgatttcatatcagaaaacgcagcagacgtcatgctaacaccaggattcgaagacctctcgtccctaccctcactggtgcttgagctggctaagttgtcaattaacaaaatgtcataatatctcacgccttgtaaaatgtatcatattctctagtgataatattttaaaaattttattccagcatatatattaatattatattactagataatattggtttgatgtagttttcatgcttgtgtaattctcttcctggggtgtaagaatatcataagtgacgttgtacggaaacacatttcatctttaaccctcgaggatgatagacacaaaaaattaaccttgagaggacaagtcgttatttatgtttattagtaaattttaaatagcttccaacaaatatgagaatatgaaataaagtataaaaaccaaatggcgtcaactgaggttctaacagggtttagggtgtataaggattacacccagagaaagagctattacagagatcacctcagaatggccagagacatgctcgtggtagaagctcggttcccaaagcaaacaaaaacgctcttgcgcaaatcaaataaaagattattcaagaatctagaatccttacaacagatttcagactccttctttaaaagaattaaattggatccagaagttttggactctttcaagaatctcgtaggaacgagctttgtaaatggaacaatcgactttgagtcgtttctgtcgacaagtaaatctaaccattttagcttacttgagctgttattcaaaacgctgtcgaaaaactatgacaggattcttgacttggaggcccaggcgaacaggctgacagatgttaacgcagatttaaactcatacatctcagacgtgctggacgaatatgaaaaattaaggaaattcgcagcagatagtaaggaaatgaggacctcagaagtaggaaagctgtcagaagagtaccaaattctatatgaaaagtatttatcactgcaggaagagttagtggaagcaaaccaaatgatctcattcctgcaaaatgagctttcaagatataaaaaacaacaacaagaaagtgaaaagatagaatatgatgataggaatgatgaaaaatcagctgtaagatttaattttcaacaacaaaccatggacttgtttgatccgcaagtggaagatataacacccaatgataaggaaatagagtatgaaagtaggctgaatgacttacagagaaccaatgatatgttgtttgaagagaacatgaagttgaggaagatgagagatcaaaaaccaccccaggaacaatttggagcagataagtttgttacactaagcatattgttccaccaaattacaaagagcatgaacaaggtgttccaagatcatagcgatttcgaaagaacgaatgatccagaagaaacgcagcaaaacataaaattatacctgcaggatgcaagactgaggacactagactatgaaaatatggtgtataaggataggctgatggaggttgaaacgctcttgaaaacggaaagcatagccagaataacactggagactacgatatcagaccttaaaatcaagctctacgagtcagaaaacctttacctggagctggaaaacttgaaaacgtcagtaagaacaaaggaaaatgaattaaagaacatggtcgagtcaggaaaggtggagtcggaacagttaggtaaaatgcaatacatggtgacaaacctgacgtacgataagaacgacctacttaataagatatcatcactggagtttgcaatagattcccataataaggagagagatgtgatgagaggacagctcagaaagttagagaatttgttagaccagaattcagaaaagtttgacttcagagataaaataaccaatatccacctccaggcagagatagaaattttaaatgataaggtgcatagaatgaaaatacagttggaagaagtgaagaaggaaaatgtagaattggtatcgacaagagttaagatgagaaatgatctggaaagagtaagaagagaaaattcagaattacagaaaagaatatcagaatctgtgaaaaatgagtcaaatatgacagttcaaatacagcgattatcaagtaacctagactcgctaaaggaatcactggaaacgagttcaggaaacattagagatatggcagacgaggtggaagtagctaaaaagaaaatatttgaaaaggatttgcagttgtcattaatagagaacaaaaaggatgaattgaaagctgtgttagacgactttgcaataaagctgagttcgtcgaaggtgaataaagtaaacgtagtgaagaagttggatttaaagacaataagctacagtgaattaatacacacacttacgagttctaaccagaatggccaaaatgaggttacagagtacacataccattacctgatgagtaacctggagaacttaataaagtttaacgagatgttggtaactttgtgcataaacctgtcgaaggagcttaacgcgctgagcgaaagtgtcctgaatgtgactagcttctcaaacatatttgaaacgtttaatatagacttggtaaatgtggataccttgaagacggaacatttgtcggaggtgagtgacctgaaactaaaggtgaaaaacctgtcggatctgaacaaaaatttggcacataaacatgtatgggaaaaaagtatagttagactgaaggaaaagtatacatcgacgattgctaaacataaagatatcatggtagaatgtgataagtttataaagctgaaccaagaaggtttggatggattaatagccgaaaacacaacgctcaaatccgactgttccaaagctgcattcttgatggtagactatgagaatcaattatcagaaacatcaatggagctcctgcacttgaaggaaatgatatatacactcctgccagatgaccttaaactcaggtcagaaaaagatgcaccactaaagtcactagagttgttacatgaacgtattaattttaaccatggagactatatgaagttaaagagttcgagttctatgaacatgagctcatttgtaaataactatcatgagcaaccgaagttttcatttaatgaatcatcaaataagaagttggaaatcaaaccatcacgtgaggagagggaacttctggatgaattgaatgaaaataaagctaactacgatttggataatgaaaactatctacttagctctaaggagcgagaattgaatgatgtttacgaagatgttaggtactactgtaacctaatggcttctgacatcaagtcccagatgaatcatgaccctactttgacactggatacagattacgaatacagtaatacgaatgatctactctcagatgatacaatcagtgattacaaggatgaagattacgtctcagataagtttaaatacgttcttgacctcctggataagttattcagccactacaatcgccaaatgaaggatcattatcaaaatatgaataaccctaacagaacacacacgaccctggtgcttgatacaggtgtgataaaatgcataaccaagtttgttcaaaccctgaagaggtattataatacatttaataatcaaaacacttttgtattggatgacctgcagtatgagttcgagtcgataccaccaatgcttgacccgcataataagtttaaaacgttctgctcatgcttaacaaatctactaaatatctcgtcagagttcattttggatcagcttagcgaaagctcagagcaggtgagtcacttgatgaaggacattgaaacaacaacgtcgtcaatgaggcaattggaggagattaacatagctaaggatcagcaaataaagtcgacacaatttgaaatcagtgacttgaaaaatcaaataaaccacctccaaacactctatcagaaggaaaagaacaataatatggaaaataaactggatttggaaaattatgaatatgaactcaataagctcagggatgacctgaggaatcagttaaacaaaaacgaaaaactggaattattggtaaaagagtatcaacagataatacaaatacaagaatcgagagcttgatttgattattgccccttggaactcccaaattttactttataagttttaaaattttaattccaccaattgtgtaaaataaccttatctcactattatcattttttaatattaaattaaaatgatcagatttataaggagcatttttaataaaatccatacatatacatgttattttagcgtatgtttgattataaatatccgtgtttagactgtttcagccgagagcacaaatataagaagattccttcaaaatgaccaaatagatgtcagtaaattaaatttctcagaaattaaaaatttatcggaccaagttttggaaggattgaagagcaagagattggaaagaacacttgtggtcaagttttcaaatatcgtctcagactatatacaaagagatacagaaaatggaagaaaattaactctagacgattacttttcacttttagattataattacttgacacattcagataaatacctcagtgttttgacatcaaacataagctggtaagattccatagatcgttgaaacatatttttaccctaatcatgaacattagttaaacaataatattatttaaaatttttagtcttttggaggaaaaatacaaggattcccaagagctcccagaggcggagcttgggaagctagtggacttgctctcgagattacacaaacttggagtgtttaataaccagttgtttaattttatgtcaaactatgttaaattgctcgacgatgagatgctttcaaaattctcaaacctctcccaaaagtatgggttgagaacaaagcatatactaggtatgctcaaacgaaaaactcaaatgtttatagatttgtgctataaagaatgcttaaacagagtggataccatgaatatcaacttgacattgaatatgttgaaaagtttcgcctttttctccttcgaatacagagaaatattcctcaaaagtatacccagattgtcagaaaatgtaaatttattctcgaacgatgatgtgttaatgttcctcaacgttgcaaaaacattaaaccagttcccagaactcatacaatttagagacttaattttgtcaaaaacgaacgaaaacctagaatcacaacctaatacacacttgataaggtaaagtaacatttatcctctttgacactaatgattatattaatgatttagatgtgttggagaactctacagagggttacgtagtcgggccggaaagacctttgtttcaaacgttttagataagattgacgatgatgatttcagactagttaatgttaccaaccttgtgaatgtgatgcatacaataaacttttataaaatgaagtaagttttataaaattatccctagttaatcttaattattatttaacattaataactcaaacatagtaattatttaaaaataacaaataattcgcaaaatttcatttagattgacatacttaactgacatcttaagtattctgagcacgagaatgaatgagatagtgtcaaacagaaacctaggactgtggtctgaaatcttcagtgtattacttgaaacaggatggttttcactcccgtttatgcaatccgcaatcaaacacattatatcggtaattctaaaatttttatataagtttaattgtaaaataggaaccccaagtgttgtgcagagtctcaacataccaaattgtaagagtactacaaacgttctataaactacgcttttaccacaaagaatcttatcaagtaagtatattagactgaatactaaaatccagactctcttggacacaattgagagggggtttgacatgttagtcccgaagtttaacatgatatcggagactattctggcagctgcagacgcagatgtagcacatgaaacactatttacaaaaagcctggagttttttagttccagaataaagcatctgaacctgcttcaatgtgaggacgacttgataaccgtcatgaccaagaattatatttggccaaggaatgtgataacaagtgcttggagcatggcagtgatggactatcacaaaagagatgaatttaaaactcttctgcagttgatagttcatagaaagtattttttatatttcctaattaatttttagatttgctgaacaggactttgatatgaacacaatattgatgtgcctggaggctgctgaagcatgcatggttgatgaggtaaacatggagctagcccaagaaatttctgatattttcggagataaaatgaggtttaaggaaattaacatggaggaagaagtggaatatgagaccttgagagataataaactaagctttaacgagtctcaaaacatacacttccataaaggaagatcaagggcaacgaagcacatacaatgttgttttactacctacttattttgtaaagatatttctgataattttagttaattaacaattccttattaattttagttatttaacaattccttattaatctttatttcaggtattctggaaaacatcaataagaaggatattctgttgaaggtgtctcctcattacaactcgccttacatcatcgatatctgtttctcaaaggaaaacaagaagggaattgttctgttcagcggtagagaattgttgagaaatcatatagactccacatggtcagttaccaccacaggatcctcaaagttgaaattaaggatactgaataaacagaactggactgtaggtttaacttcaattaccatattattcaggtcgcccaagtcagttgcagtcagtggtcagtgcttaacacggggatggaacgaaaggactatgttaagaaactcctaacacaactagacatatcgtattaactcatgttaaactgtaatatatactgtgaatctggtatcaattaattaatatattagcagttaatctgtgcaagttcctctttaagcctttggtctagaacgttctcgacaacgtacatgtaactgtacagatccagagaaactaacatattgaagagtttgtccatatcatcatagtccgagtctttaaatgaatacttaggattgataaaaccactcggccaacagcacaatttgaagttgttttgagggtttaaaacaggaaacccatttgtgtactccatgtttgacatcatgtttggagttgatgggaagcttgaaaaccctggcgattgataattgtagtggtttgggttatttctaaggggataactcatagttgacgatggctcaggattagtgtcagacaacagagcgtggatttctttaagttcattctggatataagttgaattcaaatcaatgtttggcagatttaactcaggatttagagagtttttacacaagttacacccaggctccggttgttttaatgttaaattttgattattcacacctgagaagtcagaattattattattaacaaaacagttatcaatctttaagtagttttgagtagattcatcatgagaatgaaaaccattcaactcatttttaccaactttagacgatctattaaagtgtttaggggactcaggttctgaagatgagagactttcgtattcacatgagcaagactcactggaatccgattcttcacagctgcaggaacaatctgactctgaatcttcctgatttaattttagccaatctcgacgcatttagaaaaatgaaaaattgaaataatgaatataaaaactaaaataaatgtgtaataagctagaatagacgataaaaaccctagacacatttagttattatagtatgcttaacggtgccatgaaataaaaacaagcaaaataatgtaaattatcatggaaggaaatgtatttatgtaaatttcagaaaatattgtacttaaactctctgtacagtaaacgaacagtatcatgaaaaattataaacaaatgaatctaggaaggaaaccaatattgaatttaattatcggttaaattattttttaaaatctatcaaaaaattaacattctaaccataagtagtgctatcccacatctatgtcggttataatacatttataatttttcccagatggcgtatccttacaaacctactttttttgctaaatatcctgaatatattcctccgacaagtgaggaggatgccttagttgaccctagggagaagctgaaacctccgtgtatagagaagtgtgccaaattcaccaaactctacgatgtaaccactttcttcacatttattattttatttaatcttattaattggtcttcttccatatttaattgtttgctattccatatttgtattttatttagtgttaattaaataattaacttcctacaacaaatttaaactaaaatttagcaatgtgttgaccgcgttagggtaagaaatgagaagataaagagcggtgagtcggatctcgaacagggccattgtctaggccaacactacgagttagtttcttgtgtcgacacttgtgtatgttttaagaacataattttatttatttaggttgccaaggacttatttcggtacctgaaatagcattaatttataatttgtcatcgcatttgaccttattttctctaaagaacaactagattttaattttttcactaatcacatataccatagacttatttctttactaaactgacattaactgctagaacagtgtaacatttaacacataatatccatagtagtacattagagttcaaatgtcttccaaggggtcacggtactttttaaccatctcaaagtagtggagcgccttgtgaggcttcagaatatcttcaatttgctcatcgcagtcgacgtagtttactgtccagtgagggaaggtcctcttcttaacgtttccaacccataactgcttacaagtgttctgactagcatcgatttcatcttctaatgggtattcagtccacttaattctcctcaaaaggagcttagtatacctcctaatactcaacttgcttcctaaaaatatattaaagggtagataaatataaaataatgtattttccagaaaatctcataaaatatttgaatatctgtgattaccttcaattactaggaaagaaggaccgttgttcatgattacgcaggtgccactcaggtgaaactgctgagcattagtatcgattttctttaaaagtttcgggtttgcaagtgagtttatggtaaaaagagctgcttcagcttcggcgtttttcttaatctaaaaattaaaattaataattttacataaataataaactaacctgccatttttgtgcgtttttctttgacctctgctcctttgttaactttctgtcctcgtttcttttctcgtgagctcttagacggtcctccatctgctttttcaccatcttttccaccttagaagggtctgctgcagtttggtttttgaggacattcaccaggtttgacattctaagcttagggggtggtggggggatgcttccaattgctattttatccctaatttctttctgcctttgctttctacgtagagtcctagcttttctcctttccttctttgtcagttgagtgggtactatatttaatccttttttacgtttaccgtcaagtttgacagggtgctcaatgtagttattgaaccgatcctacacattaaatttttataaaattcacaaacctcgttaatttttaattcgtttaaattaacatttgtaatgtactggtgttttttaaggttttgtaacttgaaggggtcctctccgctctttaatataataactcctcggtcccaccattcaacaaaaggttcatcatcatcctaattaataatgaattaataatttaatagtttaatttttaatatttgataattagttaatttaatatttaataattaataattaaaaatacccatgagtccttgttttcaagcttgttggttctgagtggtattagatttggattcaaatcctggaagtttacttcatttgattcagactcagtgtgatttatttctttagtttcatctgctacatctggctcattttgttcatcttcatccttatcttgatcatcctttgagttctgtaagttatacatggcgttcagtcgttggttttgctgatccaataaccgtttcttctgtattatcagtctgctcctatttattccaagtgctttatcttccatctgcctcaaaagctgacgttcctgcttaatatatgtccctggctcaacgaattttaacaattttctcttcttcctctaaaaatttttatatactatataatcatacctttaaattatttagtgatgggtctgtgtattgggtttgttgtactctttttgctaatttctctgatttttctatctgtaattcctttctttgtttttctacaactaagtttctattaactttaagcgttgagtggatcacaggtgccgttttgactaggtttccagactgatccaggactcttccaaagctatcaaacatcaaattctttactcccaggctacttggtgctggaattaactttttagtaaaattgatcttctgtaggtgttcctggatttgcttctgaaccaattctgctttcctggccttctcaagcgcatcttttgcaaccataacattcattgcaactgcaattatattaattttagtttaaatatatgtaaattatatatttagtacctttagaagctggaattgatggagtagaaggtgttttgcctaaagtaatgtgattagttgggaaataaatgtgatcaaatttactctctgaaggtttgctcttcgaatagttcgtttcattttcctaaaaacaaatatttattgtttaaaaataccttttcatgtcttctgctcctggaatctgaggatctactatcagaatgtttacccattttttaaaatcaaaaattatattatttaagcagtttgaattatgttgcgataaattaaaacaaatttgttatctttttaaataactaatcgtagggtaacacttgaccatgcacatataattggattaatttatttaatttaccctttaattctccaaattaatttatcttcgttttaaaattaattattttcttcatagaagaattgaatattttttcatccctaggaaagtttctatttcttatattccagttacacagtatactatttataacttatttgtctatttttcctgtttcttacacataatttcatacacctattgttattatctttgtaaatattattaaaattttcttcacatctctataccctaactataatattatacaaaaatggaagttgtcaacaataataatcttattggtgagattgagtgtaaaaacgttttgaaaaacttcattaaaatggcagtctctataatctgctacttgcgtaacctgttttccgagagtgtgtttgaggatgcaaagataggtgatcttcacctcaaaaggctcactagatcaattcctgaatcatctaatttgattgactggattgactacggagtctatgatacaataattaaggttatttgcattaattattcataatttaaaacaataaatcacacattaggaatacttaaaagctctcataattactatacatgataccagtaatgtcccacttgaatcatattacttaaccctcattccaatctcaatttctaaccagaagggaaaagaatatataagcaaagaccttatcaagaacaacactgttaaggtgattttgtaaaaaacattttctcttagagcctaaaagagttgattcttctgattcaatcactttctccactttacgataatagttatttgtcaataaaacttttatattttgacaatgtgccggccagctacgagcccaggttctttaaacctgaccacaatactgtcaacaacatgcccattatacccataacaaaggcacttacattatatacacacttttaatagctataatcattattaaattttaattcagttaaacaatggatacaatgaagttcaaatagacctatatacaattgcaactatcaatgaatactccaccaactacttgactaaatcaaccagtaaacataccacttgcacaagagatggttctataagcagtccaaccagtactgataacgatgaaaatgatgaaatattaatacttgagttaatcaacaaatctgagggcttaagcaagagctgcaaatacatcaccaagtctttaatatcaaccggacttggtgtcaatgtttcaattgctaaggttctaattaaaaagttagtaatacttatattttatttaaatatttagattaatggaaaagggcataattgaaactaaatacataaaaaacaaaggctacgagtatgtaaaattcagtatattaatgtttacaggagcaaactatacatcaacaaataacaatatcaaatgaaattctagagtattatcttcgaattgttcctctggaaatcctcgaatttcctcttgaaagtttaaatgttcctctagaattgtgagctgctgttggacggccagttttgaaggatttgtcctttttaacagattttttaacggcaaattgttttacttcaggtctgcttgtaaatcttgccattggcagagactgttttggatcaatatacagcttagaattggtctcaaaagattttgctttaaagccttcattcaactttacggaacagtactaaaacatttttaaattagtttaaaataatttaaatttatatttatttattaaataatctattaattaatgataaaaacttacgaagttgttaacttgtcctagaatctcatctatctttccaacttcctgtttattacttaaaaaaattctgccattaaaataggggactttatcaactaatgtacacttaattactacttggttttcacagacatgtgagacagttccaacctctgtattgattatgaatacgataactagtgattatgtaagtattaagttaccaataacttctgacggggcttcatttgagtaattatggcctattaaactcattaattgcaaaaatcattttaaattaatttatcattatggataatttagttttattacctgaattatcacgtttgtttggttttccagacttgaacgtccccttattaaggaatcctccctttgacttcattatataaaaaacaatatttaaaaattaacagcaagatttgagctgttatatttatctaactagattgtttagttaagattccattgcatggggaaattttattaagtaattcttattattaaacttttacacatttttaattatgaacttaaattctatgtatttttattcatttataaccaatacttgttagaagataaattttaaatgaggggtgccagactcgtcaatatcgcatcaactcactcttctgaatgggttcgaaggcaaatctctgacagatatttgattcaaaaacacatagtttgttttgattttctaaatttaactttttaggacaattatcgcagcagatccgcttacaaacttattgaactcgatgacaaatatttcatttttcgtaaaaaccaaactgttgttgaactaggctgttatcctggcggatgggctcaagttgcactcgaaagaaccttaacaggtgcatcttcctccagagtaattggaattgataagacacaaatcgaccccgtaccttcactttcaacccaagtttatcacacatcatctttagataccaaattatgacttcatcaagggcgaaattaacgaccaggaaactcataataaactattaacacttttagatggagttaaggccgacgttgtaagcttaatatctttattcattattcttaggtattgagtgatttggctcctaactgtactggaattaaaatggatgaccatttaaactcagctgaactatgcttacaggctacttctcttatggaaaaggttataattttttaagaatttacttttataccaaattaactatttactttaaaattcaacttcattatttcacaggtgataactgttggtggcacttttgttgttaaaattttcatgggtggtcaacttgataggtacaaaacttaccttcggagcctgttttcagaagttaggtcttcaaaacctaagttagttgattttcatttcactttttgcagagcatgtcggtctgaatctaaagagatgtattttgtttgtaaaaaatttattggagccagaaatatacgtggagacgttcaaacagaaggaagttattatccaaaagagggatttttgtaaataacgaggctttataatacacacgagaacactaatttgatctgtaagtttatgtaagtgttatagattattttaatttaaatatttaattatgtacaagatactttaaaattagctattatttaagtgaattatatacattttggtcctttgaaaatcctagataaattatgaacaacaaccatccaacattgtttccacgatagaatgataggaaattattatctacatcagtaaaagtaatctcaaaaaaacgaaaaattatatccttttcatttatactcctcttcaaacacatacaaacacacttttggcagtttatgcagcagttgcaaaaattatcgtagcaagaacattgagaaccgttgcaacatttacatttattgtcattgcaacaacaagtacctgatggagaattggaatgagattgacacctacattgtgtgggtggttgttcgcaaagacaacatttacagcacaaacaacaaatgcatttattacaacagcaacaacaaattttttctgtttgacatttacattggttgtcctgacaacaacaactttgtaactcgtactgagtataaaaccaggagacgtttgagtaagatgacaaaatacaaaagctacaaataacgattacataaacgaacctgctgttaataaatttggagtaaggaataaacacattacataacaatagtgtcactaacagagctaatgagacacacattaagggtaaaataaaataatcaatcataatagaatgatattctttatatttatctctgatacgaaatgaacatataaacgacgccataccatttaatccacaccaaaagaatacaacaataaaagtccaacgaaactcaaaactaatcaaaattgctaaattagatatggttaatgctacattgaaaagactaatacagaatgactttggtttaatattttttagaaggtgaaactttataaacggaggaaaagggaggtaacaattgccaaatgatacatccatctcgtatgggaaataataaaataattgaattgaaaagaatgaagaataaactgtgttaaatgcccatagtgtgtaataaccaaaactatattctgagacttgtagatagaaaaatctgagcaacaaaaaaagtgtgagcattcctccccagtgtaacatacttgtcatgtaaaaccgttccacgtatgcgatttggaaattataataagcgatcatgtaaaagaaaaggaagaaagtatagccataaagaactaataatatcgagaataagtggatgatagttctggaaggtttgatgttggatagtaaaaacaatgagagtttacaaataagcaaaattatgacaatcttcaagattcttagttgacttttctggccaatgtaaaaatgaaaggcagtcataacttgtggaactatgaagaaacatgtcaagaatatgaaaagccacatgaacctagacctatcatacccgaatgtgactgatttacaaaccctaaaaattgtagcaataacggtgaatacaatgcaaacataataaaatgaaaatgaatagaaaactattccggttgtaaggaacttctggctatggtaatccaccatgttacatatgcaagttttccatttaggagcttcagctttcacaaaagacttataggaaagtaccatagataaacaaataaaaggaattaaccagaaaataacatatattaccctcagactactaattctgagagaatatttaccctgcgagttattatcttgaacgggcgggtcttgactattagtgttgtcgacaaaatgaaaggtcacagaaaagattgttgcaacaaaaaggagtgagatgatagtgtacaatgcagcttttggggataaattgtagatacaatcaaaaatatattgggatacgaaacctacaacgaatacaacagaatatgatatacccattaatgttgactcattctccttatggttgtcagttatgtaatgcatgatctggtgctcagcagaatgcgcgatacagaataataccatcgaaataataccatgtgtttcggttttatagaaaaaacatagaaaggccagtatgtaaactatatataagaatgcagatgtgaggtgaacacttataaactggtcaagagcggatatgaatggtatgggaacaaatacaaacaacaagatgaatggaaatactttctgtaattcaggattgttaaggaagtatgcagagaatgttttcctgtaaaacatggcggatgttactggaattgaaaatacaaccaaatttgcccacaaccgccatgattgtaactttccaggtaaacatttaaattcaacttcaaaaaatttattgtctttggagtccttatagttttctgaaataattctcatgggaatatatgtaatacccagtagaaatgaaggtactattccccaaattatataagacccgtaaccttgataataagttatcccaaaatatttatccagtttataaattatcagaggtattacggatgcgaagttttcaaagaatatcatcattccatcagccaggctcttggcttgaggaaacatcctagcaaagtgaatggctgttataatgattaatcctccaaacatcccccaaaaacaaaaactaagctttacaataaaattgatatcatgataaaagtacaacaatatgaatccggaaaatccaaaagcaaaacccgtaaccataacgatgtacacgccaacaatatcaaccaatggaccgccaatggagtatgcgataaactcgaacaggaatatctttagtgatagattacctattgcatctctttgtttttcacagacataagtctcaggaatggattctcgtatctcattctcattacacaaattctgaaacaccttgtcatttaccaaactcctttcaatggcaggccaattatgatatgtactagatgataatgccagtataacacaaaagattacaagaatcccaaatttgccaaaattaaatggtgttgactgctcatatttaacggatacgtgagatccagatccaggtcctcctaccgaggaacaatcagttctttggctggtggtcatattatatgtactcagttacatatcccatattaaaaccaatgtacctttttaaaatacattatagctgtcatggataacaatcttacaccaaaattatcatgagtaatcaaaatatacaaaatcactatactgcaaatatgccatggaccattgtttttataatacaaaaataaatcataacaaacaggtattcatatttagacaaaattaatgattaaagtacaaaattagatattgtattccccatactttacatcaatttaacttggatgatgtaaattccgttatggtgttattcccctcattatgttgtttcgtagtactctgttaaattcctttaagatgtgtaaatgaatctcatactagtagatacatccatggccgtgttggtgagactattaggaaatgtgaagaatcaaaaacacaatgttgttaaagttacaaaaatcgctgttcattgggttaatcactccttaggttacttgagggtattatctaagtggtatgatttttgttaaaatgtgtattaacctggtgaatgcgttggtcatctttgattaaagtgaatgtttccagatacttgcttatcaaatgacacaacataaacgtccacaaaccagtcataggtttcatgactcgattctgaatgaagagtgtgagtggctggaaggttgttgaagtaaaaccatttgtaatcatctgatacataaagacatgttttggaatatacatcctttgattcttgtcttaactgttttgcattattgggaaattggggatcatctttcaatactacagtctcgttaaagtcttcattagatccacaaaaactgtccagtagataaggaacagaacttaggaaaacctctttcaaattatcatatttacatggtccactgttgaacacctttaaatgttttttaagatcctcatttgttggggaaagaccagaacacgaatgacttttgagtgtatttgatccatatttcaggtctgaatgtagactaacattactcgtatcatagttatctagaaagtgtgctagtgattgacatatttggttagaaattactgctttgtaggtctttgatgtcccaagagtaatgtgtgtagagtgaaagttttcaattaaaacagtttcctttaattttttaaataattcttcaaggtcatatggaacatgtgaaggatcagatgataatgatttaaggtgttcaggtttagcctcaaagtctttaggcggaattgcaaatagaggtttcttgagttcaactattgcgaaaaaaacaactccaggaactaaaacaagatacctcatagtcccaagctctgcattctcctcactgaattcaggaaattctgatgtttcaaaaggaaggggcatcttgtacaggtgtctatacatcaggcaaactgaaaattcgtgtaacgtaagagtgtttaacatttgtttgaagtcagaactcctatcttttaggtatttagaaaccttttcaacatcctgctgtatcatgtccggagttttcttatccactcccagaaaaaatagagttatgtgaaagtggtcctgtaagactatctcttcagagtcccctaacacactcagaactttaacagtgtgttcattattgaggggttttccattatttacattttgaacttgtttacagtcatttaaactggatgttgatgttaggttttttgtaactgaaaaatgttgatcatggaatccagatttctcgagaaaagggagaaatagttccaaatagtcattatttagcttattaaatagtttaatataatcaaatgtttcgttaactgaatgttttacattaattccaacgtatagtggagaaacatttgaggaagattccaaggaatgcttcaaatccttgactgcattgctatcacacatcgttgagttttccaaaaatctatcgagagcttcattaaaatttgagcccttcccacttactgccatttaaagtaataaataatttataagaaactgcaatgactagtgaaaatataaatctttgttttatttctttctttgagtgctagattctcactataaaaatgcttacgaatccaagttttctccgaaatacacatttatttgtttattattgtattttatgttttttaattaatttttttaaatattattaagttttaccggtattttataatgttatcttttttatttgtatttaatactaaatttaataaatttcaaaaaatgtcatttcaacattgtataatatttaagtattatgttaactgataagataaatgaggctattgtttgttcaaatatcaatacaaattcaaatggttctgtatcttctaacaacatagacaatccggttgctgctgaacagccaagtgataatgtgcccactgtaaacgattttaaactgcttgaggatgattttagaagggggatttctgaatataagtcttacaactactctaaatcctttaaaacattaacaaaagttgtggaaaattcagttttattgaaggactcaaacactgaaaagaagaccttaaaatacttatctaaactttgtatattaaacgccgatcatgaaaaggctttatgttacttaaataaacttggtattagtcctaaatcactcagtttgttggtaagatgcctatatcttaagtatgaaaaaactaaaaacaaaaacctgttatatactgtaaaacatcttttaaacttaattttatcatgccctcatagtgtaaataatgcagaaaagcagacttgtgacaaagataattttaattttgttattaaaaataatctcttactatgtcaagtgttttgggagctggaggaatatgtatcatacttcaacttactggataaagttaacctctacatcaataaatctaacatacgtattaagaataagaatttaattttgtttaacaaggttgcgagtctttcctctgcaactaaatcccaaaattgtcttacctcggttgaaaatcaattgaatgaatcagagtcttttgtgaaagagcttgaaaacaaaccccttgacagttttcaagatgaaagagttgatttggtttatgagataacaattaatttgctagaagatgaccttgagttgatgataaatggagggtcagtgaaggacattttacaacaattattggagttttatgtaaatcttgaaaaaacacagtgtgactggatgaataaatacgtatatttaagtgtggatatcgatgaaaataaaactgtaaggacagaatctgatcttactcctgaatctaaaagagccagacaaagtagacaggggcagagagatgtaaaaagaagagtaatagcagtagaaggagtctcagcaaagtcaatatatttaaaaaattactggacatctgtttgtaacttcttctacctgaacgattttaataatgcactaaattcaataagtagttcacatggaatagttaggaatgatgaggaagaaggtgaggatgctgtgggaacaatatacccaagtgatattgcaaggttcctaaaatactctgaaagccaatataacttggatataatgatgaacataggatttaaaggaaaattaactttctcagagaagagtagcttatatttgttggtaaattttttccttaattttaagacaaataaggcatcagtaatgtcattttcactgaaccttctcgagtttctgttaaaaaatcaacatgttggaaacaattacaaggaatatcaacttttaatatcctatctttatacaaatataaacaaagtgctggttgaacggatttataatgatagaaataaaggcgaaaaacagtatgataataataatagttctcatgttgtacaagatgttctttttaacactctgttcagatataataattttttttcaagtagtaactactatgtccagaaatttaagagaataaatgagagatactcgataagaatattgtttacactgtataaaaacatcaaatctgcacagagtaaaaatgacaataacaacagaaatggttatagtaaggagatggaggttgttaattcggcttacaacacatgtttattccatatgtataaactgtcaaagagggacttttttaaaaagattcatctgctttattttcatactaagaggatatccccaaaaaggctggagataaacgattacatatgtaaattaattaaacaatataactatataatgcagtatgaaggcagaaatttgggtttaaatattaatatgtgtgagaggaaaaagaaaattatgacaaggaatggaaaactaaaagggtacattaataggcttttgaatagtatgtctaattattcattaaatgaaactaaccttgaagggcttttggacaaatttattaaaaagttcttcataatcctttctaaacatgtggacatttcagcggttaggtgtttatattattataatcaaggtattggagtggtagatgataaaattagtgaagtgactatgatacatgataagtacctggacatgaattgtgataaacacttcttaactgagttgcgggaatttctggttgaaatagcatgcttgatatctgtgaatgaaacactcccgaaatggactaataaatttcttctttttcttggtgatattttgtcagtgatatctttcagcctccataaaaacataacaaacatacagattaatgataagttcaacatactaaataacgtgtcattcagtcatcagtttttgataacactgtcttcaacactgttagtaataatcaacaagctatactactacaagtgttcatatgtactttcacctacaacatgttcaaatgaaacgggtacatgtgggatgactgataaaatcaatgttttcgttaattgtttgaagcaagtggaattgttggatgggttcagtttagtgttgaataatacaatttcaaggatatataccaacgtagtgtttataatctactacctggttaattatctaatgtcagattatacaaaccaggactcaaaaacaatatactacttattccttactttttcacaaacaacggtcattattctgtcatcatttttctatattaaactctattcaccaataaataactgtaatgaagatgtttctgatgtggttaaaatagaattcccctgttttctacaagtattgaatgaaaatttagatttgagtccgtcacaaggctcatcttttagtgaagcaagtgatgattctgatatctgtaacgttataagtgggaatataatggactactattacacatttaataatattctggactcactattacagattgactcgttatttagagaaaatgatattaatatagaaacgacacttataccaactaagcttggggattatctattagtaagttctaacggattggagttctcagattcaccctctaatataaacctgaacctgtacaccaccatcttgaacaagttcacagacctgtttaattttgatgttttaagtaatttcaagacggatttgcaaattgttgaaagccctaatcatttgctgaacgatgaatatacaagcatattcaccaaattgtaccaaaacattgtaagaagtaagacatataaggctgattacaaatccaatgaaaatgagtttgaagaattttttgtgaatttcagagaaaggagtttattgtttaataaagatgttactcacttgataaatgaaatgttcagtaagtgcataactaatatagccagggaaatcacatctccagtaactgctcttatgttcatatattttaaaaagttcgagatctttgacaacacccttgactcctttaaagccatatttgaccagatttccataccacttcaggataaaacgccattcttcaaattgtatccaaacccactaataattcacaccactaagactcctaatgtagttagtaacaaaagcagttttgaaagtataaataatcaagaaacagaaattcctaaagaagaccttgaaaaccagttacaggaatctagtaaagtaaacttagaagttttatctgaacctctaaagacttccaatacagatggtggtgatgaatctggactagaaactcttagttcgaatttgggacctgagagtggtttggacccaagattggtggaatatgtgaattatacaagcaagattgagaattttttaaaatcagataaaatgtttgattactactctcaagtagaacaaatatatttaagcgcaccggaatatgagtgtatgaacacacacaaaatgatgtacctcaagaaacttaaaacatatactaacattgataatgtggtcacatttgatattgaaagttattcaccagaacacttagttgaacggttggaagttctgaacatggctagtgtggtgcttccaaaaagctatgatgtcttatttctctcaatcattgtaaaattcgagctgtttttatcaattgtggatgttaaaccatttcattccagatactcatttcatgaaactatttcagcctttaatgtcattaattccaagcttatgactgttagtagttcaaaagtttcccacgtttgcaggcttgaccacatggaaattgttaagcaactgttatacctcctgtatattgcaatagttaggtactcgaaactctcaactaacacatcaaacttttctgacaagagattgttgttctacaacgagtatgattgtactgagtataaaaaaagtgatgtggaaattcctgggacttacagttttaagttaaccaataggataaatctgttttattttataaggatatcattgttactgtatctattgaagaggggagagctaataccagccgctcttttgttccaagattacgctctacttatgaaaaatatagattcatctgttgaagttgattattattctcggcccttgaatagtattgatgatttcgtgtcatttatgccctgtaccaaggtttaccacaacacaaactatgcctacctgctgtatttccagattaagatacttgagagaataacaaagaacgtgcccactacaagtgaactttggatttcaatgtacaccaaaatattatatatttacaagacttacctcgagatgctggtccgtaacaaatctttggataatactagagtttccgtagaagacgatgaaaatgatgagattgaggaatcagaagttgaaaatggtgaaatgtcgatggatcagttgaatgaagtatttgagagattatatgactctgggaacatggacgatgagctgataatatcatactacaaactacactgctcaaggatgaggttatgttacataatgccaaagttttactacctagctgcaccatattcgttctcgtctgagcacaattctctctttaaagaacggaaattcaaggataatttgtcatattcgaggtactaccaatggggaacacaggtggaatttctatgtaaacacaacaacattgacaggaataaagtaatggaggatatagttttgttttataacaaaatcaaaaacaggtaccatagtacagattaattgaattatatatttagttaggattttttgttaacaattattttagtgttgatcgtgacatcgtatgtttggtgtgttacaagttggcgatttactaccacaatgtgggagatattgacaaattgcttgaccaccttgaagagatggttaaaaacatcgttttacccgatgattactcaagatttgcaatgaactttgaaataacattcacgaaatcctgtaagaagatagtcacaaacacctcaaacatactaattaatatggtgtgccaggaggttcaaagttctaagcttgtgcaggatgaacatacaatggcttttaacgaatattatctaaactgttccgatgttagtgtggaccaagtaaaagcaaaatcaaaggtgaaaagctttaaaaaagccgttggagcctggatattctcaggtttagaaaaattagaaaaactggaagatatacacaggctgattgtggtgatgattgaaatgttagctaagttgaataagaaatttaaggaattacctcaagataagacaaactcgttgctgttctccacattaaactacacacaaaatgtcattatcaattctctatgttactgtttcatgttgctcgtatactcctgtcctcacgtgttatctgtatcaacaatgtcccaagttctaaagattgaagaccttatagaaattgcaaaatcccaaaaaattgtcaaaaacaagccaaaccattctacgtatatgtccaagatactgtggaaacttataacgtctaattctgggaaggatgatgtgtaccaatatctggaagcaaagggcgtgtttcatcactcaagtatctctagcgaatataactctaactccgcaactctagatcttagaatcctaaaggatttgttttacctcttgaaccttaaactttaccttaaacccgttgaaataacaaataaactctctgaaatttttgtcgacgcctgtaatagacttctctacatgataccagaagacccttcacttctcacaaaatcccaggatatcactcttccatcaggaagaaccgtgaaaattagtgacgaatgggttcttaatcaaagaatcacgacaaatcaaaaggcagcctctgcattcaatgaagccataaataaaccagtttaattttattgtaaacttatgttatttgttatttttaaatttaaaatatgttttaaataaaatgtgtacataatattgtttaaagttagaatacggtcctgattattaggatattcatgtaaatataaatgtgtagaggaatcatcaacttaagtgccaatttaaggaggattcttttaaacaaaagcttctatgtatcactagggttaaaaaatgctaaattctccacttttgatagtaaaatatcatcccaaaatgatcctgaactaacacatatctttgatcgtttcaacaactatctggaacctgatgagaaaccttcaaataatgatgatggcttagattttagatcgaaattggatttatgtgagaaagtttctgaagtttgtaatattttttctcaaaataaacgtaaattaactccaaatgaactcctaaatcttctagccaaggttattcaaatcaattctatcattagaagctctaaaagcaaggattttgaagagaatattcctattccagatttcacaaccacctttgattctactgataaggtagactacttccctccatctgatttctgttcagtatcactaaacaccttcagaactgttaatatcaagagacttgatcctagggtttctgagatttttattaggcttgtaaacaaattggatacattgactgttgaacacatattatacctaaataggatgtgtgagcttataaaggggtaccactccaaggtaattttatcattttctgaagataagatagcgacaaacatatataaaatggatgaaactaacctgattagaactgcaatggttattgttagaaggtctgagaacgtagactttgtaaaaatgttcatttccgagcttttcaagaaaatttattttttcaataattctcagaaaatgctcttgtttcatctaatgtcaaactcctccaagtgttccagcatcttcttaagttgtttttctgaatacttggaatatataactaagtctgattgtgaacaagcccaatctcaactttcaacttttacagaaagggacttcattaagtttttatcatcatatgcaaacaaccaaaaatgtatttctaaggatctttttgagtatctattctctagatgtttggttgcccatttaaatgagctgagcttagacgatgttatggatttactgtgggtttccaacaagttcaacagtgtcgatttattcctacccaaagtcaaggactttttaggctccaatttagaggatataggtcccaatagactaactatgcttatttggtgttatagtaattcaaacatcactgataaccagttccacaaatatcttgaggacgctgcaattacactatcagatcaattaactacaaagaacatctcattatctgcatatggactatctttaaaatcggtattataactattatattgtattttaataatttgatttgtaggttccaggttctgagcctagatttctaaacactattcaaggtatctttcatgattacgaatcactataataatattttagatgatatagtatctaacataatgcaattcaatggcttggatttgtcaatgttggcttattcatactctaagcatctatgtggctctagtgtactacaccaatgcattcaggagggtttgatgaactatgttgaggaccttccagctgattgcataaccagggtggtctactcatacgccaggatttctggaaagcaatcactgtttaacgcatttatttataccattttccagagaatgcatcagtttccaatccacgaattcactaaagttttatggtcatacctggcaatgaagttttatgaccataagttctggacaacttgcttggagactattataaacaagttcgaccttatcatcgatgagaagagatgttaccttctttatccagtaatcaaaatcctaatccaacgtatgtttaactaaaatttaatacttgtttaataaaattttaaactttataaatattaatatatttttagtgaaaataacccctgaaacaaaggagttaactaggctgtgcaaccacatttctaagtacttttgggactctcaagacaggaataaaaccagtgaagttgtaagcaaggtggtagaacttattcctgaagttcagcatgtactttttgactccaaccacgataattttatggttgatgttacttttactaaaactggtgggatcagatatgccgtcataatatacaactcttcaaacatgtttaatcaatctccaattgctgatttaaggttaaaggaactgttcctttcaaacaaaggtatacgtataccaattaaatatgttttcaggttataaccttgtaagaattcttgaggacgtttggatcaatcttgacataaatgaccaaattaaagtaattcagtctcaactttagcattaaatgtggtaatccatgtactaaacatattttatactaacccaatgaataaatttataataaacgagtatattttatattacattaaagtgaaaatgtgtttgtctgctgtgggtacgaatttaagcagaaaaacggcctaaatgatttcttaatgctgatgcaaaggatcccgttgccgattttgagcaaaacggggttattatgataaagctgagtcttaaagccagtgtccctgctggagttaattaaagtgccaaactttgaccttgtatcctttattatgaagcggtcgttctgaaacaaaagtgtcgagtggtgcctgctcacagaaatatcagttaatcttatgtcagataaatggcctctgccgattatggcagggttgttagataatgatacgatgaagtatcccttctcagttacattttctggttctaacaccaggtatggcggctgtggttgctctatgtcaacaaagtcgtgttccttgttgtctatgctgattttagttgggtaaagtgtgccacataactcacaagtgagtttttgccagaaaaagctggtgtttggtgcaccttcggcgtagcagtttaagcgccctttgatccaggaccttatacaggaaaggtgtacgtatgtcagtgatcctttgcacttacagggtgttatcagaggcccgcttccatcgtcattgcacaagcaaatacgacaagtgttttccaagttctcggtgactttagtctaaaaaattaaattagttaatgaaaaaaggttattatttaggttatgtagaagattaaaaacatacaattgaatcggatgttaggttagttcttgtggttaaaatatcataatatgaggggttgtctccatctttaaactttttagagtccttgttaagtgaggagtttaaatcaacgtctgtattgcgtaaagataccaaagggtcgtcctttatgctaatcggcattacttctgatgtcgaatcagcgttgctaaccgctgatctgttgttgttagtactatctgtttcacttttcaaattatttgcattttcgtcaaccacacaaactgttaggttggttctggccgagtttaaatcgtcagggtcattttcggaaggattcgtttcaggttcgtcagatattaaatcgtgaaggtatgaaagtggaagactcgagttgtaggctagatgccttactgtcagttttgctctccctaatctgatttcgtcaccttcattaagtgctattggcagtgatgaggcagctttaaaatgtccaaaaatccttttacacgccttgtcacttattagtctgagtatgtccttttctacgttaaatactgatgggtctggtgaggatacaaagacctttccttcctcgcaggagatcttgaccataacgctggtcgagttgttcgactgcaggtacgaaagggttttatcttttccaggaaaaattcgacatagtgcgccttcagataccaaatacaaatcagaagctaaaaaatattatattatgcataaaattactaataagattgaaaaaatataattatgtaactaaacaagcggaacatacagtagaagccctttctaatgtttaattggtggcgattaaaatttttatgttcgaaatccaaaaggcccgtggactcattgatgtaagtaagccacctaacggttaaatcgtgtggaaactttaaagaaatgctcttgtcaaatgacatatcagaaagtccagttgctgtacattataaagatagaaaatttcttgaccaggatcaaactttgaaaaaaaatattttataaagtggatacttcagttaagactagccaggaactaaaataatattaaaatgcccaaattccaaaagacaaaaataacaacttcaaattaaaaaataaaaagtccaaaatctgcaataaacttaaaattaattttagggaaatttactgaaaaatgaaatacaataaaaaattaataaaatttagaaaaataaaacaggcgtactgagtattaataaggacacacccaatactgaatttcaccaacattaagttacctattttattaaaaacagtgttgttattatatgttctattaaatctatacgattctatttttatttcgagatatttcactcgacatcaatttttagtgtaagggcatgttaaaacaaatttgtgaaaacgaaagtgaaattccataattaaacgctaattgaaatagtaattatttatttgatttccccttatttatttccaatcacaaatttttactagattttatcccaattgcgttttgaccttaaaccactacacagttcaataaaacacctcaattattagtgattcattatatatttatatctatatataaaaatttacatctgtggtttaactgagggttttgttagatcattttggttttcaatccctttcacccccatctgtatttgtatttatttaaataatcgatatgttttcaagttttattataatttaatacttctgtaaaaataatttattttattatatcttgttatacggattccaacatttgttaaccagtataccttatttatccttccacatctgtttatcctcgagttttaataggtttaaattaatttcattgattaataattccaataacattgggtcttttacaatgagtatcggagctcctattaagctactgtatgaaggcataggccatgtcgtaacagttgagcttcaaaattctaacttatatcgcggaaccctagtaagttcatcctaatcaactaacagttctagttgttaacagattatataattcagtaaataatgttattaatgataattatagacaaatgtcgaagataatatgaactgcttgttggaaggtgtagttatgaccatgaaagatgggagaaccatagcacttgaggttagttttaaataaaataatattcgtttttagcaagtgtacctcagaggagcacagattcagtttatgatcttcccagatatgctcaggcacgctccaatgtttaaggggaaccctaaggataaatcgaagcaaggcgtaccacagatgggaatgcctatgaggccaggagttccgccaaacgtccctatgccagtaatgggtaaaatgtaaacgacttttgtattccttatctttccatatttggtttaagattcctataacgaaatcatttaatatacttcaccgtgattcttcaaggataacaatcgctctaaaataaaataatatttttcacatcctaattatatatttattaacctcattccaatgtgttgtcgtaaaatcactgtgtaacatcttatttttattgtattagtagtcgtgaattacgattatatagatttataaaatattatcacatttttaaattcataatttattttaatcttgtgaatgtttgtacattgttttaaatttatttaataattttaaaacatgtgcaatctcctctacgacttcatatttttttaactttatcgcataaaatggataaaaataatccaaatgaataaggaaaacttattttttcaaaatgtatgatgctctccattctaacaatggcaatttgaaggattcaactctagaagatttatcaaaacttaaattatcgaatgatagttctaattcttctcctaagaatgatggaaaagtaaattctgagttatcagaatcatttttgaaggggataacccctgaaaattacggcaagttttgcgaattgttctcgaaggcgttgtttaattcaaggaattctcaaccttgtcatgattttgaaaataatgatgatttgaattgtacattgggacagagccaggatgaaggagaagaatttgaagatgactatgagtatgtggaggaggagtttgatgatttcttttggggctcattggaatggtttgtaagcgttttagacgaattaaacagatttgaatcactaggtttcggaataagttttctgtacagtaaccttaaaacatattcagattctttggaacaaaatgagttactcgaagacagtgaagtattgaaccaaatttcaaaccttaagaagtggattgactttataaacatattcagggatgcaaacagttcgatttatacaacatatttgttactggataggatggaaatgaagcttaactacataaaatataagtctattaaaattttacaccttaaactaagtaatacacataaatcttctgggtctaacagtagtataagtagtaaggttatgcagccgagtaacgtatttagtcctcttaatagtccatttgaccactttgactacactccaatcaatacaccctcaagtactaccacgactttcagtgataggagtgatattgactttctgtgcgaaatgtgggatacgaaactgtgtaaaatgaggataattgtttacaataagttccgcagatatataattgggataattaagcagttgaaacacctgtacccaactaacaactactacaacctcgtacactttatactatacaatagtagtaaacagagtttagaaaaatctgaccttgcaacgggagaagttactgataaaaccagctctgcctgtaatgatgtggattttgttaaaggcgattctgtgagttctcaattagagcctgagccaggtgaggatatcctggattacctgaagagatattacgcgtctaagaacatgagcgaggagaaggcagaaagttatgttagaagaataattgacttgactaacagattaatacctaaatttgtcaaaataatcaagaaactaccagtatattatgaagcttacttaaacgcactagtgtgtaacaatatacaggatgggatgtttcagctcatatcttcatcaacaacagatagtagtgcagctaacctcaactataaggaaaaggatagttatagagaggggagagattcgtcaagggaggattctagtgattataagtggtggttttacaagttaaacttggtaatggtgttgggtagaactaatttggagcttatagacatggtaaggtgttcttttggtgaatctagaaagctcgtagtttttacacaaggaacgttaaaggaactttttaactcaacaacacacaattattcaagtgatatgtacatgtttaaggacccactcagggataaggatacactcatcaagagtgaccgggaggataaaaaccaaaaggaggatgaggagattctgaacacaatttattactcatacaacaacttaaatcaagttttaagtgaagaaatagataagtttatactcttacagcttccctcttttacctggtatcccaaattgatcaagcaccaactgccgctaagctctagtcaaaccttcaactatccaactaattgtgatgatttgggtttgggaactgatttgttgacttcacgctccacagaatcagagtatgttgagtacctaacattggaggagaaggtctgggttaataggcttaacatgttcaacagagtaaatgagcggaacatacgtaatttcttgttgaagaggaataataacataccccagaccattcgatatgattcctcaggtcttataaacacacaaactgttccatttaacgtactgctagactataataattatataccaatcaagtatatttatagcccggaagatgatggagataaggagaatgagttgcagagaactggaagtatgagttctaatcatattaacggtagagcagataggaataacagaaaggataaggatgaggaaaatgactggctaataaggcttttcaacaataataataacaagataatgaaaagtaactgcatagatatagagattgaaagggatttgtttccaggattttatctgtttaataattttaaactcaactgcctaatactgcctatacacgagaacaccttccaaagccatgaaacattcattaacttctcaaaattggttaacaacaaggttgaacttatatatccctcatactctaagcaaattagtaaaataatatttaatatgaacagaaatcatatgaagtctggttctatggtgatggatgagtttaatatgaataatggaaacacttctgaatttggtagttttatgaaaggttttaggggcaaattaggggattttttcacaactcaacacaccaatttggttataggaacaagggacaagatgacagtcaatctagtgtttcacttggtgtgctgtgatacaacgattaacgacgatattactgccatagagtacgcagaggatactgaagttattctaaagcatatgaataaaatacagccgattttgaatggactatctagcatattgtcactgtgtaaccagtttagtgtacacacactccatatgccagcttcactcaagtgctgttacaaggtcaatcagtgtaatagtcatgtaatacagtcagattttcagtgccaaccaagtagttttggaagttactcatctgcaaatttcaatacgaaggaatctgttttcgggtgcaacaacgactacgtaagatgcctggctgttgtttcacatcttgcatctctactcaataagaacaagtactccataaagaactttaacctgattttcccaaatcacctgaaacatacactgctgccaaaaactgctgctaacatactaacctcaagagttaacaccttttgaacactgtagtactggtatacatgtgtatggagtcgactcgtcaagtcctagttgagattcctataaattccttaattttgtttaattttttaaaaatttaatattaaataattagaatattaatgtgttgagatatgtgattagtagccgaatgtatgtaaggcggttatcatcataactttaattttcaggtaatgaattttaattttaatatatgagtgctttggaactatttaaagtactcggagatgagtcgaataagcctcctccaacaccaaaacatatattaaagaaaagaatacagtctcagccagaaaaggctaaaagatattggccaggaaaggtattttttattgatattttataataaataaatttatttataaattcagtaattttattattttgtaggctccagattttgcagttgaggaggatagcttctcagatgattcatcgcatgaggaggaacctcaaattttggcagataatgaaccggatcgcagattaaatagatataaaataacagggagtaagtaaatttgtgttaaattatgttaattatcccttgattccatttttatatgtgatttttagttgaagaacctcgggatgtgtcagatagaattagaagaaggaaagcccaggttgaaaccatcactgtatatgagtcaacacaaccaaaggtactttagaaaataaaataaaattcttaggatgataaaacaaatgatgataaactgcccacatcagtccctgacggtgattcccaactaactgagaaaaaactcgatagaagtactcttaggaaacttgctctagagtatcgtaagcgggaagaggagtcagctcctaaaactgtcgaagaggaggtggaggagtcggaaagtgacagttcagaagagtctgaataccaggaagatgaagctggacctgaggacctggacgttctctcaaaaccagtttttgttcccaagggtagtaggaaaacagaatctgagaaggagcaacttaggaaagaggaggttttaaggagggaaaatgagaaaaaaagactaatggagcgtaaaaaggacactaaggagatggtaatacaaaaggtccaggaacttgaggaagagcctgaacctgaggatgaactcatagatgatactgacacgttcgacgagaaagaggtaatttacgccgtttaataattgtgtttagtatgagctttggaaaatccgggagcttaaaagaattctaagggataaggaggaaagggaaaaattcaaaaaattggtaagatttttaaaatactacatcataatgtaggaggaggaagttaagttgcggcgtagtatgactgatgaggagcgcgagctggataaccagaaagtagataaagttgtggttgagaagggtaaactacgtttcctccagaagtactaccacaggggtgctttcttcatggataagttacaggataaatcagaaccgctctatgcaagagactttaatgctccaactgcagaagactgcgtagataagtcattactacccaagcctatgagagtaagaagaggcctgtatggaaaacagggccaggtcaaacacactcacttgaaggatgtggatactacacaattcgacgcctggtcaaaaactgataaatacaaacttacaggtatttttgggtaattttaaaataattttcaggaactaaacaggtctttgacaggccttccaaaaagaagtaatatttactacacaaactgtacactaatttataatatcattttaaaattattctgtaattaaaatctgcaagttttctacattgtacaccttttcgttacaatgtatttcaatcccagtaagacggtgaagtccagtggagagtggaaccagaggtaaagaaacagtttctgagtcatttaagtttatactctgagtctaaaataggttaaacagtgaagttacaaaccttttcattctggagacagaaaacctctgtgctggtaaaacttactgatattgatatgggatcgttagttaggtttttcaagtatatattagtattgaaaagttcattgacctaattaatggattgttcacagttatagtgtatgtgagtttgagaggtaccttaacgcttttggggaagttcacaactttgtagtataaatcagagtcttgtggaagatgaacctcgtaaacattggtgccagaagtgttcgtataagaatgccagtttaagttcaggtaaaggcctttattggtctcaccattgggagcttcagactttgaaaagtttaacacaacattagggaaaataatcgaggctgtttcgtcaggcctgaggaggcaaatgttatccttatttagctccaccaggggagggtagaagacctttgatcccctatcctcaagttttatctcctttataactaaaatcgtttttgacttgttattaactctagtttccacgtgattcacgccatcctagattaatattattctaattggtggattacaggcaatttaattagagagtgggaaagcttaactggatctatacaattccacatgaacatcttcttaagcacgtgaggccctttgggtgtatagtactcaaccaaacaagtcattctaaaaccatatatcaacttattttagtggaataactagttttaggtatagtaaatggaaagggataatacctatagtgggaaagtttttcaaaaaggtatgaataatgcgattctaatggcttgcatttgggttcaagctctaaattctcaaatatagtacaggttgaagcaaattcttcgtgctccataaccatctcaacctaaaatttttagataaattataaatttttggggcaaaacctttaaaaaaacggaggataactttgtattactgttgtttcctaaaatgaaggtcatgtgtaaagtctcgccgagcaggacctcgttggagtaggaaggaatcctgaggattgggaaatgactggtagagttttctgggactttataactctaaaatacaaattataataatttatggtaaatttacagggtctatagcctcgatgcagtcgttaatatccaaaagctcagcacaattagtgtccaaattaggctctatcagcctcattattttaagagtggctgactcatgagaagccattgtattttacacatgtttggaaaaaaaagaaaattaatgtgttaagaaaattttttgatattgggtcatgagtattcataaaacgacattatctgtagtttattactataataattaaaatgttgttttgtttatttaaaaaaatttttaattttaatttagtttaatttgtacattatttttaatattaagatatgatagcatctgatgctttggattatgaccataagaatttaaatcgcaatggtgaaactgaccataaaaatttctcagattctgactcagataaagaacatgaatctaattctgaggaagactctgagttaagttactaccagtctcttctgagaggaaatgagttctacttggatgagaaagttggactagatcccataaaagcgacttgtatggcatctaaccagtcaggaacctttttagcaacaggttctcgtgatggtacagtacggtgtattaactttgataagtggtcaaagggaggttttggagacttttggaagactaaacttgaacagtcagtgaatggactttgttttaatgttgaggagtcagtattagctgtagcatctggtaacatgttacatttttataccgacggaggtgatttgatagtttcaacaacaaagggtgacatgtatcttctggatgcaaagaagaccaagggccacacatcaaccgttacatgtgttgcaaatgaccccaagaactctaatttcttctcttcaggatcacttgacggtacagttagggtgtttgacatacagtcaaataggcaaagtatatcactatcggttaataatttaaatatatacactttatcaaataagtatttaaacagaaataaaacgttaaataactctaatgtgggtcagaaggctaagatgaacaggatagggataagttctttgtgttactcaactaacaattttaaggacgtccttgtggctggaaatgaccttggctttcttgtggtttgggaccagaaaactgcttttcagagcatgtacgttgagtcccatggctcagcagttcactcagttctcacatacgatgatgcgaaggttgtatcacactcaaacaactgtgttaagttttgggatttaaaaaacacacaaaaaccccttaaggagcttaatatacctcaggcaaacaactcaaatgatactcaatctattgtactgtcccctgacaatttacacctgattattaactcttctaccacccagaataatggctctgaaaatgaaaatacacttaacacaatactttatgtgtttgacattgaaaagatggaaatagtaaataaattgactgtagattcgttgttaggccctatggtttgggcttacgagactaatcagttgtttagtgtgtgttctgacgggaagatatatgctagaacaactgattctactgtaggagctaaccactatgagagggcaattcaggcgcttgagaagaagaataagtattcaaaggttaacacattttcagctaaacctgaggcttatcccatagattacctaccagatgaccttgttgaagttgaggacggagtcctaaagaagcgtagagtagaacatcacgacaaatacggaataccaaaacaggagggatatgactactttaaacatggaaagacaccaataacctacgaggatgatgatatagttacaaaactaagatcacaggttgaaaaggaccccaatagggaactgacaacaaaggagggaataaggcagataccttacaaggctgatagattcatggcaatatacaaaaagacccagcccaacttgattctggacttcaataaaccagcaaccaaacaggaaaacatgcttcttggagtcagtaaatgccctaggtgtggcattaaaatctgccagtgcggttatatggataaaaagtaatatcgcaacatttgaatttttaatcgatatgtacattttaatattttaatgtttcaatttactgataaatattatagttcaatagcacgtttttgaatttatataaatattcatgaatctacacgaatttgtgaaaattataaagatctataaaataatatagtatataaataaaaaaatataaaagaaggtgttgcgaataaggagtaaagtaggaaatctagaaaatcagagagtggaatttttgaaaaattcttagaggaataattaaaaaaaattaagttttaaaaaaatgtgtcgagagataagtttaaaaggttagacagaaggtggaatcataaaagataaattgaccttctttgtgggcctgattttcactgttgtgccctttagtatgaggtagcaaaaggggtcacacattaaataatgcattattcagagtaataaatatcgagtttagagtgaaaaagtttaatccccaaaatacgacatgtttatcatataggcacacaagtgcgaatattgggggtataagtaggagtaaacctttaaaagcggatcatggcggaccttaaacagctggaaatgctttgtcaagctctttacggagcccagcaagtacaccagaacgaagcgcataaagttttgatgcccctgctgagagatgtccaaaaaataccagtactttacgagatcttggcaaatagcacgaatcttcaagccttattatttgcttcatcgggtctcgtaactcttttcacaaatcattggtctcaggtcacagatcagtcaaaaaacgagatgcgcgaattcctacttaattatttatacaataggggaccggaaatgttgaaggtagcccctgaagtattaagacaatttatacacctttactcaaggattgtaaaactgggctggctagaggaaatgaacaaccagcagcttctaacccacgtttcccagttcctctccgccacaacacagcattggattatcggattaaacatttacaccgacctgacccaggaaatgcagcctcaaatgggcaagtttatcgccaaattcagaagagccgcactcaatttcaaggaaactgtactccaagatatttttaccgtatccactactaccctattattataggatagttagttgtatataaatattattatattccatcgattaaatagtataatgaatgtttaggtaactgtacagacattggaacagtttaataaaggtacggtggtggttacagactcaaaggaggagagtcagttgctgtaccaggtcctccagttgtgctataactgcctaagctttgatttcatggcaacaatgccagatgacacatctgaagaacaggcgactgtgatgattccccagggctgggacatgctgaggaccgatgagatcccaaagctcttgttccagctttaccagaaggcttttacaaagaatgcctcgtccacacctaacaatggtgggtattacaatcctgaggacaaatacatgaagagcgcagtgctctgcctgaagtgtctggtagtgctggctgctctcaggaagtcctttttcaataacgaaaacgaagctctgggacacattaactgcttcatgttgggcagcctggagatcatcaggaccaagatgggtttaacagacgacgactgctaccacgagctctgccgtcttttgggaaagattaacgcctcaaaccagctctctcagctcctccaaagtaacgtcttcccaatttggtcagagcagatccacgcattcacaatggaggcgctggcaaactggacccgcctaaccaacagtaaacactacttactaggcgtctggtcgcacatgatagtcccactagcctacatgaaggggaaggccccaacagttcttgagactaatattctacaaattacactagagtttttaaacactcgacttaaaatggcacaagttcttgtcacaagtattttcaacaaaatactagatatttatacgattttatctaatatcgttaatggtataatatttgtttagaaccggatgagtttgactttgagaatccactggatgatgatattttacggaacgagcagagcgagttgttcagcaagctgtgcaggaaccagtaccgtgtggtgcttaaccacgtgctcgaattatacacgagcttgaacaacaacttgaacaacgaggatttgtccgttgttcaggagaagctcgcatggctagtgctctttagtggctcaatgcttaacgggagcagctccctgcgtctagtcggggagtacaataactcatcagtgtgcattcagaccctgaacatcgaactcgtcgggaaggtcttccaaaacatgattaactctgataagatggctgaaaacgtcagacttgaactcagctacttatccttccttggccactttaggaagttctacatcagcgaacataccaaaggcactatatctggggataataaagagaggttctcacaactcccaaatctaccaccaggtaccattatcagaaatatatttaacagttaatagttagttagtgtgtagtatttagtaaataattgtgtatttaatagttttttaataccatgcataacttatatctaattaatacctattaatacttttcatgggtatgtttaaaactttatcaggtgtagatggatcgcaatatttgttgaatcgtatgatagagaaggtattttataatttacaaaacaggacgagtgatgagagggtggtgaagaagacattacagttcttctcagatttgtcatcgggaatagatatagtgcactacgcagaccggtcaccacacctgataatctctgcaaggctaattctacagtgtgacacacttcggtttgcacttcttaaccaccatgacccctcattcaagtttttgtttaacccgtcgtacgggagatataggactatttactactcaatcctgaccaagttgctgctgctggagattacagacgaacaggacgcgaacgaaaagttcaacatctacatgcagtaccacaataacctaattgaccagatgagcaccttcttctcagcaaatagcccaacagtgggacttacgtcgaatctggagctcaagggagtgattgtgggattcatgagagacttgagggggatatgcaagagctgcctgacagtggagtcgtaccagctcttctttaactggataataaacacaccaaaacagatcaataactgcaggttcaacgtactgaagctagtttgcgaggtattttacaacgactatgaagtcatgctcccgctaatcaagtttctggcagagctgttggacaataaggggaggagaataacatttgacaaaacatcagccaacgggcttttgctctttaaagagtcctcatacatagtcatttactatgggctaaagctgctggaccagttaaacgcactcaagagcagtaacttgacaacgatgacagccaccatgggagggtcactgtcctgtaacgagaatgagatttataaaaagtactacaagagcataagttactgtctactggttcttgtccacactctaggcggagattacattagttttggcgtttttgacatttacggagacaacaccttggatcaggtgcttaacctgtcgttcaggctaattttggctattccactaaacgacctccaattctacccaaagaccatgcacccggtgtactcgtttctcgacctctcaactaagctgttcattgatcatttgctcaatttagatagcccaaatgttagtcgtctagtcaacattggcgtggacgggctatgcagctacgactcaaacataagtcttagcagcgcgtcacttcttgacaactttgtcacatacctcttcaacaacaagaacaaggagcctgtagtaaagttcttatcagtggaaaacaatgtcctggtcaagtgcatggtcctgatgtttaacctgctaacccgtggggactcgaactctgcatggtcaatttctcgtcccttgctcggtttaattctgctcaacaaggctgagtttcagaagattcctcacagttacatgtcgaatttgtcgcagcagaagggtgaaaagctaatgaagtgcttcaacaacctcatgctcgggattgaggatgtgctaacccctgaaaacaaggacttattcaccaaaaatgtgtaccttttctcccaagaggtcaagttgtcttttatctgaagagttcattttgtattttatatcaagtttcgctgtgtcaatgtattaatttgtaaattataatttaatcttcgtatatacttatgtatatatacatacatgtgcgtatagtggtatgggtactgtggtgtatatacaactttgtatattatgtagtgtgaacctatgatacagattatggtacacgttaatcatgataaatataaagattgtttgaaaacaatatctctccttatagcattgcaaacaagttcgattttctcagctaatttttggtggccaaatatatttgcagtttgtagtattttcctacagagttcgtcaagtctaagtataaccctgacaatgtggccctcctaaaaagtcgttaattcgtgtaaaaaatccattaataatagaaaagctaacttgcaaatcagtgagttccattatttcctgaaatggagttccagacgcccattggtaaatcacctaaagattttgtggtggagtaaaacatacgtatgagagtgaaaagttacacagtgagttgaaatcctcatatgaaacccttacgcccaaggctctttggacgacatcgattttcttatgtatcgaaacaacctaaataacattttatagtataaatttggtaagattttgaaaacttgagtataagtgtgatataaaactaacctgatttttagcttgttgtagtggcagtgttggtgatggggcctccttctcaggaactttatcgttgtaaatgaatgcggatagtattgcagcacactcaggtggtgttaattcagagagaatgccttgacacagtacttcagtaagtgttatctcatcactggtcgtgatgaaagttgctattctgcccttaacagtgggtctgttatcctggtctaagaagtctagctgctttaaaacttccaatttattactcatgtcttcataaaaatacaatgattcatccttcaactgtttgtttatatcttcaatttccaattcatactataaaattagttaattcaacaaatttattcatatatttacttatttaatggtataaatatgtaataaatatgtggatagctaggtaactaaaactttaatacgttgtaaattttgtgttgtgttttgaaatgctgttctcttaaaagacaatttgtacatggattactagtgaatagttggtagagatcacgttgcttgagaagaatttcatagaactggagtgaaatttgtttaaatttcttgctgaatgacatgagcttgaaattgttattttccataagtttacatagttcaatcacatttctatcaagatcagtatcgagaaaaacgtgatcgaatataaatgaaacgcttgataaactaacttcgtgattatagtaatgcctcagttcaccattatattccacagttcttatgttagcatcatccaaatctacatcaaattaattattattataaattgtgtaatgagtacctgaaatgttttctgtaataatggttgcgactttaaatgtgtgattcttctcgtcaacaatatctgtgataaagctgtaagacagagttcttgagattttagtagagtgtagcatcaaaaccctaccgaatttaaaaatcactttactgtccttatggttccacaggtgctgatgaagttcatgagatacgttcatagagtaattgagcgttttataatagttctcaattgtaggttcaccatatatgcaactgattggtggtagcgacatcaactcctaaaacaatttcaaaactcttatctaattagattatattagtgagttgatacatgtttctttttgtttatttgtttctttaaaagcggtattttcatcattttctcccgttctctaaatgattttagcatcatttcagtaatattcatgtggtctctagactgtatctggaggagcatgttgtaggttatcctgaatctgctttcaagtcttgttgacctttcaatcatcatattcgtgaggtcttgaacatccgggggttcatcagagcaaaatatgtaaacatttccaaaagtgtccaaacctcttctgccagcccttcccgccatctatcaaaattttaggaaatgtagaaaatgtctaatttagaaattttaagaaattgttttaatatcaaacaattacaatgatgtgtaaataatacctgggtgtattctgatgacgtcaaatatctataggtaatcccatcgtgtttataaatcgatgtaaacacaactgagcgtgcaggcatgttaactcccattgcaaaagtctccgttgcaaacaagactttaatcaagccacgtgaaaacaatatctcaacctaagcatttttgacacttgatatataattagtaccatttccttaataattggcagtaacccagagtggtgcacacctattcctcttgttagcaagtttaccattttcctaagttgaggcaagttcctatcactttcacttaggccatcaagtgattcctaaacaaaattaacaccagttagagtggtttaacgttaaaaccagttaattagaataatcaaaatttaccttgaggaacagatgtattttagatgcttgaaccttattgtaaactaggtttaaattgggcatatccttagcgtattgttcacacttttgcctactgaagcagaatagcacaacaggcattttatcctcagattcaagctgtttcagaagtctttgtaacttctgtacctgacctttaaaagttgacttcttatcattgattttaagtgtggaagtgtacttgtacattatgtggtatgcctccttattaaaccccttagctccatgaattaggaagaaacggtcataaatatatagataatgttttaagggtactggtctgtggtttgtcattattattaatacttctttttgcataacgttacctatccattctccgaattccaggtaattaggaactgtggcactcaacattactagctgaatattcctaggtaatagtataatcacttcttcccacaccactcctctggtaaggtcattgatgtaatgtatctcatcaaatatcaccactgatatttggccaatcacactgtcacctctgtacagaagattcctgagaatttcagtagtgactatcaggcatgatgcccctgggttacagagcacatctcctgttattattccaacattttcatttccgaatttaaccttgaactctctatacttctgattagaaagtgccttaattggtgaggtgtaaattgccttctggcctctacttatggctaatgctatagagtactccgccacaacagtcttccctgctgaggtatgtgccgatacaaatacatgctttccgttaattaagtgatgtatagactttttctggaaatcatccagctcaaatggatactgagcgataagatcagtaagttctggtgcctctttatcatcgactatcgcccatttcttccttatgtacttcttattctcatctggttttggaactattaacttgaatggcggtggctctaaaattgtagagttagcttccaggataatggaactattgttacaatcacctggaggtgtgtatgtggatgtttccaaattcttatcattttgttctttattttcattaaaaatactattatacaactccttttctatatattcataatttaactgtttaatattttcgaattccttgtcgaaaactctaaatattgagtgttcatttgtcggctctgatattaatggaatccagctcaagaaatccagtgttgattctaaattattagaatcttcatctccagacttttttatttctgtttcattctcattttggggtttaaatcgatcttttaggaagaaatttccttcttcacctgcatcttcttcatctgaagtccagaaatcaaatggattttcatagtaatttgccattactattgatttttataattttttttattttttccgctcccatttataaaattacgatcatcgttgattccatttgaaattaacaatttatttaaacattttatcattcaaattttcatgataaattcaataaatctacacaatttatctataatttacaaattaatatatatacgattaatcttttaaaaaattatcaatgattgctacttcttctgaggaggttctaactaggtagtgatctggtgggcgtccttcatggccataatcgcctacctttaggaagatattttcgttatcttcttgtttatccagtatatctaaaaacttagctgcgtggtaccaaggtgctcttacgtcattaatgttacagtttatcaatattgatggtcttttactgtgaactttcttcatgtttacacagggatccattgagtagatgtggtcaacattatattcctcacattcatattcctgagtacttccaaattcttcatattctagctcaactaatggttgagatgggtcatttactgttgcaaaatgatccaaataaggtaatttaaagctgattactgaacataagtctggcctcatgttatacacacatcctccaagaattccacttgctgatgatacgttaattgccaacttacttctacttgtaacattctttgaaattaaaaactgtattacatccaccaaatcataaaatgagttatacttcttatctttacttcccattttcctccacacttctcctaacacattattaaaggatgtgaaaaataattacagttataaatttaataattacctaattctcctcctcctctgacgtgtgcaaaacacagtgtgtatcccatttctaaaagcctagaatgttccatataattacacactgacaaattctctccgtaaaatccatatacatacaacatacactttctattacttatcccatctacattacaatcaacatcattctctaaactattttttacattgttattgtcaatattgtttaaaaacttagaaacaagtgtcaatggtatcttacaggatccatccctggtaggggctttcaaaactatcgatttaacatctgttttcagcggagtagtgttatttaccaatttattcaccaaatccacctcaaaaccaacataagagttccctggtgtgtttaatgtaaatttggctgtgttgtttttgtaattcatattaatcccagggtcaatcactcccactcctactggaattttcaatacttccacttcaaatccattattaacaggtttagtaacattgttaacagaaggataaaacttcagaagtcccacggtgggagaactgggtggttttattaaatataaaaccaaggacttttcaaacatatcaatatcacttacaacatagtccaatgcggcaaccattctaccagagttactgtttccatcgttaggatttggcgtagatttaaatgacctcaaatcacgtagagaatgagtataaatatttgacacaatatctgagtacacactgaaaacaaggccatttctgtactccaacaataacttcgatccagtaattgtgggaacagagaacattttaccacttttattaatcatgaatgctgaaaaaaccttattataactaacggtggccataaacagaacttgcccactcttactcttgtatagtgatatgaaatgcgttgaatcctcatacaacaacctggttgagcaaactttcccagtcctattacatataagagatgtacaaatcttgtatgccctcttctgtggattcatcagagtgtagtatatcctggtaaacctcgaatttttagggtgtggcataaagtaaacctcactaacatgttccaaagttttagaaattcccccttttgatactgagtaaattgaaagcatatacttatcatcaagattggggtcatataaaatggctattaaatccaatcctgggcttattctaatcttcttaatattagatataccttggtgagttagttttgaaaaactaaccaaaggctttccacgttcagtaatgaactggtctacatcatttccggtactcaactcatttcttaaccttttaaacctactaaggcctagtagagatgatctgaaaagagacagagaggaattgtaatggcccaagtagtaggcgtatttaccaattatttcatattccaaactctggtgtagtggaggatctgagttattcaggtagaatgcctcaatatcttcaatagtggatgacaattccttcactttgttattataattctgaataaatcgtgaaaacgaactacatttactaaaattaaaagaattctcaagttcaatttcagagaaacagtttgttttttcggactctggtaaccaatttaaatatgatatagtgtttctaacattattagagtaaaatcgaagactacatttggtgtaagataggggcgatactatatttctgatgaaataactcttttttatgagcttatttaaactcataatagaatattatacatttgcaacctgatttatcacagtatacatgaatttattttacaaatttcaatccagatcattatatattatacaactttatattttgaacactatgaaatcttaaacagattataaaatgaggatttttaaaagaatattataaaaatattttacaaattaaaactacatttagaaatcacacatattgaaaaaattataaaattaaacaaaatccaactatttcgataaaatatacaaattataattcaaataagattcaatatttttatcattgagttgtagtggtttagaatccataccccgatatataaaaacgacacatcaatgacttttattaatattttttaattttaaacctgatttaatataaaatagaataaaatgtctagagcttcacatagtggatatgataggcatattactattttttcccctgagggaaagttatttcaacttggtaagtataattccttcttaccttaaattttagaatatgctctcaaggctgtgaagaactgtaaccttactggcttagctattaaagacgattctgctattgccgttgttgctcagaaaaagcttcctgctcaacaagggaaccaggtaataattaattttcttttcatgccattaattttaaaatacccctctaatttttacttaggatgttttgctggatacctccagcgtgaccagcctttatcacattactgatgagatttttgctctcctcgttggcttaccaggtacattaatttagttctatactctacaatatttttattgtttgttatatataccatgtgtagtttaaacaatcattaagttgtatgattattttaggggactgtctgagtatactatataaggctaggcaggtggctttggactattcctataagtacggaattaatattcctgccagtgttttgtgccagaaactttccgacattaaccaagtttacacacaacacgcctatatgagactacacgcttgcagtatgttatttacccacaactaaataaattatgtataattgattttattaatttcaattcttagctggacttattttatcaattgagccggacgttggccctaagatatacaaatttgattcctctgggtggtttgcaggatacaaggtacataaaccaaacaatttaacgattattaggcttgcgggataggagctaaggaacaagagtctgagaacgcacttgagaagactttgaaaaggagggaggctgttagtctccaggacgctatgaaatccaaccttcacgtcaacactgaagttcaccagctttctcaaggccaggaaacaaaagtaacaattgaagcgcttaaatgcatgattgacattgacgcatttactaagggtcttggcgcttctagtatcgaagtcgcagttgcatccaaggataacccattcttcagacaactatctgaagaggaaattgagacctatctcacccacattactgaaagtgattaatttattaccatacaaagaaattatttattattgtatacattagaattggttattaatgtgtatattataacaaattactacagtgtatattatcattagttgactgcattattttttattttcagcttgaaactgctttactttcatttcgagtactttagcttcttggttatgctaaaaagattaaaatgaatgataaaatcacctcaaagtagtctcgtatgggttgcatcattaggttaaggtactttacaagtgagtttttaaggtctgctgggtgtaataaaccttgtagaaaggactcctttagctcttctggggagttaaatgttacgtcacctatgtgtattaatcatttgaataaactacctccatccttttccttcctctcaattgtgactgagttaaatcgcttgaaaactataaagcaaaagtatgcaatcacagggttcccatcaacgactccaggtgggcaataggcttttttaatcttagaagaaacctcctaatgaaatgtgtaatagttagaaatatacttctggagaatcatccatgaaaatcgctgagtttggattacttttggacattttttcctgaccctccacaagccctggcagcatcctgtgggatagtaccactgggctcctagggatctttttaagttcagagtattccctgaaaacttttataactcataaatttaccttgcaagaacattaatcttcctctggtccataccgagttgacaaatatcagccccgataaaaaatatatccgcacactgaattgctgggtaaagtagttgtgctgatggctgatcatcaccttcagttctacccagagcctgactacacctcttcattctaaagatattataaaaatgtttatagaaattaattacctagtaatattaaagcttctgctaatgtccattgaaaggcgccagtaaaggtctgggttcttatccacctcatcactagcccaaaggaatctgagaaatgtgttatgaatcgattaaactttactttacagagtcagtgttcattccagcagctttccagatatggataaagtattcaccaacaactctgatctaaatattttaggttaatccattgacacaatttggtaaaataataaaaaaatctacctttttcaaatcaccaccgaacttattattcagcattgcgtgccagtctgcaatccaaataacactcttaatgccaattttactcattatgtttactgtgtcaactttacaaaggccctgagctatatgcattcttccagaaggctcaaaaccatcataggcaagtggagtatagtcttttttctgcaacaagttcaaaagttcttctggtttaatacactcttcggataaactaaggcatattttcagcttttcctcaacagatacgtccatttgaggccttgaacctctaaaatgacggtccagttcctctctgagtccgtattttattgaacaggtatcattgtaaaattctagatttggattctttacgtttactacatttcctgagtagttgactgcgataccgccatggaagggggaaatgaacctttcagacatttttttaaatctaaaaatacaggaagatagcttttttacataaatggacatctaatgaattaatttacccattaatggtaatcatgtacttcaatcaggtcaacaatgttgtgtaaagatttctttggtaaaaaatcaaattaaaaaatagagtaaaaaaattacaaaatatataaagaaatgaattttattaaatttaaaatttaatgattgttatataatctggaatcactgtaacttctgttgaagttctttcaatttggcaactaattcctacaatattttttattaaaattaaattttacctgtattctaggttcctcgctatctacatctgggaatgaatacacgagggactcaagaagttcaggattcccttcactggtggagagtatttccacacacttatccagtggaacaacttgtaatccttccattccctttaactcattttctatatcagttagtgttgattccgttttattctgcattttagtagcttcctttcttagcctttcttcctcctgttctagcgataacctcaaggccatatacaactgagggtccatctcagggtcaactcctaatccatttgttaacataattttcatagaattatgcaaatttgtgaaattattaatctatactattaaaaacacaccgaaatctgtgagattttgtgaaatttgtgatccacctccaacgcctccagactgtccatacagtactgccgagttgaaaatcatatcacttaggagagtgcccgagcacggcttacagcagaggtagtgactggtgtcattattatttacagacgagtgaagcgcctttagcttctcctcagtttcagagttatttgagatgtcaattatatctgaaaataaattatgtgtgaaattaacgattaaattaattaacaaaccaagtatcacgttatttttctttaaaagcttcccaagtttaacgaaatgctttacaggctccagctaaacaatttattacttaatgaaacctactatagggcttgccacaaaacatattatacgttgctgttgtgacttgtttagtctatgctttaaagccaactgggctgtctgtataccccttataaaatcagattgggctgagggaaccacagtttgtaaatcagttaggaaggtccccaaatcatttgagggagcggttagtagttgcgatcctttacgtgccaggcatacaattccaacggaattttcaaattgttcagataacttagcacttgctattaatcctatagcgtcgatttgtgcacctaacctagtaggaacaaaatctccatttctggaatattcagaattatctatacaaattagagctgcttctattgtcatgttgaactaatcaaatctacattccaatggtaaaaagttgtaaaaaataaacataaaaattattcttaaattgatataaacaaataaatataatatgtaaaaataataatgaatgaaaaaatgatatctagtttgtgatgcacgacgtacaagaataaattattttatacaatttattttaaattattcgtattaatttttaattttgtattatactttatttgtattttaattaaatataattatacacataattaatccgaataggatccttgattctgttattcttaatatgatcttgtttatttaatttatacataaacaaatgttttgaaattgtaaaattactgtaaaatagtagatttgttgtatcatattttcgtgatttttgtttatactaattattttcacaaatgtgtcggtcgtcaatctttctttaatgctatcaccctgatcactttgaaattttaatatgggagttccaacattttaccgttggctctgtaaccgatatccgcgtgttcctaaggatgtgatcgataactataatgataggaacctggacctttcagaccctgacgcaataggacttgaattgctcaaagataaccctaatggagaatttgacaatctttatctggacatgaacggaataatccatccatgctgtcacccagagaacatggttagttacatattatgaatatcaaattttaggagcaaccgcagtctgaagaggtgatgttcacctgcatactggactacctagaccgaatatttttcatggtcaggcctaggaaactgatctatctagctataggtaatataaaaaattatataatgatctgtatagatggagtggcaccaagagctaagataaatcaacagaggagtagacgttttaaatcagcagctttggccgatttagaggatgaaacgtatgataccttgattagggattacgaaaaaaggtatgggaagacagatttaatagtaaggaaaagcaaatgggacagtaacgtgataacgccaggcaccgagttcatgtataagttgtctgagaagttaatggagtatatagaggatagagctgaaagatatgatgcttggaagagaatagtggttatattctcagatagcaatgttccaggagaaggagaacataaaatcatgaagtttataagaaaccaaagacactgtccagattatgaccccaacacaaggcacgtcttacacggtatggatgcagaccttataatgttaggacttgcgactcacgaacctaacttctttatactcagagaaattgttacttttttcactaaccccaccacaaataacactgaaaacgctattgccaacacacttaatattgtttcaaaacctttcaagaatactgaaagtgctgaaggcgtgcaaaaatacttgaagatgatgagagagaactggaaaccattgcagtttctacagttgccagtgttgagagagtatctctctcaccaactaaggttcccattgggatttgagaatggagaaatggtagactttgaacggtgtgtagacgatttagtgttaatgatattcttctgcgggaacgatttcttgccgaatctaccttcaatttcaattacaggagggtcaattgatcagatgctcttactataccagaaggtcctaccagctttaaacgattatttatcagatgaggggaagttgaactttcatgcaatcacctcattcttcgaactgctctccaagatagaagatgaaacctttaaaaacattcatgaatttaaaatgaaggcacaaagtcgtaagcaaaataatgagttgaacagcgccgatgcaacaaatgatagtaatggtcacagtgaaggtaccgggtcagacaaaagcgaagaggaaagaattgaggataggtttaagaaagagttaaaggagaggattaattcatgtaatgttaaggatgatgtaaaactgccagtggatgtgactttgaatgacccaaagctgtggaaagaagcttattatagagaaaagttcaatttgggtgataaaaatcaagaggaaatagataagtttgtacaaaagctgtcttttgactacataaaaggaatttgttgggtattacagtactattaccagggatgcccatcatggtcttggtactacagatatcactattcgccgttttgctcagatttacatttctcaggcctacaatcacttgaagattataagtctgagtctcagagtgagggcgaagcaaatctgaagagaagacacgattctctggaaatgggagtaaaaatgataaagtttgatttaggtgtacccctaacaccatttcagcagttaatgggtgttatgccaattagaagtagccactgcttaccagagaagctcaggactctaatgactgaccccgattcaccattgagggagttttacccaacaaagttcagagaagacccgaatggcaagaggtacaagtaccagtgggtggctcttctaccgtttatagacgaaaagaaacttctaactcatgttaaaccaatagaagacgaattatccgaggaagaaaagattaggaacaggacttcaaataatttaatcatattgcctaaatctagaagaaataattttctaaataatgttaacaccatagttgggcaggatacggataggccaaatagttgttttgaacagtttgtatctgagactggtaagaagcacagaagtgttctattacctggagccaagataccacccaggattctaactgttcaagatttaatggaggaacagaggaacagagggtttaactgtgaaccggcaaagagaatgatactcaatatgttatctgcaagaagggatccttatagtaatgatccacatggtccagtcctttctgatactcagagggattttcatcagtataccaataagtacacacctggtcaatacactccgacacaacatacacattacaatcacggacaatacacacctaacgactataaccagtacaatcaaccttacaaacgacatcataatcaccctaaccaatatcattcatataaccaacataaccaatatcctactcataaccagcacaaccagtatcatccaaataaccataaccaatatcatcagtatgatcaatatgataacaattacaccgataacgcttatgacccctataaccctaggtatgcaaatgagcaaccccaatattcaaggccaaattatcaacatgatagaccataccaccataaaaggtcaaatcaagatagaaactataatcgtgacagaaattatagtgacagaaacagatataatagcggatacagaagatcctctaacgagcaatattattgatttagctcaaccttgtggcacttttacaaatgattcatattaaaataactttagtatcatggataattttaaaaatcaggaaaaaatatgtaaactagtgagaaaaagagaaattaaagattccattggtgaatgtgccaacaaggaagacgaaaacgagattttaaaggaaattgaaaaaaatgaagttaaggaaaatgaacaaaatgtagaaaagaaggagaagggtactcggttggagtatataacaacatattcacaggactataaaataattgaaatcccgaaaccggagcccaagcagaagattgaagagaaagaaccaacaccatttgaagggataacaacatataccctcgattattcacttaatgcctggaaaaactttgaaaatttgacttgattgcttccagtcatgaaatgtacattatcataataacaagaaatacaagtagactcactgtagaacttacacatttttgtaaattttgttcaaaaattaatttttatgtgtatgtaatttaaataattgaaaaaataaataagtaaggtggttttagctaattaataataatggtccccaatactacaattttggtttaaaaaatattagttgtgagattatagttgataaatatttctcaatttctgtaagatagataattaatcccataaataatgataggaagcttaatttattataaaatgtggcaaatttaacttttttgtatggattctgccaacataggtttaaaggtgtttgaaatcccagaaaccctggactggagaagtctactgagaccaccaggaccagaatatgtaaattttctagacgcatcagaagcagaggaccctgaaggatggacggaaaatgagattagcactgcatttcaaactctgggtgatataaattttaaaaatataggagaatgccttaaggcattgactcccgaagtattcatttcagtctttaacttgaaccggatttactctaatttggagaaacaaaatcagattttattgtgtcaattcctgtcaaatttgtgcataaagatacaagtcatactggaatcaattcccccgaaaccttacacatcagatagagaatccatagataatattacatacaaacaatttgtaaatcaactctcactttataactctcaaaatgaagaggaagacacacatacaacagaaaaactaagtgggacaggagttgatccaaaatcgttaggggttgttttgagatcacttataagtgtaagcgtgttccttttatgtatgtgttacaagtttgcaaccacatttgagagaaatgaggaaaagacgacatttgatattagtaaagaaaagggtaaaaggggaaggaagagtaaaaaggatgaaacttcctcaaaagtcaatactttggcattggagactttaattaactcgcttatgacatgctgtaaatataatatgaagtatccatatgcatcttgctacggagggaataatagaacctcagtgccaatgttgagactgttatttgtaaacctccttcataccttatcactagatgaatcgatccactcaacctcaaaaaacatggtacagtcaatcgcaaaaataatcagagttaatttctcaacaatgcaaagtaacaaagcaggtcacagctcctttaacactaatgtgaaccatgaaggtgttcaagaaactggagaaacacttgaaactggtgaacaaaatgtagaatcacagatgaaagatcatgaaaacatggttgatagccaagaagaccaagcgaaggatggtaatgaagatacaagcagaacaatcgatactgttttagaatcgtttgatgatgaatggttggggttggtgctggatgagataaagaaacctcactgtcaagttatagtagatgtattagaactgttgaaggatagtaatatcccgaatataatagtcaatgaactgtttttcaacattaaggagaattattcatcccaaatatccaacacaaaccagctagtaagcactctggttcaaaatgagttcacaaacattgggttgttttttgaaaaaatggccaaaaaggtgccgtgcgtagttttatcaaatattggacaacttaaacagctgtttgacgtgccatgttatcccctaaggaagtcaattatggaaggaattaaactactgattatactctcaaagtactatgactcaggcaatgaatcgtcaaatttaatcgaagatgatgaagatactagagaaaacagaatggaaatagataactatgatacattaaatagttcaaatgatgaaggtaagtataagatgaagacaagtaagttgtgttggagaaatcgggagatgctgctggatataataatatcaaggcaatttgactgttacatgtatgcaagagcatgtgtattgaaggttttgtatgatataatagaagcagatgcactcccagcaagaaaatataatttggtagcagattttgcaacagaaagagtaatggatagggggtcacaagttagacagaaagcactatcactggtatcgttaattatagaaatgcttacaaataaaaagtttatgctccaactaaacaggccaaagttggttcaagaacttaaagttatagataataacattaataaagttaactttgccctctcagagttatcggttaggagatatagcctcagcagccattcatcaaacaatagtagaagaaactcttacgatgataacgtgaataaggaacgatcacgccgagacagtttaagttttgcagacgctaaggaatatgatttcgaccttgtaatacttgaattaaagacagactttggaggagacgtggttgataagctggaagagattcagactaaacttgaaatggcaagagaactatattcagattcaatagagatagctgagagagttgaagaatcccttgaactgtgcaaatcattattaaaatccccaactgaaactgaccagagatctgcaataaggtttataagttctgcacacctcctaggagtacaaaaggcaacacagatgcttccactagcctgggcactctcatggtctaacaacccaaatgtagttgagtcagttctgacagagttcaaaaatgtatactttcaaacggagcataattcattaattgacccttgtagactcctaattaacctcataggaaacacagacctcacatgtctatcatcagttgagaagattttccagattaatcaaacgaaacagcagattctaggaattaacttaattgacctaataccaacactgatcagtatctcaacttcaagctactctaatgcaccgagcactaaatctagtccacagaatagtctgattgaccatagtagaaatttgttgaaatgtaaaatatgtctaagcttaattaaaatcatcctatcgtctaaccagaatagtaatattcaggattcctcaaataaggatttaacaattaattcacagaatacaaacaaagaattaaggagtgattcacaaagtagtcttagtagttcaggagatcaactagctactgttgatagggatacgaattttgatttgggagtatttgaggaaattctgcaaaaatacaatgaggatatattgttggaggtctcacaagtgttaatatactttgaaaacagccctgcagtacaggattttatacaacacatcctcaagttgttcttgggtcattttggaaatttaagccttacgtggtttgaaacagctcaaagtgttattgaccttacttttactcatatgacaaatccactaaccatatggtcaagtattattaacaacttactttcaatgttggtaaactcagatgagtctggtcaattaaatggttatgatggattaaacggtgtaactaaaacatcaggagtatcagattctacaaaagaagtaagaaagctgtcacagttaatatttataacagggcatgttgctattaggagtataatgtatgtagaaaaggtccagaatgatttaaaagtggctagatcaaatactgaaagcgaacaattggagaacaacatgggtcttgcgactaaagatgaaatggagagagagttctttgaccatgttctagagaacaaactggtgaatgataatctcctgggaggaacaatattaaaaatcattattgaagcaataattaacccacaaaattttatccacacaaatccaaattttcattcattcaattatttcgataaactgaataaagttagttttagctccagtaggcataatcataaaagcggaaattctgaactagataagcatacttcaattgaggataatttggacaaggatgaaattgacagctgtttggagtgcaacatactgttcatgtgtagtgtgataagcttgtgtaagtttgcaacagtttcaaagagtttttgtaacattaaattgccaaataacaagacaataatccagacaatcatatcactattactcctggaaactgatacaacacaaactaacggtgcagaacagcccagttcggtgagtgatttggcgaaaaatgatttaaactcacttaagtgtaacctgttaatatgttacggtgacttgttggtaagacaccctaacataatggaaccaatgaatgatttagtgttcaagttactatcacacccagtgaatatggtgagggagactgcaatactggtgttttcacacttagtgatgaatgacatgataaagccgaagggaaaacttttagacaatgtgatgtttttaactcaggacagtgacgataaaatatcaaattacgctagagtgtttcttaatgaaatacacagaaagaacccaaacacaatatataactgcttccctgaaatgttgacaacactctctcagccctcagttacctactataacatcatcgacgcgtatggtacaggagtttacggcagtgatgcaacaattgaccacaataacagtttacatggaattcaggtgaatttgaagattttgaatgaagtgttcaattttctaaagaacgacaaacaggaacatttagttgagaagatttgcatgaggctgagtaaggcgaagtctatattcgcaacaactttgtacataaacgcgctactactaattaactatgatgaaaagaacataatgaaactgtcaaaatccttaaatttcatgaggcaattgctctcggaatctcagcccctgttagctgcgctttcaataattcacaagaggatcaaatctagtaaagtgcaaaaaatccaaggacaaatagacatcaaggaggtggcagacgagatgatcaataaggtaaaatcaatcctgggtcagggtaagggaaccatgctgattagagcctcaaagtatgctgaacagatcattgaactgctcaataacgggaattatactcggactaccttgatgacactctttgactcagaaaaccaggccaacagtgccagtatgaagaaagttaaaaaagaacctgggattgaggaatctgatgtcagttcaagcaatactggcgacttcgatgagattttctccgatgacgaaggaccaaatatagggaaacaaagctcgagtgattctatggaaaccgctgaatcaacaagtattaacggtgaggaaaatgaaactggtgttaaaactaggaaaaaaagaggaaggaaacccaaacttaagaggataattgaggacgatgaggatgttgatgagcttgaggatcgaataagtgaattggatcaggatggaataccctcaaatcatgatgataatattgccaagagacgtagtaggagagctagaactgggaaactcaggaatatcgatatgcttgaagaattttacgacatggatggaattgaggaagcagaggattaattttaagagtcaaatcaaatatatcttgatgatccacatgtagattaatatgaagactgagaaaaaaattaaaagagtaaaatgtgtcagataagaataaactacgtcgggatagtaccaaagtgggaagcctgaattttaatttcatcatatattttttacacatttatttatatcttcgtttctgataatgtcagattctgaggaagatttatccgctcctcagatggattctgaaagtgattttgacctcgacgaaggtaaagctaaaaaaaaggtaatttgatttctacatattttcgtttcagaccactaaaaaaagctcaaaatctaaaactaattctgataagtcagaaaaaactccaaaaaagaaaaaagccgaagataaaaccaagaaaaagtcctctaaaaaggaaactaaatctaaaagcgacaagtcggcccttaaaaaggtaaaaaaagacaaaaatactaaaagtaaaaatgaaaaaaaggaaaagaaagaaaagaaaactacgagaactctgaaacctaaagagcctaaagaaaaaactgtcaaacttgaacttaacacttcattcagtaaactaggccagaggtatatgacacctcctcaggtatttcgtcagaaatcaacacaaatatactattataaggccttttatttatctatatatattatattatctatatttatgttttagggagatggaactaggggattttacgagagtttgtacgaggagaacccgaatagcctaatcgcaattaaattttgtgtagaatatggtatttttggtggttctaagcatgacgaggtactgcataagtacacgcagcttcaaaagaacggtcactttaagggtgctgcgggggctattaaaccctctgctataacttttctacaaaaactcaaggctaactgacgaaatattatcaattcacttaatatttaatctcaggatttgtacataacagtatttaatatgaagaatgtacataaaatagattatgttaaaacattttaacaatgttggaagccagggagttccactcgttctggttagattcgatatgttcagagatatcgagcgtgtagtgtaggataatgtccactgtattctggtcaactgctccagcgttagtcctaattctttgaaggaaaatgtttatgaaaaccactcctgatcgggtggttagtatcctctcaaatcccctgcacttttgttgaaatgaaatgagtatgttagagcatctttgaagagcagtgtgtcttcctttattccctgttagtagaaacaagtgccctgttagagtaattccttcgatagcaaataagtagagtctggtataagaattgaatgcgtacaaaacagtttgtattctttcaccattagtggtcaatgatatactgtcggaggtattttcaaatgctaccaatgactttaactcatgagggttagtaaccagagtgatgaagtccgacaaatcaaatatattctccaaagctttatctacattttgacaaatttcaacgaaacggtcaagagagttaataattgaacatattagcaggagtttattctcaatgccaaacttgcggccgattttggctgcaagtaatctccctttgttaagtcctaaaatgcctctaaatacttcatcatcacctgttaacatactgaataggtctcttaggtactcatctctgtccttttgcatcttatccagggctgaaacatggttcattgggcacttctctatttcattttcaacatcacaaagaacatatagagtttcatagcaggtttcaattgtttttcttacctgtttatccatacatatatctggagcattttctgatctcgacgtatttgacacatcagctcccaaatatattaattttctaccatgccttattgaagctgtacttgcctttccaaacctagctgcacgggatttcaagacttttgtgtcgtcaggcttattatcatcgttggcaaacttagaatcatcttcgttatctgatttatcttccttctgttgtttaagattatcactttcatcatgtttagtctcattttgtccatcagtagtttcctcacgtcgaggaccctttttaactcctaaatgatacagattccatttacctgtatagctttggagttttggatccttggagacttgagcgagttggattctaagaatcttatcaaactcgtttggcgtcatgaaaagctctcgttcatacgttctatcgttacggtccacacacctaacgtggcgttcaatcgttctttgcgataatttaaacctatcagataacttgacggtcttattggccagctggtcaacatgttctggtgtaatttcaaataaacaaaaacttttaatcttctcaagatcatcttcccaaatgcgttcctcaggttctgtcgtatcttcatgaggtgacgggctatgattcctcctttgtccatcacgccttttaaagtttaaatctctcttacgtctgtactgatagggttgtttcagtaagatgtcaaaatcactaaatttttgcaaatctgcgttagctgggcgcgtccttctctttggagcatttttttgtcgctccgcctccaaaaacgtctctgttggatcccaatgagaatcctcaatggctccaaaagtgtcatcattgagcaaatccgtatcttcaacttcagaatctgacaaattcaggcattctatatcctctaagatctccccaaccacatcatcctctaaatcttgatgttcagtttgatgtactctattatcaaatctattcatttaaaattatacaaaattaatgtcatattatactagaataatctattaaaatttcgaaaccaattccccacagataatgatttaaaaatattatggaatgggcttatttttatacacatttctttatttatgtctgattattgaatacaaatttaatataggccgaaactttacttaaatctggtgcaaacgacaatgttactgtcttatttatgtaatattatttcacccattttaacattaattatatgtatgaataagaatccaagttacacccatttttaaatctactcattattatataaaatactttttgtatcaaacctgattatcaaattgctagtaatatttaaatacgaaaatatattaaattattaaaattagtatttgtgaactttaataattttagtttatcaaaatttatgttcttattacacatttcaccagcagaagattatatttgattattgtgtggtaatggaatcaccatagtgaaagatatctaataataaatctcatacataattgattttaatatgttttcgctgtatttttgttttattttttaatgtgtataaatgtatattaattaaacgcagtctctacaacaatggaactcaggagttttatatttctactaaccctatttttactaaatcctattcagcactgtaatggtaaactactaaaccacgacagtaggatcgtaaagatatcaaggttacccactcttccgaactcttccttcgtgagttttaatcgcagtaaaaaggcagagcctaacacaccgcctcagataacagagtataaaattaataaaaatgtagtcctttcaaaactagttgatagaaggaaccagaaactggctttagtcgccagcggcactgtattatttgcagctacctgctataaattggtttccaaaatcgttaatcattacctctacgaccgatatgtcgtcaaaaattctcctggaattgttaacactataggtcatgtcctactgacaaacactcctgacgttccaagtaagaccttcatggacaaggttttcaaaccaattctcaaggtcttggaaaaaacacccttcttaaggggcatgattagacctggcatgaaacgggtgtcaacagcttccgttattaaagatgacacaattgttctagtctatatctacgatgaattcatccatcaacagtcaaaggtatgaatttatacaaataaacatttaattacatagtactatgtatgtctatttaccctgattaaatatttgttgactgcattacacacattattaacaattttgcagaattatggatttgacttcatgcgtgttgttgtggataaataccagtctctgaagaaaagtgggaagagtgttgagctggtcctggtaaacgtgtcaggcaagtgggacatgagctatgacacatttagaggcctcccgtgctacgctgttccatttggagataagaaacgcaatcttaaaattgcggacatgcttgggccgagctctataccaaacctgtttttactagactcacagggcaatgtcgtcagcgataactgtttatacctgatgtacaagtggtccaataacttcccgtggcccaaagtgaagttaatggactacttaccagataacttgtataacagctccaacgaacccgttccgaagagcagtctttacggcaagattgtgggagtctacgtggatagcggtaatcctgaactaagtaagaaactaagagataagctgaaggagctttacgagttcatgaccaaggcgactgacggcaattttgagcttctgacccttaaatactgcagtaaaaggaacgaatttgacgatttcctcaagggcaaccacccatcgtggttaaatttaggatttgacgaggtcacaacaagcgtactgctctcaaacacctttggaatgaacgagttcctgtcaaatatcgttcttttagaccaacaaggagatgtttacaccaggtttggcatgtttgcactggataagaatctctaccagagattacttaacggactcctgaagggtgctttccgtgtaaaggacggcgaactggcacacctccaccttatgaacagaccacttatcttggtcctggcagataataaggatcctaagggtttggaggacttaacaactgagctcaacaaggctctttcagcgcatagaaaaaagcgtagaggacaagagttcgagttcttggtcctgaatgaaaagaacccatgcgaacaaacaaggaaactattacgtctggatagcaaaacatcgatggtatttccaaatagttttatatacactatttactttcagttatctaacgactctttaataataatttagattgctataagtccttttaacaagttactgaagtttaagggggatgaactgactgagaatactgttttaaagttcattgatgactactataactccttttaatgttgttggtattatatacactaactattttaaaattaaattagaccagatggttgggtgagttgtgaaatgcagattttaatacaaacctaaacagaaaagatattgctgattagaaatttaataacatctatctaataaagaatatttgatacgctttggagatgagagtatctatttctttaattccccaattggaagtgggaagctgctgtaggaatagtagacaatgttggtagtccatggacctgagctgttcagaccaataacacaaaaaggccactgagacgtattcatggaaagttaccagcccgttcctaatttctgaaatgtaagtgtcccatagccttatagagcaatcggtaggaatttcacgaatcagcatacagttcatccagcggaatggaaactgcatgaagtctacatttaaatcctccaaatgcttatataattcatagtcgattcttttaactaaatcacaaagtcttttcaaggacctatatactcctggttgattctcagtataattctcctgttaacagttataattgtaatagtgggtaactgtatatagttaatatatataacaaactattaattcagataatattcttgaaaggcaaaagaaagaatccgcctctacttcagtcaaagtgctatcacttaatagtgatatatcgtcgatggtgagattaaactctaacattcattaaattatagaatttgtcaatatctagaacaatatatatgaaaatactgttaacgtatggccgtagaaatacaatgacaaataaagtcaaaagatcattaattccctgagaattataaattaaaagcaaggtacctgcacatacccactgtctgggttcaaacaactccaaacaaacaggatcctctccatacagtcctgtagtcttttatacttaaaaatcttaaatgagggattagttcgaggcaaatcaactcttatctaaaattgttttgatcaaattattctaataaaattgttttaagagaattattgtaacaaagaaatttattggtaattaataatgagggaacagaataggcaaatacctgtttcagtatattcatttcgtggtcagaaaaattatctttgtgataatatttctaaaaatgtaaatactaaaccaaaacgaacataacacatatttaaataatcctttcgttttagggataataaatcactcctttcagatttaacacaactcaagtaaccctgaagatcgctgaacgaaaataaatttaccaatacaattcgccaggaatccgacctataaaataaagggcagtggtctggaatcccaagccataggaaccttgacagctcgtctaattattgataaattttgattaaaattaattaattaaataaataaataagaaaactggaggaatacctatatcggaagttggagccaaaagaagtaatcctaggcgctttagacgatcagataattttctagatttagaagagccgtcccgtctgctcgtagccttgtccttttctgacaaatcgtcgctactgcatgaagtaagactcattatacgaatccctcgcttatccacacatcttgactaatctagcatattaggtattacataattattactaattatgggaataaggctaaaatgaaaaatatataattaataaagtgatacttgtcgtagcagaaatgtgtggatgaactaaactaaatccaaattaaaaataattttttccattcgtttaatttgttattttattttaaaatgtaataataaatggatttaagtcatcgggctcctttattgtccgaatcaatcccggatgctgacgttctcgaggatgttgtttcttcatttggccactcacttgacattgtgcttaaaaccaactttaaacctgctaaaacaagtgattctaatcctgcttcgtcctcagaatctcttacttcagactcatcctcaacgaaaaaccagaaacttgccgcaattttctcccgtcaatggctctcaggcgtgttagccactttatctgagaagttatctgaagattcccatggcactgatagaacagacccaattccggtgccttctgagcctcaatttgttgatgatgatatggacattcagaacattgatgacctgggggtgtatgtcgagaacgccaaggtgtgtggaaacggacaaatcgaggtcaattacgacctgctcgagagtgaatctgttagtcaaactaggcctaagctgaaagctcagcaactaatgcagttaattctccagggcaaaaacaccgagtggtccctacagaagaaacttgaatatttttggaaaacaagcccaggactacttctacacctattatcaaacgaagagtcttcagaaacagttaaagattttgataatgtcgtgaacgaggaaaaacacgaaaccgtatcagttgatgaggaatccatggagtttcttaacaatttatttaataaacatgggcaggacgacgtgggtgatttagaggagtatttggttaataaccctaaggtcttagtggatgaggctaacaagctcggcttagttggtgttgatcgcttagtggagctatttaataaattaaaaaaggaagttgttcatgtgaacaaaatgtctaaatttttcacaaaactcgtgctagatcttgagactaatcatacaaattctagcacttaactcaggtgtagtaataatatatagtgattagagtttaatatattaagtagagatcatgtagcctctaccgtcttctctgtgaaggaaccacttatttgtggatttgtactgtattttaacatttcgcatctaaattttttataaaactatatgtgaattaaatattcaaacccataaatagtctgttatagatacctggtttaggtccggcagcgtgttgattggttttagtttgatgcatttgagttccttattagtgtttgacaacaatgatccaataagcccagatgaagaacactaaataaacataataaatattgaaaaataccttccaaaccataaatgatgggatttggtgataataggctgcaattaaattaccatttgatccgaaagcgatacaggctatttgacctacaacacaatatacaaaattttaggaatgttaaaaaatgtacaaatatttaacaatatggtaatctaaacgaaatgtgtattaaagtactttgactgcctatgaacgttctccatttggttgccgttctaatgtcatagataatcacctggcctgactgagatcccacagcaaatctttgggtatcctgatgaaaatcaaccattggaacattcttgaccatatagaacaacgcgttagtggcctgtttcaacaacaacactctaaagaaattatagtatgaagaacagaatgggtgttgataaaagtaacagtatatgtaaaaaattaccgaatattatagtccagagggtctaagcacttgatgactatgctaacaatgtccgttaggtggatgaagctgagttcaatgtaattctcaatgaagtcaactattagactcaacgcactcattattgccttgctacccaatttcttcttcctactcaattttgaataaagagttacaatcgtttaaagaactaagtaattgtgtaaataatactttacaatccatccaatgatgtataatgccagaggaacgtcttgactgcatgaaaccaagagtatcttagtccacgacttatccctcaacacatgataatggtggaatacatacaaaaaaaagtatgctgcatcaattggagaaacctaaacagtattcaaagtttacgaaattataatgtgcaaatggtaaactataagaatgaaaagtttatagatagtgggttacattgttaatatgagcgttttgtctaaacactgtggagtatttcgtatgtctgatttggtctgggagaattgaatggttagaaaagttggataagttccataccactccaaagccttgctccaatacactcagtagaaaggatttgaggtcaaaattcttagtagcttttaacacagatccattaccttttttggttccctttggtgtttttgtaaactcgctattctcttccaaactcatcagctttgtcaacaataacttcaatacatatgatgacagtgagtagcactttatacctacagatttttacattatttatagagtaaaattaactgtataaaaaggtgtttaatagaataaactataagtataaaggcatatgggagaacctagtctgatggacgacttgagtgagtagataaaattttcaacggagattagtgaaagaagtattatcgactggtcttcataaatgttctaaagaatatttttaattaaaatttaaatacctttaaacttttgatgggctgagtaaagtcagtgtccgatttagttttattgcatgaaccacagctagtaccgaaggtgaaaaccgtaaaattacagtcacagatgtgaatctgaggtagattcgcctttccatttaacttaaacgactgggaaacatgtatatttgccaaggctcttgagacgtgcaaatcaatttcgtccttatcaatagtcttcaaacagctttgcaagtacccaaaaacattatcaagtgaatttagacgttctacgctcatcaacacattaataataagccacaaatccagcttatttcgcccaaattcttcaaattgatacgaagttaaactcgcgctaacgtcatcaatactatatttcctcgtgttgacatccttaagctccctttcagagatattatcgcaaatttgtgacaggaacagcttgtaaaacatgttacaagtcagcatatatctactattaacatcatgtaagttgctttctagactactatctatgaggcttgaaggactacagtggactagagactcggtcgttctttttttaataaggttatagacttgctcattgaaacgcacttcaagtggtattgttaaacttccatttggtattcccaaataacaaaacattgaatccttagcaagagttaaaaaatctatcctattaatctcagtgtccaaaagatactcgagaggtaatataatgaacgggattgaacagtttgttacatcacattcagaatcagaacattcggtagaacacgtctcacttattctagtatggttcatccttattttaccattagtatgctttgaaactttaacaatccccctactattatcgtgtacactgtttgatccaacaccactatttgagtggttaaatgatagaatcaaattagaaagaaaaaggttagatgagattctctttttatacttttcagaaaacagtgataatgaagaataatagtttggtacttttaactcttgcgattctgcactatcagagttgaagtttaagaaaactgaaagtgcgtctgatattgttaagctattgatgtccttagtgttatttggggcagtgttatcagtgctagttgaaaaaatcgcttgtctatatagtgataggtatgcaaattttgatataaaatcaccagtatttagcctccaaatcagaacattggtgcttgttagaatcaacagtaaatctctattcttataaagcactaatctgtctatacagatacttcctaattgatacttggagttaattctgtaaattcctttcaaattctttaaatatataaaaaagttggacagctgcaagtctgtgaaaccgtttgcacctgggtctgaaagtccaaaatcattttccacttgaattgaatcagttttatatatcgattcatcctcgatttctattttattatggtctgaactgtctgactttttggaacttttgattatttcgtgaatgttaaatattaccaaatagccttcagtgtctattgtcgcgaaatttgtgggcaactctaccagctctgatgcgttatctcctgttaaactacatacgttatgtattgattttatttttgaaaaatggactgcgtttatgtaaaattttaccctcaaactgcgaattgagtataccagaacggaagtgtcaaatgctaacaccatatattcacaggtactatgcattattctaacaccactagtcctttccagttcatccatttttgagtcaaataaaccaatggaacttgagcgataataaaaacgatgtaaatattcgtttatcgagtcggtaagtataaatggtgtgaacttccatgtcctgttaatattgttaacaatgtacaagaataagcttggcggtatcatgatctctgttttaatgtttgttagatcatgcgctattaaatctccatttgcgtataagtcgaacttggtcaaattacctgatctctcagccaaacaggtgaatttaacaccactataatagagataattagtcaaattgatcttctgaaactcccaatcattccatccatttctggtataatacacattcttatcaaatgaaaatacgtacaaatcttcgaactcatgactttgctcgctattatgataatacatatcataagttttctcaaagttaaaggaggattttgggaaatttagtgattccttcataggttgaaagtgcctgttgttaccttttgggaccagaaacagcttcatcttcccatttcttagccatgaacacaatacagactcatttctgaatttgataaaggttagtcctagccatttattctttgtactaaagtcatcatctgaaaagcttaatatttcggctgttcttgtaagctcgtgtgcctcataaaaccacaccaaaatacggtaaccaaccattaatagtacgtaattatctattacgcataatttcccaggatcgttctctaactcataaatatactctcttattgtgggtttcttcacatgcccctttgtaaatttacaatttgaagtaattacaccatttatacccttagtaccagaattgttagtaccatttgctctaggtttattaccagggtctccaccatttgctgtcttatgtgaattgttatgatgtatgataggaactgtaatttggtgtacagtgtcccattcagttatgactttaactggcccgttaaaactagactcgctggatttatgtgatagtatagaatgtgttaaatcccacaccaacatctcgttactactggttattgctacaaatattataattccagttccaacttgatttacactattaaactcattgccgttaacattatctttaccattagtatcatcattatcattattgtgatcttttaaaaccctatcattgattctagttcttgaataggagttacaggaagtactcaaaatcttggggctagtgtcagatgtttcagagccgtagctgacatcagacgattgctcatcatatgggtttgtttctaggcttttcggatctttaccttttttcaaaggcaatttgttatcaatatccaaggtttcaataagctttatggtccatatgtcgataatattaacctttgaatcaccaacagtggctataaatctgcgatctggtagcacttgaatacttcggatggggaatggtgggcctctaatcctgtgcaaacacctgtaattactgagtgaccaaatgcaaaggctactatcctcatgtaacgccaaaagaatatcctcgccgatttctacagacttgaaatcctttgaagagtccttgttgaagtttagcgatgatgtataatttgagcctatagcaaattctacttgaattacaggaaaagcaactgagttattatttgacacaagcataaaaattggaaccagttttaacttatgtttccgttcataattttccttgaacctggtcacagaaatgttatggttgatctggacataatcctcaggatttattctccaaagtataataacgccctgctcagttcctgttgctaatatattcatatgattgtttatggagccacatctaacatcaaagtttgtttctgcggttggcatgaaacacatggctgtgttgatgcagttcttatccatactgcgatatattattctgatttattaaaattacatttccgttccgattttagtgaaattaatgaattctagaactatattccacgtttctaactgatttggaaagattttattatgatatactatgtttttttgtaccatgctcattaaaatttgcttatcctgctttgtataataatttaatcaatatttaaagttggaaaatgcgattatctgtggaatcattgaaatgtgttagtgaaacgacggccgatacctcattcgttaaaactaagagccaaaatcagttatttctatgatacaatttttaaaatctttctataaaattattcttgaagtttaagggaaaaaataagggatgacttgagaagatggcatccgcaaaatatattacagtgaaatgaagttattaaatatacaaatttaaattataaacacataaacgatctttaaaaataattaaataaactgtgaaacattaaatatatacattaaaaatggtgcatctgccgggaatcgaacccgggtcacctcgatggcaacgaggtattctaccactagaccacagatgctacgagaggatataatgtttagaatttatattggtgaacctcttaaatattttaattttaatttttattttcgttaaatttagtatagaataataataatttttatccgttactggggttatcatataactgtattctctcattctcagattcctcacctcacaccgaaatttactttttgaaactgaccattcctaacacattcaatgaataacactattttaagcctctaaaatttgatatactcaattttccacaaaaattttcattaatatggatgaagaggatgaatttactccaaaagacctggaagttcttccatttaaaaccgtactttcggtacatatttaatcatctatatttaggtccatgatattgttcatttcggaataactcgtgattccactgattttgactgttcaaattcttcgaatcccggtgtgtcgaagaatgtcaagaaatatagtcctaaaaatcgcaggtttcgaaaggaagccattttttcaatgaatcgcatcgcttcactttttgtactctatataaccacaattgccgaatctatagcgaaaaacaacagaaggtacccggttctattcatctaagttgattataggtccagcgtatttgacaaagatattttagaagctcttaaacaatgcatgttttatgaagttgaaagtcaaattaatgatctacaacaaaaggaaaacaatgaaaatcaagatcaaaatcatgatttagatcacaacatggaggatctagatcataacaacgcccataatttagaggataccaccgtagaggatttggatcaagacgattataatgatatagatttgcctgaaaacgaaaatttggaagaaaattatgataatttagacgaggatgaaatagaattagaaaacaacagccaataatgtaatacgattaggtatatcacaagttagttaatattaagatcgaatttaatgcgttcaatttcgtatcttgactcttgaaatgcgctaactatggaggcgatttggatgttagagttggctccagctgccagtctttcctcgacatccgcgagcctaattaaaagttgaacaataggtacattgggccagtcgattttaacaatggatttgtaaagtaacctgacaatgtcctcaagtgaatagccctttttatggtgtaaaacactcaactcgtatatgcactccttaaatgagttctgcatgagactcttaagcaaatggtcaatttcactactctgtggtagtccagaagttgcaagtattagatttgcatctatagtgaaatcagctcctttggcgtgtgacattgaagtcacttggagacagtttagtaccctacgcatatctccttggcctatttctacaagggcatccagtgcacagtcagtgatttttacgttttcaagtttagcaatttcccgtatacgttcacgaacgacgtcagactttaacggctgaaacctgaatccagtacaccttgactgaattgggggtattatcttattcatgaagttgcaaatcaggcaaaacctaacattatttgagtatatttccatgattctccttagtgcgttctgggcagcatttgtcatctggtcagcttcatccagtattattagctttaagttagttcttggtggatcatcaactggcattgtgcttgtaaaagtgtttgaagtttcagaaaatgcctttatctggtcacgaaccgtgtcgattcccctctcatctgaggcatttaactctagcacaaacccattacgttgacttccatacaaatagcgagatatagccagtattgtagaagtctttccagaacctatacaataaactcagttgtatcaagtaattaaggttatttgagagtaaatagtggaattaaggacaaaattacctggaggaccatgaaatagtaagtgtggaagctgtcctttttcagcgaaaatcataagcgtagacattatgtcctcgtgagaaattatatcttgtagagtctccggcctatacttctccacccagggagcacctagtgtcgttgccattttaataaccttcaaatcaactgaatagattctgttatataagttacataaagctctccattctaaatcatttaatcaaatctgtaatatcaaatattatcattaaattaggtaaaatttaaaggtgtggatgaaaaatcatattatcatcatattaaagaataataaaaatgtgattaaaaatataacaaataaagaaggagtgaattaaagttataaatacaattgtgtaaggcgatccttgacctaatgtgttaataataatttataaaattcatataatttaaattattttatgagaataatgacaaaagattattcatttgattatttaaatgggtactattgccgaaattgaacttccaaaaggtattctttatatatccaatatttttgtgtatttttgtttgatgggataaatttctgaattcaggctacacaattggggttttgtatgattttttaaagaaatccggagttcctgtcagcttaataaacttaaagctctttagatccgcctataattcttgtaactttacaatttttgacatttttgtaggtgattctttatccttccttcacaaattcttttctgtttgtttttaatttaattttagctaattaaacattaaaaaatcttcaggaccatttgaagaaatccgacacatttaaacacagttttatcatttttgacaaatttgacctttggccctcattttcatcagattatcaagtaaacacattattacctttagatttctttataaattatatcatttttaggaacataacaatactaagtttaaggataatttaaatcataggaccaaaagtaagaacgcatacgtaaagttgttaaggttaagtgaaggtgtagaggaaaaggttgataagtgtaaagtaaattgggtatataagtttttctattggattagattttcagttttatatttattaaaggaacaagtggaccataatttaatttgtctctgcctttacggtgacccgtttaactctaaaccgttctataatgatatttttacacaaaagtttttattgaaagagctcataaatttcacagtaaaatctaacattatagagaatttagaggataatttagaggaatttactgataaaacaacccaattagatgatagttcggagtacaacctagaagttataaaagggatatcggaattacttgattcttttaaatccaaagattcaaacacacaaattgatgtaaatggtcacaataaatcagtttatgatctaatagataaagatataaggatattaaatttatatatgccatttgaagtggatataaagtcactagagctgggcaagatcacattaatctgtggtacgcaatcatcagggaaaactgtactattgaggtcaattgcaaaatcgtggtatcatttgaataattcaaatcatagtagtaataaactagattataaggaccctaacaaaaactctaggtcgtgtggccatgttataaatatagactacaatgaactgctgagtgagctagttggggtttcagagttatacttaaagaatatatttgttaaggctaagtataataagccatgtctggtggtgtttgacggaatcgagtgtttagttgccaaggttaatattgacgaggaaaggcaagtgccagccacagttactaacactttacttaaccacctttataacttagatcctgatattaaatttctgacttcaacatctggtggcacaaatatttctagtcttcataattcttttgttagcattgtcgataccctagtagtgcttcataaatcaccctaaatcggctacatttccaaactatttaagtaacaacaatagtaatagtaataaattggggcataatgcagttaataaagcgagttggcgcttttttagtacattctgcatacatctcctcgaataatttaatatatactaaaaccaagccgcctcattttggtcgtgttaatccggacactgacgcatttgttagtgatatttatgataatattgttgaaactagttcaaacccactcaacacacttgatataattgacaacactgttaattctgttaataatgctttcgataatagtaatagtacttcctttgataatacaattaataaaacttttgacatgggcgatattgctcctaatacacttgacttctgtgatattactgccaatacacttgacaccagtgatattactgttgattccttcgaatacaaggatagatcaaatgccgtagatacaattgccaattcgctaagtcccgctcattaccctcttgatgctcccgatgacagtgaaacaaaaaatgaatatatggattcatttgatcaaaggtactcgagaagtgaaccttttggtaccaaaaaactgaatatgatgtcggaatcgagaggaattgaggcgaccccagacgattcagttgtgataggatcccaagagtataataacctcaaggaagaaatagcgatgctgaaaagagagttgtacaagactaaaagttacatcgaaaaacctaaggtaaagaagaaggtatataacacaatagaagtgagggtaagtttacgtattcaagaagctgatcttcgtaccaagtgcaacttcttcaggaagaaagctctaaaggggtatcctctggtactcacaataagaactgaaggggaccccaaggactacaccctagctgcagaaggtatcattgctaaggcaaagaagttactttccaacgcctgtgttccagccggcaagatgtttgttaccaacacccatatttctcaacatttcaagcctttaaagaaacctagttattcaagtgagaagcctttctctaaagaacgggattcatttggagaaagctctagttttagagatactcatgatacttattccaaatcgcattcatattctgaacgagagaatagtaaaactccaagttatgaacttgatagtggaccaagtagacttgaaactcattcacggcctaccaaacccgtttaccgtcctgaaatcaccaacacagatgaactcaccgttggctacactagaaaaagtggcttatacgatacctttgtcgacaacacgagaaagcggttacctgagaccagtgtaaaccactttagagaaaggtcatctgagaaaagttttggcagtcctgtggtaactgggagatctgctagttcaggtgaaacccactctagatggatagtgaagcataaaagttcaacaaatgaaccattgaatgacatgaattcgagagatgaactcaacacaggagctgaagacagcaagtggaaggtacttaacaagccaagataatatatttaaacttgatgcacaccaattaattgcattacgtggatgtatttaatactttatatgaaaagcgtaattaagttatactagcaaataatgaatgtaatacacaaattaagatgaatatttctggaaaacgtagtgggcgaggtcaaggagcctgttagaatatccccactcgttgtcgtaccaggataccaacttgacgaaggtatcgttgagtgatattccggccttgacgtcgaagacgctggacctcttgtcatcgacaaagtccgaggatacaacctcgtcgtcagtgtagccgagaactcccttcattgggcccgcagctgcgtccttgaccaccctgacaatgtcttcatacttcgcaggcttggcaagcttgacagtgaggtcaacaacgctaacgtcggagactgggacacggaacgccatgccggtgagtttcccgttaagctcggggatgacttttcccacagccttggcagctcctgttgaggctggaatgatattgactcctgcacaacgacctgcacgccagtcctttccacctcttgaagctccgtcaacagtaagctggttggcagtaactgcgtggactgtcgtcattagtccctcgacaattccgaagttgtcattgacaaccttggcgagtggagctaggcagttggtggtgcagcttgcgtttgacataacgcggacagacttgtcgtaggtggtgtggttgactccgaaaacgtacattggggtggagtcgctggttggcgctgagatcacaaccaactttgctcctccctcaaggtgaagcttggccttctcggtgcttgtgaacactccagagcactcggcgacaacgtcgacgtcgtttttaccccaggggattgctgctgggtccttctcgaaagtgaggtggaccttctttgagccaaccatgaggtgctcgctggttactgataattcataggggagtgagccgtgaactgagtcgtgcttgaacaagtacttgatgtagtccggggtcataaatgggtcgttaacgtggaccacctcaacattctccattgataatgaagctctgtggaccaggcgtccgatacggccgtagccgttgataccaatccttactaccattttttctatgagcgagatcagtttacctagtactgcgtttaactactaaatgattttaattgtttacaactggttttaaagatgtgtatttatacttttcagccaaaaactttcaacaacaattcagtcaataataaataaatctgataagttgatatcaaatcccccatccaacattaaccttcaaatggggtctaaatttatataaaaattgtttattttataaaaatgtccttgattccacaccaattcttcattaattcgatggattccatgtagatttagtctcaatagactattatgacttctataattcttaatttatcaagttacacatacctagtttagcaaatgtaggtataaatctcttgatttccactagttgccataatttttttaataatttacttttaaatagtaaaattctccttaacaaagttgatctaacataaaatctaaatacttattaaatttattaatttttactatatacacacctccaaagtatagatcctacttaattattgactctgtataataaatgtttgaaaaaacattagacatagcaaatgatattaaaacattgagattatttaaatttggttaatttcttaaagtcccagcgcatggtggcgaagtgggcccaaaagaacctgtaccacatagatactacgatagcgcaaagagtgcttccggcaaagaacttgaagaacaagttcttcctctcgtcgtgcatagggtctgaggtccaggtgatgaagttggcgacatcctttgccatctgtgaaaccgttgcaggtgttccgtcctcaaactcgagcatcccatcctcaagtggtggagccatagatattgagccaccattgaagtagttgttaaagtgcaggccaggtctcagttcaaagccttccggaggttctgagtaacccgtgaggagagagaagatgtaatccggcccatttctcctggcacttgacatcagtgtgagatctggtggaattgctccattattggcatatcttgctgcttcagagtttggatatggagctggaaatggatcagtgggtatccttggtcttgagtacatttcaccttgttcatttggtccatcttcaatttcgtactctgccgcaatttcctttaccttctccagtgggtatacctcatcaatcaagtgtcgaaatttaaggtagttaagtgaatgacaggttgcgcaaacctgtctgtaaacctcatatcctctacgaacacttggtatgtcatgtccgtgaagtacgtttttgaaccaaaatgggtaaactggtggcgttgggggatctaagtttgagcaccaagctattggtctgcgttgtaaatagttatacacaattgtcactccaagagctgttaatatatacacttttaaactctggtaacggtaacgactacgttttgcggtctcctcttctgtgtatggtgagaaaaagttcattagacgctcttgtgcccctaaagttggcaagtaatagtctactccctcaatcaaggttcctctagccctctgcttcttatagtctatggcaggtgacctatatgcgtacccgggcttcagcgggtcaagcacatacttattaaagctctttaccctaccatttgttacaacagattctcggtgtacggatgatatgagtttacggttccatgagtttattagaccaagtctcacctaaaaaatgatgtgttttgtgtgttatcttattatgtaactcgtgtttaaaataacacgaattggtaaaaactagtaatttggtaaaaattactaattaattactaattgtgcaaaatgatgaagaatctaataaaacatactgtgaggggaagtttgttccagattttatctttataacctgggaataatttattgagagcgcctccaccagccattgaataaattaatatagaaggtggattacagtacaagaataaccataagaataaaaattgcagaaggataaaaatctcctctcagatacaaaatgtatgtttaaacagataaaaatgaggattgaaaatattaaaagtgtgtccaataaacaaacaaagatgtgaggtatgatatgaccaatataaatgagaacagaattcagagaatccaataaaagagatgaaatttaataaaaatcggtataatatcttgatgagaaaagaaaagttataaatttgaaaattattactgaatggtataaatgtgtagtttcaacttggatttaatctattaagcgagaaatatgaatacaaggctcaaaagattaatatccaaacaattaaaatatggaatcaactttgttataatgattatttatataaattgggtggggtattggtcaatttctgatttacatctgtgttccaaacatttaaaatgttttaaccttatcatttacttacctttctactccttttggagttttatatatttttatacaacaagttctaagttttaaacaacatcatccttgaacttcattgagtttattatttaattcatgtgtttttacaattttcactcatttcacactattttatgattttaaaattattttgtaacatattatcataattttattcaatttttgtaaaaattttgtaaaatatggagaaggagaaggagaaaaatgtagagaaggtggacgccttgggtaggaaggtttgggaccgaaacttctacactgagaaagccataggtaaatcgggcggtggcgacgtcgttgaggagactatttctacgctataccaggggacttttaagaagcccgtgatcacggtacctgaggttcgtgaggatttaaagcctaggaaggagactattgacttttcaaagtatgttggaagatcagaactggttgacgtcgacggtcccaaatctaagcagggcggctttttttgtaagacgtgcaactgtcttctaaaggattctaaatcctacttagaccacttgaatggtaagaaacacaatcgtcttctcggcatgacaatgagagtcgagaaggtaagtgccaaagccgtcgctgataagctaagaagactctccgagagagacagcacctctgttaagaccaaggacgaacttgaaaatgacgctagggagcggataaaggagcttgagatgtacgaaaaggagatgaaggaacgaagaaagctcatgaaattagaaaagaaaaagagaaaactcaacaactcaaacccagatgttaatagtggtcataaagtaaaatctgagcatactaatgttaaatccgagtataatgactttaaatcagattatgacgatgctaaaagcgaatataaggttaaatcagagtacgaggatgaggaagaatccagtgaactggaagccatgaggaaagctggtcttccagtatctttttgttaatattatacagaatttaccattttatatattactcagtcccgaacttaggcgaattttattattacaaataccaactaaacgttaataaaacattataaagttaagttgataaatatgtaaataaatacctgtacaaagatgacagtgaccaaatatctaacagttttaatggcctttttagggttatcgcgttcatgtcttcgtttaagttcttgtgcaaatttatgtgaattcctcgaaaattcctttacgttatagtctatctgatccaacatcgaaccctattctcagttatataaatgtaaataacttaatttagcagtaaataaacagagttgaacctgctcaactagcattgttgacatttgagtgtacatatcctttaaatcttgtactgttaaagctatttgctgtaacctctaaacaagaaaataagttgtcttaaaatcgtaaattagcgtgaaacaataaaccagtttcaaaaaatggatctttaaaaaactgtaaactaagttaaaattaccaatgttctatctgcgatattatcgtgtgaagtttgaactgaatcttgtattatctcatcccttacaacattattcattatagtcatctagaaaatttttattagtatgaaccaaataaataattgtgtaaacagatgtaaaaataaactaatagtgtacttcattgtgcattgaatcattttgcagcgaatcatagaattttttctgcattttccggaaagagattgagagaggcacgagatcagtggcgattttagcctttgcatttttccttagaagatgctcaatgtagttgtcaacctccttcgaaatcttctcagtattgatttcaattttcttaaaagttgtggtaatctcaactgataagtttgaaatcttctcatagtcgcccctgcctgccttcccaaaaacgttcaggaggttcatgttctgcagtttctccagctctttcaccttcactcgggcattagataacagataattgcattcatccactaactctagccactctggtaatatctccatagttacatggccaggagctgtggcttcattctctaaaaaattcaataaagttatgatatgtaaggagaattggtgtaaaattatgtcaattaagtataaaagggattaatagtagacgaattgagaaataccgttagaagatgattcattggggtcagaagtggaatcgtcttttttaatatcgaatctatgtgccttttctctctctttatggcgaacgtgctggtaagtatgtgttaaattgcgatgaaatactactgttttaggcatctaacctctataatacattaaaatgaataataaattaaaaatcatgaaaaattattaaaattgtacagaatatataaaataaatggttaaaataataaaagatgtgaaaacagaatggaaaaatagggatatcagtaacgaaatactaaatctagacttaaaataataaaataaaaaatgatggaaaaaatattggaaagcagattatgcggaaagttcagttaaaagtgctcttgagtcttcaggaagcttggccagtgctgctaacttagcctttcttagcttttctctctcaagagtcttggccttgtaatactcttgggaacgttccttcctacgatcttctaacttcttaaccaatccatcatagttccatccaacctaatacaatgttcagttaatcattaaaattttatttaactagaccgaagaaaatataaataaatccaaaccttggttaaaacatcacccaaacgtgcataacgtctgccaggtttaagtttaaggaagcgtaaagcggatgtaacgacatgttttttaactttagcatatttaggcggtactccttcaaaggttttaagggtttttaaagcatggtttcctctcttggttttatgaggaagcatacctctaacaactcttgcgaaaaactttgaaggacttctaacatggaatggacctcgggctgggttcgtattggtcttcagtctcaggaatctttgatatttcactataataaattattattgttgttttttataaaattttaataaatatatttggtgggaacttacgtttatttctaaagagtgatccactgatatttatttcctcgcatctaacaactacaaccttctggcccgaaagcaactgtttagcaacaacagaagctagacggcccatcaaatggcccttaccatcaaggacaagtgtctaagaaattatttaacaataattcagtaaattgttataattagtaataaggggattattaactaataaaatatcaaaaactaacttctttaaacattttaaatcgtctgagactatataaaaataatataaatttataaatataatgataaaatcatattattttattgttcccacactggtaatgccccatctgtcattaatggaaagattcctttattttagtcctcggtggcacacatttatcttttcactgtgaattttaattttaaaatggatatacttttataataattggtaaattatctcgaaaatctttatgaaccctaacttatcccttatcaagtccatatttcattaattaattctattttaaacatttagttagttatatgtacttttaaccattgtaggttttttatttgaggttagtaatgattttcccgttccaatttattgattcaaattcataaattacacaacaattttattgattagctttttatatcattttttattatttattgttcattttatttgttatattattttttaattttattttatattttaaatggaatgtgcttggtactaataactagattactagatatgttgatttcaaatgactttagctgtagaatatcctagatcccaccttcgggatttctttggcttcaaaactccaatcttcaactccgaggccgattattcccttattcggatcccatttgaaccctcttccgaacctttggatactccaatatcatgtgtaagaaatttgaagcttttttcttctttaaagttgaccaaacttttaaatctgctaaaaaatgacatttacaaggcagttgatgttatcttctcagatcttgttacagctttggtactgaaacgcctaggatatctgtcaactcgcaactacagactatataaagttattttaaaatatttcgggcccttcctatatagaccgttgagactaagaaaatactctgattatagtattaagtgtgataaatccggtgattttaaaatttgcaagtgtttattgaggacttcaagaagaagttttttaaatgtattatataaacttctaaactcatgtctgtatataaaaagttcaattctgggatttaatatcactataagtcatatacacaccgtaatttactatactactgttgatgtggttgatggttacaatactaagaattcaacacattatttaagtgattctcccttagataaggaggattgggatacgctagacatattagagtctagtacatcatttggataccttagattatgtaattttatatctaaagtgttgtttaagaacaataatgatgtggatatgttagtctcaagagcttccacctggagtagatttgacaccaaatatattaaggaaacattgattgccttattatttattaacagtttaagagtaagaaaaccggttaaaaacatattttcagattttaaaaaaatgttaaattttaacttcaactatcactggaaccttttatcatcagttaacactaataacttaaacctatttttaccatttctgactctgttccactcaattattaataacgaaacaagaacctttgatccacctacgagtaacaattatgggttaatacatagcaagtgttggatacctaaaaacttaatattggactgtaaatataatttaccctatgtaagatacttgattttagtagtcaaatcgctgttgaatgatcctacaatctcgaatcttctttccttaattgatttgtttgttcattacttcagttacagtacacttaaattcggctttctaaagtgctctattccatataattgccttaggtgtacttcaatatttacggaggtttactgcgggttgatgaacattttagaacgtatgcgtcaactgagctgttattacccacacctaaatctgattagaatgttgataaaaaatgagttaaataggctaaaaacaagtttcttcgtttcttttattgatgaggacatttcagactttttagtgaattacacttttaagaataatttaatcccagatatcttggaacggaacttggtaagaagccactattcccccaaatattcaaagtacctaaagtaccttttctgcttcaaacttctgaagaaatgcctagataataaatccagcataattattaaggagaatataatagcaaactcgtcaaagtgttcttggttcttaatgttacttttctgtgttgacactcatgtcaagtcagttgatcctactatggcaataaataaaacactttctaacagtacatacttacacttggaaaatttaagctataaacctcctagagatcataattataaatttgtttactgtggcaataacatgctgaacgatcaatttgagattatttataatttatatgttgggaaactatcaattcatcagtacctagacgcctttgatattagcgataagcttaatattattcagagaacacagtcatgcttagtgctttctaagaacttggattatgttgaaatggtactcgaacaacttgttcaagcacttgtcattgaccctggagacagaatacttaacttgctatacatatccctcaatgatttcaacgtcactagtaagatcttctaccacctctcatgccttttacattccaacattaacaattccacaaatcacaagattgtcaccttcatagtatctttttaactagttaatacagttatacagttttattaaataactgttcaataaattttttagaggttcatattcaatttattgtctgaaaaggatagaaacatatacggaaatcaaattttacttcatgggcaactattaaacctcacgtattctaatagttatattagttttagctacttatttgattgatttattaactctaaaatacactattcatttattgacaatatttaataacttatccaacatactccttaatcttctaaataataatttcttaggctaagattgggtgaattgcctttgtcgaagagatataatgagctgaataggaagattttggatatcagcgaatctataaacaaccagccgaacctttatttatataaagattcatcggatatactctacaatgataatattgaactgaattcaacaagcagtgaaggtaatccattaggtcaagtccgttcgatacaaaatgaacctaattccacaagttttaaatcaaattccactgatgagagacttaataataactatgtaaagttcaattttagccttagtgagtacgataatagagatagtagatccttctctacccttagtcaatcagactcttacgacggcaaactctatttaaactatagtgaacgtgatctcgatgaatctgggagaattgttggaataaatttagactcagtaaagatattaaattcggccacaagagcaccgttcatggtcagctataaactaactgatggtactgagagaacttacatttataagatgaaagatgatttaagacaagactgtttagctattcagatgaagcagtttctactccagatattttacaatcacgagttgtttgtctatctgagaccatttctcgttattccctactcccgagtcctgtttgaaatcttctcaaagagtaaaatcaacgatatttcactgagcagttattttaaccctaaaggttccgaaattggtggagttgtgggctttatcccggacactatcagcagacataatatcggaaaggaatttggtgttcccattaagcactttttcctaaagagatttggacaccaattctctcccaactacattaaagccgttgacaacttcatcacttcactagcaggatatgcattactctcgtttcttcttcaagtaaaattttatctagctatgctattagttgttttaaacctcatttatttataatttatacctatttacacctgatttatactctatagttactttaagactccaacttagtactcctgcaaattatatatggtaggtaaaagacaggcataatggaaacttgttgtttacatctagtggtcatataattcacattgactttgggtttattctcggtgcttcgcctgctaaggaccttcagtttgaactcgctccattcaaatttactcctgagatggttgatttcatgggtggttcaaaatcagacaactttaagcggttcattcaccttcttctgaactcttacatggctctcagaactcattcaaatcttataataactctcgtgaaactcttacagtattccaacataccgtgtttccggaaatctactctcatgaagttaaagtattttctaccctttatgaaattttagtcatgttttattaaaatttagtcattttcatacgcactacactatattaggagtaaattagtaatgaatttcgtaggaggagactaaggttgaatgacagcccaaatgaggctaaggagtatattatgcgtaaaatctactacgccttaaacagcaaaacaactaagctttacgatttcgttcaaagctatcaacagggaattgaacactaatttttaaatttaatattttaatattgaatattagttttatttaccaaattaaattctctccagtggcctaattccaataagctggaagcaagttctcatgacttctttggtgcatgagcacaatattaatcttgattcttgcagggggtccccaactactttacatttcgtataaaacgatgaaaattggacgctcagctcatacaaataatccgtcaacctatagaatatggtagtttacgggccgtgtaatatagatataagtttgctaactatgtaaataggtttattttggaatttgacagagcagtagcaattacctgttaatggctaggtctttatgtatttggtctagaatggaagggaattttaggaggcatttggccagagctacttcagttgggtgttctatcactaatttactcaagtcaacctcatttggtactgaacttgtcccattaacttccacgctatcctccactatcactggtctattatcactggtttctacattgttagtttctgtaccatcagcagttttagattctgcttttttgaaaatctggcatattcttgcgtacgagtagaacatgtacactgcagtgtttccacgcgggtcaagcatcttatcaaatgagaacttgtaatttgtagtcaccgaatggtttaaatcaaaatacttaactgaaccatatcccaacgcctcagccacctcatccaaatctaaacacaatgaatacacaattacaaactaatttatatcactaataggtaacgctaaacatataatacatagatatggttaatacttggaatgtttggatctcttttttctaattccagtttagacctccgaacagcttcatctaataagtcaacaagtttaacagtatcgcctgatcttgttttaaacttctcaccaagttcattctggaccattccaaatccaacgtgatcaattctcacattctcacaccaacctattggaattattgtacagtggatataaaaatatgacttggaagtaaatataaaaaggttacttagtcataaatatggtgttgtgaatgtgtaaagaggtacctgcgagttgtgctgacttgaaaagtttttgaaagtgttcagactgtccgatatcagtgacgtaaataatccagtcagctttaagttcgtgggttctgtatctaagacatgccatatctgtggaatcatagccaaacccgccatcacttttaacaagcattagaggtactggagaaccatcggtgaagataactagagcaccttctgactcttgagcgattcctctgtcctgtaaatctttgacaatttcagggatcatgtcattgtaaaaagactctccgaaaatttcaaatttaatgtcaagtctcttgtaaatcctgttaaacgagtcgagactaatgtcacagagtactttccagactaatttagactcttcgtctcctgattggagtttaactactctggaacggctcttcttcttaaactcctcatcaacatccatcctcaacttcgcctctttgtagaactttgtaaagtcacttatgcttggcatgttactcacaaagtctggatacttctcaaacatatactctatcaacatcccaaactgtgttccccaatctcccaaatgatttattctccttactttatatccaaaaaattccaaaactcgggctacaaataagtaaatacgacgtagtaatgttatgtataaatattttgttagataattatgtaaagtacctagtgaatccccgataactgtggaccttaggtggccaacatgcatttctttagcaatatttggtgatgagaaatcaatcacaactgtttctctaaacacacgttaaacttggttaaattgttagatattaacgaatattgtatggactagtacccatgtttttttgtggatttatctactgatggtccatattttgctagtgatctgatttcttgttcaatccagtcattagatagtacaaatgtcataaatcctacacacaaaatagggtttatatatattaccttgaggtgaaacattaattgatgaaaatgaattggaagtgatgttacttttgaccatttcagccagttcttgagggctatttacagataagtgatcttttgccactttaaacagcgacaaagcatcactccctgaaccagtaatataatagtatttgatggacatatcacagtaataatacaatatttagtgttaattagtcaataaaattagttgaacatacattggtagtctccgaattttggttttgcgacagaaacgttaggatgtttagcgaattcttggactatttcactggttgaacatttagatattgctgaagatagcaattctctaacatactgttgaattatctgtattcaaaataagaccatattaattaacacagcgtagactagtgtatataataatattataatctagaaataagaaattaccctcatattttaacaaattaaatcaagatctttaatggaaataaaaatggcataattctcaaaatatccttaaaatcagtataaaacaaacacattgtaatatctaatgatattaaccgaaacgacaagggatggtattttacaaatagatggaaatatggattaaaatatatttaaaggtgtggggaaattaaatttaaaatttatcaataaaatgattagataaaattataattttttcactgaaagtttattatcctcagcctgtatcatattgataatttggtatgaaaattttatatattttaagatttagtgtggtgtacctgttgattctgtgtgtttgtctccttattttctgacttctcaggctcaaatttactctttaactttttgacttccaaaccaagtgttttctggtaatttggagtcttcttctttacagattctaaaaatttttattattaactaatgtgtaggatgtgtataagaatataataatttaagtaattaccgtgaaatggcatatatacaggcgcttgatttaatgcccatgttgacaagtgcttttcattatcatgtctatgctcatacaactcctctgtactcaaattattcacaatttcagattaaataatatgtttaactcattaaataacttggcaattaatcccaaaacagccttatttaatgataaataaactataaataatcctatatagaataatattccgaaaataaccttcaagtttattgacctaaaagaaaaaattaattattttaaaagtactttattgtgtatttcccttttaattgcgaataataatgtgttcatctcagtgggagtgagtcttaatttctttgagggcataatcttgactgcgatatgaggcatttgtccctgatacccttggccgttgtacgttaaggctgaaagaccgcccatgagcattggtgtcagaaaattgccaatattttcagaattattttttacacatttaataattgttaaatttaaaccataaatcataacatataataatttaacactgatgtgtgtcattctctcaaaacaacgtcacatttcagttacataattttagggaaatgagattacatagattttaatatgttacaaaaattaataaaaattaatttgtggagaaattgagcagatgtgtgaattgtatactttacttctactaaatcttaaaaacaacaccatccacacttaattcctgttattataattatttatcaattttattaatattttttaatttttgtttatttttcattaaattttatggaaaatttttgttaattggatttatttaaatttatttacatttctcacattaagactgtagaatttttaaaaaattatattttaatatttataatctaaattaaaattaaacactgaaataataagaacatttgtatggataagaattctagccgtctgagagctataaatttgacaaagttacaggactcttataggagatatgttcgtgtagttccacgtcatttgagagtaaaggaattatctgatagttggcactcccgtacgcctgattataggttaaacttaacccactcgaagtggaataagaggttaagtaactggcgtagacttgttcaccgttgggaccgcatcagtgactcccagtgtgatttattatcagactgtttaaatcgtggcgatcttgaggaatttgtatccatttgtgaaggtagtaataaggaaaaggttgattttgacgtttgtgaccacttacttaaccaacacactgctgacttatactatccaataatttataagcctttctggtttaaaggtgatatcaacagtaacgggttccaaactgttgatgaaactacatttttaaccaagtctaaacagcttttaaacactctagacaaacctttttatgataattttatctccacctatactaacacgagattatcgtaacattcataatttaatattaatttgtggaaatgtttctgagtaagattttgtctggattacagcgaatgtccatattgaaatgtggcgacaacagtggagtgataaaaggctgtatcattggtctaggcaggaacaaacatggcactggtaagataggtgaccgtattaaagtatcagttcgtgataaaacttctgattgcatcgtcaataacaagaaaccgcggggtataatagtgaggaggaagaaggaaactcagagaaaagacgggatggtatttaaatttgatgaaaacgcctttgttattatttcaaacaataaactccaagccactaaaataaaaggaccgattctcctcgaaaccagacataactctaaatcactcgcatctaaaattttataatctactccctacacttgtatatttagttacacacttaactttgtatactaagtttcatatccttgtaatgtgtataaatgtaaatctaataccagatgattaagtgttaaagaagaatttagaggttttacagacaagaaagattaagggttagacctagaccttgacggactatagtctcggtagtcatcgttatggttatcaagtttatctttatccatatcaacgtcaaactggcgatcatcgtatctgggtttctcttccctgaagtcgtcccggccgtcacggaaatcctcacgatcatccctaaagtcctcgcgatcggttcgaccattgtctctgtagctacggtaatttctatccctatctctgtcatggaagtcgcgatctctgaatctacgcccgtccttagggtgatcggagtcatatctatctctgtagccgcgattgtcacggcgatcataatggcgcctcggtgatctgtcacgagagtacccacggcgtcgatcatctctgaaccttgcgggagatctagatctgccacggtagctccgactcctactcctataatccctaataaagaattagtctccaaacataatagataaatattataatataggttaaatagtgggaaatatatgctatggaaccttctggaacggtttctttggaaccttctcatggagcttggagatttcctccggtcttgggctatgcaacaggtgataacgctgccgtcgagttcagtgttatccatggcgcgaacggcgtcaagagcgtctgctttatcataaaattcaacgaatccaaagcctctcggtcttctggtattaaaatctagcggtaggtaaacgtctctaattttcccgaatttttcaaaggcctcacgcacaacttgagggcttgttgagaacctcaaattccgtaacaacgtagaatacccagtggatttttccatctgtactatctcggattatttttaataaatttgtcctatcaggttagtatgtggcaaaactcagaaatcaaaaatcatactattttcaaaccttaaaatttttactcgggacgaatttattctttgcgagatttcatttaaactctttctttcccaatgtctctcaagctctcaaacctctcccgcggcacaagtaatcaaacccttggccttctattctccacttctcaaactcgtcataattatttatatacacttttcactactttaacccctttactttagttcttgaaactttcttatttatgcctcatttatcatgaaatatttgagtgaactaggctactaaataactacatatatcttttctaatggagttgatcagattatgtctctgcttcctcatttaactggaagtatcttaattcatacgagtgttccttattcgccaccaccctcaaaaagtcacgcagctgctgcttcttcaaatacttcttcgttaaatactaaaataaatatataaaattgtttaccattatataatatatgtgctttagtggagtatgtgtaaaataatatctaaaataatactttgatgtatcttttggagaaaggaacttcggttgtgacgtggatcttgttcttctctcttgtaacaagtactttggttcctaaatttcctgtctttccatctacctttatcctgtcatgaagaaacttctcctataacatttttatttccaaatatacagttttttattttattaataattttataaaaataattaaaagttacaagtccagcggtgttgatgatattatcatttgcaggtccagtacagtcaagaacatacttgactttatggcctggaacaaccttcttttgtttactcttcttcttaagcagtttcatttatataaagattttagcaaaacggaaataaaaataaagagtaaacgggacttaaatataatataatctgggctataataaaatataaatcaagtatttaatatgactaaatcaagccaagataatatataaaataaagagtaaaataagtcattagataacgaactccccatctataggatggggaagcaccaaaacataaaataaacttaacctaaacaatcaacatattaaaaagaatatattaatattataacagatgttataataattgtctaattaaaataaaaacatgtgtttgatttcaataacaatattttaatgatttccaaagaatttattatttttacttgagattccacagattttcaaaatctattattgacactattactaaatctattattcctattatttattcttcatttatttgtttccatttaaggtgtttaaattttaaataatttattaacaattaataattttaattctacattattaaatcccttacaatttatgatttgattatgaaaataataatttttaatctttttggttttctaaccttaatgtgttaatttttgtttacacctcataatccttccgattccaactttgttgattctttcttaagttttcatttcttaaattatttttattttgtataaatatttaaagatgccgtcaaggtttgtttttttgcttaatttaatttttaggaatgataacgccaccgttactaccttaaagtcgctccctaatttcgaaattgagaaacttaggtactaaattactttatttcctatgagataaattagtttataatatttaaattgtataaaatgttaatatttaggcatctttttactgtccatgaggagcttggaattgaccctgaaaagattaaaaaaccgctactagaacttattaaacagaatcgttagtacttttaaccctaattatgtcttaattacctatcatttatcaataactttccttcagatatgtatccttattatgagcgtataaagcctaagcttggtataattgaggatgattttgagatcgagagttttaaggagttgaactcaaagacccttgccgaattagatgagaaaattgaattcgccgagaagaacttcggctcctctgaaattaaagattcgatcctagataagggcaattactacttcaaaatcggtgatcacgtatgaaattaactatttgttctatatttgtctacattcctcaatttttatttaatttttaatattatttcaggagaacacggtgaaagtgtatgagcaggctttggagaaaacggttggaattaacagtaaacttgagataatgctcacgattttaagggcagcgttctttttcaatgatcttccactactcgttaaatacatggaaaaagccaaacagtacccaatctactaacttattagttataccatttattctgtcattacctaatgttattgtagagatattgagaaaggaggtgattgggaacttagaaatcgattacacatatatgaagctgtccaattaatgctatgtagaaagttcaaagaaggtaatttttatcttattttattatattttagctactgaactctttctcgactctctttccactttcacggccactgaattaatctcacttgaagaacttgttctctactccattgttctctcattggtatttttacactagatttacctatttactgtagtatatatttacttaatactatactatgtgtgattagataacgatggaccgtaacgtgataagtaagaaggtattattatctagtgaagtggcacaagtagcttccccagggtcttgtctgtaccagctcatcagtgattactacaactgtaactataaaaactacatgaaacatctgggtaactttacacactccattttattattagttgacgtgagtaaattgatattgaaggaccgttatctgggacggcactgcagatattttgtacgtcaggctagactacccgcctataaacaatttttaagaccctataaatccgtcaccttaaaaaacatggcagacgcattccaagtttcaaccgaattcatcgaagagtatatttagtagtttttatagttacatagttagctaatattcactgagtagtcactaaagtgctgagttaaagtgtaaaatgtgtttagagaattggtgtcgtatataagtgggatgagattggattgtaagatagataaggtgaatggtataattgagaataacgtcggtgatgagaggaataataattacgtcaagaccataaaacaggtatactggttgagtcacacattacgtagggcgacctcctgattaatcggatccaaaaactatccagaatcatcgacatgtaattaatgttttactctactccagtaaatagaataagtagttgggtaaatagtaagagattaggaagaattaagtgatttattgtctacaatgttgatgagagtgttgatgcagtttcgccactgttttaaattgttgtaaagttgtttcagctcctcgttgccgaattcgcgatgtaccacgtggttaatgataactttcttactgttctggtctattagagcttccataacgcccttgttaatggcgttgacgatcatctgctcagcctcctctggcgggagctggaggttcttctcaatcatctcaattgggatttcagactgctgttgacacattgtactgattgtcagcagtgttagcttttccaccaagggtttccagtcaagtttaagttcactcacaaattccgcattttccttcaagtatttgtctaaatcttccaaatttcctctaataaagatttctagcaggcttattagaggcgcatatctagtctcttttagatgagccactgccggcatcagtaataactggtcaaagtataaaatgtcctcagacctcaaactacgtaccacaaacgtaactgtggccattacattctcactacaaattaattagtgtattaatttacgccgtaatatagtaatatagtgttagctagggtgaaatatatagttaaatggttaacgagttaggggagcaaactcggtggtgtatagatcaggttcgttgaggcactcaactctttttttccagaatttataggcgagatccgctctgttcagtttgtcaagttcctcagcaattatatgatatattctaatcttcgtcttcttatctatagaccaatccaccatccactcatccacctacatacgtattttatccaaatgagatattagtgctaatacctctttaacgatgggaatgagagtgtggaagatgttatgcttggcggcgaattcaagtatagcgatgtaaacatcaactctgagaggcagtgtggattctacagagttgtagagcatctggagaagtctaagtctgagttctaggaagctttctccgccttgaatagctttaaggagaaggtgccctgccttctcaatctggccagaacttgtaaatctgagctgtaacatgtacatcaacactgtaaaatactcctcaacctgcttcaaagcatccgaatacttaactcgaacctataacattttaatactatttaagtagtaatagtatatttacaggtatattaagtaatatatttgggtatcaatggtatatttacaggtatataataaaaaatgggtaaatagtttaatagtgtgaaaaatacttcagattctgctttggaggtgggatcgagtgagagcatgacggtagtgccgttggttttagattcttcgagaaactcaaagacggttaagtgttcactgagcagaagctcaaaaagttggaatgactccttgataatttgctcgccttcaacttcctggaactggtccagaagctgagcgtagtaggttgcagtcttgctgggacatctgaccttaagaatcccaagaacccagtcacccagcgaagccgaactcacagcgccctccgtgtcctgagaaagaggaacgaaagtggtcattttcacataaaagtattgaaacaaattattaaatcaaatttttacagaatattttaatttaaaaattgatagagagtaaaactagaggagaaatggaatcacaaaaaaacaagtttaaatttaaaaaattcaaataatttttatttgtttaaattaatttaacaaattttaatttttaaattaaaatatttaagaaattggtaatttgagtgattcctccgagtggggacggaacatacattttatcactcaattcaacatcaatataataattataataaataaaaataagtagaatgaatttgtgtaaaagaatcgcgttgaaaaattgatggcgatgatgaaattaatggtttaaagtagaaagttattgctattcttgtgtttcaagtttcttttccatctcagctcttgacaataatgcgttttccacctccggcgtcacattgtaactacgtatcccccaagtcgccgggtcaaaatacacccataacgctacaagttttttaccaattataattaaataattaatatttttatctaaaaatatcaataatattcctaaataatgtaaggttgtgttaaatgctataaaagcttgggttacattttttttgatcatgtttgaaccacagtttgttggattcgtggtatttccagagccttttgtagagttcaattgaggctaggctctggatgttgtctctgggcacattgtagaacacgtagaacagagtctccagtgacagttttgagacgtttccagtccgaaaatttagcgtttggccgtaatttaatttatgtacaaatctgtcgaaaaaaatcgattcctcatccaacgaatcctcaggatcagacgtactacacatttatatccccaaatactattactaatacataatactgtaattattatgtaactgtgtaattaatacataatactataattcctatatagtataataattatgtgtaaatactcttgaaggagtttatgtttgagagcttcggtatctaattttccggtgggaaggaacggtgatttatccgtgaaataggacttcattgcgtcgaaaatcccctcgagtccgtaattgaagtgttcctgaggtatattttgggggttaaccggttttggtggaggttcagtatcacgttcattttcaggattttgagcctctaagttgcttgttttatcctgatttgtatcagcttcaactaaattattatcgtccagagttatttcctctttgtcttttgaacttaattccctctttaggtccgtgatgtttcggtcaacgaagttgagattctcgaaggaatctgagacttggctgatttcatttttttgagcctcttcgggacttaaaatttcagaaggcaggggttcatttggagttgtttctacttcctccaaacccataggggctaggttgcgattcgtggctgggatttaatccttgagtagtgtgttgcggtatatattacagggtgtttggcaagtacttttaaagtacataacagcggatatttatacaattagctaattagtacaatagttaaacattagagtggaatctgggcccttttcggtttttgaaaaatgtacaaatataaaataacaaaattgtttgattttaaaacgaatttaaattaaaatagtaaagttgaaataaaaacgaaaaaaattaaatttgggtagtgtgaggctcgaactcacgacctcgggattatgagacccgcgcgctaaccgactgcgctaactaccccctcttagattccccaattttagcttctaaacttattaatttccactcttagagattctataagattataggtgttttaccccggaattctctgtgtttactgttatcactggattccacaccacttaatactgtgattttgccaaattcttgaagattcctaaaatttttccaaagtccaactccctaacccagattccacacctcagtatgtgcacataacacaaattctactgaaaatattctagactaaaatataaatagtgtaaatgtgactctacgtattctaaattggactaaaaataatagattgtatgaaattatttattgttaatgacgtcttggagtatgagttgtatatgatctgggagtgtaatgtttttgaaatactctgagatattatactgcgcttggagtgcctttagtactgtcttgacattagaatttggcatctccaaaatatatctcaggagatggtccttgaaatgattccacagtgtgcaaattgttattaccactcctttaaataattgtttatcttgccagcactgtttctggatcagcttcgggaatatcacatctacgattactttcctcgtcaatggcactttctgtacaaattgacataaaagtctgccgaacacgaagttgatattatcaaatgattccacaattagatacagcgacgatattgctgattccactgagaatcttcccagcgtacaatacttgatacaagtatccagcaacaatacttgtaacttcatataatctttttcatccaccggtgttaccggagtaacctctgaaactgtgccctgtggaactccagtactctgtgatactactgtggctagtttattacttatctgtgaagttggcatgttgtaaattgagtataaaaagtgttgtggcagcgagactttcggtgtttctatgatcacatccagcactttgattatcttctccttttcatactttctgaataaaaatattaataacttattcagttggtctggacttagaaatggcgacatttgtatcacatattccggcgtcacgtgcattttttccatcaataatttcatcaaattcttctccaaatccgttctctcatcaaatttaaacatcacattacaccaactcttcctcaactcctccaatacactctccaccaaactcatatactcctcattatacctataccaattgtgtgccagttaattacgtgtaaatatgagtaattaatgtgttaatatactcaattaatgtataaatatacgtaattaatgtgtaaatatacgtaattaatgtgtaaatatacgtaattaatgtgtaaatatacgtaattaatgtgtaaatatacgtaattaatgtataaataagtgtaaataaagttacttgatgatgagttgtaattcttgttggtaattggctagagtttgtgagcatttggtgtagaagtgagttcctggatatgaatttgccagtgcgcataacctgaaaactagtctagaattccttatacaacatgataacatcggttcaaagtataccaaatcatcttcagacacttccttttccacatcgtccattatcacatccaattcatctgagtcatcctgtggatttaatgtgttagcctgtggatttactgtgttatactgttgatccagtctctcaggttcatcttctactttatcctgttggtcattaacttccggagtgtcgctttgtaatgtagtgttgaaaaggttttcaacggcgtttttgatgaatttgctcgtttttaaactatttctattacacattaatcctacactttcttctatccacactccaatatcttcatcatcttcttcctcaggttcctctaactcttcttcttcttcaccctcaggtccaacgtcggacagatcaaacttcaataattctgtggatagagagactaattttgggggccactgccaaaatggtctgtctgaaaggtataaacaatcctccaccaactccttctcctcatctgacccggtaaattccctaagtttctgcacaaaatcttcatgaattgatcgaaatttcttaactgtataattattctttacattgtataaacctttctgagatgacaacagtctcaggaatagagaagaaacttggttccttttacttgttacgcatctgaggaatatggcaaacactgttctctttatgagtaacatgttggacacatacctaaagtaatctttgcatataactcgttcaaaatcagctttcttcgctagtgaagtgtgtttcagcaggtttgacactagtgagaatgcgagttttaaattcccctgtttctcagattttacccacaccactatcaaatctgacattttatcagggattttcggtaaatttaacacaaatttagagaatgtattcactgatacatcgtttacttcttcactttctgacaacttttcacacacgtacgacagacacaagtttacaaatttttcatattcttccatgtattcctccttagcaagttcagaatttacggaagttgccttggcgaagttggtggtatatgaaaacataatatactcattcaacacttccaagtagttgttaaataactggacattgttctgcctgttgacacagctgaacagtagagataagccgtagaactcactgtggtgtttaagtaactttaggaaatgtgattccgcgtgattaattaaagtgtactctgccaagtattcgaagaggtttttcagaacttctattctgttctcaaattgaattaaatttgagactaaaaagtgcttcagcacttgacttgcaaatttgtcataatttggtaatttaggcccaataacttcaaattttagatacctctgataacttgcgactgtatctatcatctgattcccaactaatctaacaaacagcttctcattcttccgtatttcatcttcatcaactatttttaatctactctccactagcttctggacagtttccctgtcactgtcaacgggatgaggggcgtcaggctgacggtcatcaggtttaagaatttcagaagtgagaaaactcgtgtcataggagattggcgtaatggtaacgggtttccgtttatagaaattatttgagatggaaatttgtgagtttttaaactttgagcttttgtaatttttcaccagttccttatcaaattcaaacacctgcgctgccgggtataagccaagtttatcatcaaaatcaactgacaaacttgtcacaagtttgtctgacaagtcaaaattggcctctttatccattgattctgtactatcaactcccatcatcgttcctctgtaaggttcacaggatactgacgggagagtctggaccagtttatacatattctccaactctagtccgtaacccctctgatttaccttatccaacaatacgtgatggtatttgtaacagttgttgaatgagaagattctgaacagaataggctcgaaaatcttgtgattttgtgttcccaacaatcgtaccaaagagtccacaaacacttcaaaatagtattccggataaaacccaatcagactacatgccacttcactacttaatactgattccactaggccgtcatactcattttttaccctttttttacctcccggagtgctgagtttattatgtttgtttaggagaatcaggagtaaatttactgattctgattgccatttatataaagtttcgtagataacagagtttggttcatctgttttaactcctttcacctttttcttcttatttttaactttactttctgcactggtttcggtggtatcaccggtccctggttgaacacactggtggcatagataatttggataatttgccagttcgtaaaataacattttaaccaggtttacagagtaaaatttcgtcctgttatgtattaaagttggcaggaaatgagctgagttatacttaacatctgagaagtcacagtccagtagtctcgtatgtaccatgaacctaatacaggcaaaatctgcaaagctttctggaattcttacattatccagagaaaatggtaaattttccaaatccttcccatcatcctcaggaaccttaccactatttggaacactgtcaaccaaattattaagagttgatgtgttatatccgttaggcaattgtgcactgtttgaatatgtggaattacccgtagttactgtgtgtttacatcttgtaatttgtgatttggagatggagtcgagtgagcaggtgagccgtacagtttccagaacctcatttgatgcgataatatgactaaagagtatgttaaaacagtcaaccaatgaaattaaagcgaatttctgaaccacaaaattcgaatcattaaacaaatgtgacaaatcctccacaagtattattgaatctaatgattattcagttgtgttttagaggtcaaattaggcaaataaaacttacattgtggatccaatcttaaaatttcattaattaatttacaaagtcgaactttaccatcttgcgattcagtcaactatttttacattaatttttagaaataattagttatttagtcatattagcggggtaaataagttgttaaagggttacttgtatttttctgaattcttgaaggttactttcaaaaaggtccctctcacaaactcttaaaaggttaagtatgtgccattcctaaagaatatgttaataatttatcaacattttaaatcattttatactgttaaatttagtataataactagaataatagaataatatgagattaatacttgagaagattctgtgattgagtttgtggattcttctggttctggttgatccatttaggtccatttgacaagatttataaaaataaatttatttttaaaaatacataaaaaaattaataattaataaattctcaacaccataacacattaatcataaaatgtattttttaaatgatccagattatttttataaaaccttggcgatattacagtcaaatccgaaactaccgagtaaatcttgaattattaagtgaatcttgaattattaagtgaatctgaaatgattaagtaaaatctgaaatgattaagtaaaatctgaaatgattgtgtgattcttaaattgagatgttaggttagggctgcggtttcattttgtttatcgtaaaagtatgagtaatcggttcttctgctcctataaaatttattttgttatgtagtgaatttggaactgttccgtaattaaataccttagaatggattatctgtgttgttgtacctgaggattataaaaacagctccgaagatgactaatcctacggcggtagcaactcctccaatagcaactttattggcctgtttaagccttgtagtagtcttcttcgaagtttcaatcttgattttcggcttattcttctccacgtcaaaggcgaagtaacagtttgaatccgcttccagcatcagatacttgtcaattgttcctcctcctgaaggcatcaattcaccagcttcctccctgttgctaccttcttttccgaagaaattctcgtcgttctcctcgtccttttgatcaccggattcctcaggctcatcatcgaattctaaatcatcttcgccaggcgctgatttcgctggtgtcgcaccttttctcactgataaatccaaaaattgcatcaaattccctttcactaaatttaattagtacagaatttttaccatataattgatattatagtaaagtgtaggacgggtaaatagtatggatttaccttgaggagtgtcatcttggagatcactgaagaagttggtcacgtcaacttcaacttcacttttcttgagttcgactttgattggccctttgagcactttgattttaagctcgtcattgagtggctcaatgaggtagagcttgacagcgttggtagggcatttgaaaccgagcgacttagcgtcaaagagtttattaagcttaaaggtggccttgttaatggtacttttgggctgtaatttatcccttgtactgaagtggagcacacctttctcagtattatttttgaacaagtctagggtcttttgtacctgtaaatgtgtgttatctaccacttgcttgtttctcacattcttgaacccttcaaatgaaagtaacaacacattgttatgggttttgtgtagtgttttaccgtcagagtagaagaagtctttcactttagataatacgccagggtttccccttctaggtccctcctcaggagtgccaagagcatctaactcatctgactggagacttgggtgaccacgctcagtcgtcccatagttaaggaaactcccgcccctctgagtgtttattgccgctatcgccaacaatgttaaatacagtcccaacactaccgatgatatataacgcattttcacaatcttattttcagatactaattttcacaaataattttagaaagttaattttagaaagttattttcagaacttatttcgataatatttccgttaaatgggtaaaaatgttcaagatcttgcaatcggaggtgtttgtaattatcataagataaggcccaaaactgagtttaaagttggaaaaaataacttaaaattcttaaaaacctttagttacttaaatacttgaaaatttacttgatttaaatatgatcttgagattccattgccagattccatttgtgcatttcggtgtatcaatttttacacctattagtccaatgtgtagcattttttcaactttttagaagtaaattaattatatagtttcaggattcttttttaatttcacaaaattgagcctttaagctcactttttacaccttggacgcaccagccaaatatcgcccagattccatccatttccccaaatattacacattttatacactatttaccatataaaatatattattgagtataatattaattctattgtgagttttcgacgtattgtaggactaatcttctcccgtagaggtgtacgttttttaaattttccattgcgagtttggcgtcgtttttggacatgaaaacgacgaacccaaagcctctgtgcgtgtttccagcggatttcggaatcctcacagtcttgacattggaatagtatttgaacagttccagcaactccttcttcgtcgcttgaaatggtaaattctttactattatcacgtcgttttcctcagtaggtcctgggtccttatgcttacggctactgtagtttgatatcgtttgtttattctttgacagttctaagcttatgattttagtgccgattactgtgccaatgcgtcttttaatcgcttccttcgcgttatttatgctgtcaaattcgataaatccgtagcgagctgaggatttttcctccaattttgtaccgtgaggcttgatgatttttgatatcacaaagccttttaaacctgaaaaatgcctagaaaactcctcctcactcacactctcatctatattactcacatacacactcacatgtcctatcctctcaactgctctttctggttcctcagccgttccattttggtcaacttcatctgcgtccacagtgtcatctgggtccaaagtgtcatctactttatctactacttcatttgactcaacaccgtcccgctgtggtccagaatcaatttctataccatctgattgtacagtgttaacattgggtaaaagtgattttggcactttctgaaggtataagggtaagccttggaacattctataggacaaagttctaaaggctttatcacattctgatttactactgaactgtactagcccaagtagtttaaaaggtgaggtagtaaacctcgtaatcttcccgcaggaactgaataacctgatcaagtccctgtcctcagtgtcatgaggtaagttcttaattagcaaaatgtcatcgtataaatcttccttatagtctgtgacttcagagtttatgccttggtccgataaccattttttaaccttgttgaggatgaaggattcggagattgccgcatttacacctgcctgctctcccctcagaatgtcctcagaagttatgttaagatttttggcgatggatttgattgcagagttaatgtcaaggtgtaaaatattccaaattgtcctgttctcaatttcagactttctctttttagctttaaactccgagtaactcgtctcatccactgatttattcttgtacttcttactcttgtcatacttttgtaaaaatttattagccaaatcattcgatttctcagtttttgcatgtgagactgtgatgattcggccggagaaaatggtgttattcttctgttcaatgaattccaaggcatcagactcgaaagtaaaagtcacaaagcacatgccacgggttagaaaagtctctatgtcatttccactagtgatttctgttatatttctctttgtcagcgggatgtggatttgctccaccttaccataaggttttactaactttcttatcatctcctctgttacattataaggtaaattaaatatcactactctgttcatatctatagcacagggtgtgtcgggagaggtaaaattttcattcttggagggaaattctgagtgatccctttgaatatcacctgagtcatgttctgaatcggaatcatcgaaggtgatgtgaacacgtttagatgaaacaccagctttcacaggctttacctcagttaccacctttccctcatccaccactactccattcactccagttatacgattatctatagccttagttataccatttttcactcccttgaccccttttaccccgttaatctcattgttagtaatgattttggagtattcgatggaaactttgcatgagttgaagtaggtgttgttgtagtggttgagaaacttggtggcgtcactttcggagataaatcctacgtaacaaatgcctttggagactcttttaacttcattatttacctttttctccttggtaaggaggcgaatgtcagacttagtaacgcccaaatctttacattttttcgtaaccaacttctcaagtgatttattatccaaactgtttggaatgttttttataattaatctactcctatcgccgtaaacatctggtgtcatgttaactcaaataatattaaaattccggggcattccgggaatttgggtaaaaaaatattatttccgggattcctaggataatttacaaaattaaaataataattaattattaaaaattttattatataaatttaaataaaaataatttaaataaaaatgatttaaatatgaaattattttccttattcctcttcctcacaagaatattcactccatcagttcatattatgagtttattgactttggaatattactttctttcacttttacaagatttaacaagcccaaacgttaaatttcctaactttttacttaaatataattatttatgttaattattacagttagttgttctaattgtgaaaatagtttttggtgaattctgtgactgttctacagtatacccgagtgattttagtgttgagaaacattttgaggaatttgaggcgtggcgcagtaattactttgaggggaatttactacaactgtgctcacgtttgccagagtcaacgggactctgatcaaataataattgacataactcagaaaactaaactttccagaaagaaattactcatcagtacttgtcccaaagcacttatcaaaggtcacttaacactctctgaaattttcaaccacaatcaaatcattcattccaactgtgacaacacattacaagtatcttcacattactcaaagagatttcatttagggtaacggaattgcattttcttcaatttgtgatttcgacatacaattcccatacacaacactaaattacctactggtcctactacacagttatcctcaggaattagtcataaattactgcctaatgttggattagatagtggagaaagagactgtgtatcacagattattgaaatttggactccttgaaaagtattaaccctaagattataattattacagacataagccctgtgctatagtactttgtagaggatttccaggtcccttttcaccttaaatatttgttagaccattcaactcgagagttagtgtataaaatttatcaaaaggctgagaatcaatttccttttattattttaacagattttaatccctcaggattaatcattagtctcaacttccataaaacgcccagaaccacttcctactgtaatttctacactatgccaaattaattacttattatttatataattttggggcagatgttgaggactgtggaattgagaatttgtactggatgtgtttgagcagtagcgagaaaatcagcggaatcaagtcaattctaacctcaagagacttaaaaattatacaaaacttaatacaacttgaaccagaaaatacaatttatgacccaaagtccgggaatagtagggaaaataccagtgaaaagtggaatcttaggcccgatttagtacatataaaaaattcaaggtataaaatgttaagatattttttagggaaattttagaaaaatttatttctgaaggttttacatatcaattggacgattttgacactctggaactccttgtcacccattcactcgacacacttgttaacacatttctcaacacacttgatgattccacagctttacaaactgtgtaggatcagtaacaaagtctataggatcagtaataaagtctataggatcagtaataaagtgtttaggagtaaatttcaaggttcaacttcgtttgtatatttcaatcttatcaaacttcaaaatcaattatctcacttcccagttgcacattatggaacttttttacacagattcaactcacccaatctatttccaactgtatcattagccactggaatttgtaacactaactccctcagtaacagtactaaatgtataagtacgttgaagagaagaaagtttaagataaagaagcataagaagaagaagcggaagaagcgctggtcgaggatgagtttgataccgtggcgacctgcccaggatctgaaacaaacataccagtcaccagccaaaataagaagaatagtaaaagaacgcaggagaagaaataaaggaaatcggacactccgaatacccagacaaagataaacataatatagtcactagtgtacgtagttaatatactttagaatattaaaggagttaaagcgcttatgacctcatcgaggttatcgcagcctttatctacacaattattactcaaccgtacacaagataattacgtaaataactgtgtaaatagtgtaaatagggcaaataagctaaataactgtgtaaacagtgtaaacagtgtaaatagtgtaaatggtgtaaatggtgtgaaaagggtgagtaacctctttgaagcgtgctatacattctttgggagtttttccgggcacttctgatgcgatttttcgccatcgaaccacgggatctaaatgcgatgggtacttcttcagtgcactctcaaacgcctaagaattgagttggtcaggttatgacttacagtttgttgtaactcgctccagctactcattgatactgtatccgtaccattagtgctgtggacactggtggtgcccgtggtattgtcggtgatattgttagagatgagtttggacatttcaatgcattgtgctgcggttttggtcttgacgtactttgagattaagttccatctcccaggtgttccagctggatttatctccactcccttggataatctttttaagtcctcttttgtccattccgtaacggcgctaggtgtcgtaccaactgattcagctctattagacacagtagtgcccacagtagtacccacagtagtacccacggtagtacccacggtagtgttggattgagtaacactgtgatcaggagttggattaactttgagggaaatttgtccgaaaagtgctgaaagttctgattcctcagggtcgctgagtgccatttccctgagtttgggatctaatagcttaagatcctccaagtattcattgtctggacatctgtcaaagttgaattctatcttcagaatgtcatagagtttcgtggaaaatgacttcatttcatcgtagtctagcgtcacaagcttctccaaagtaccggaaatctcacccaaacccgcacatcgctgatataccatccgcatatgctgacgcctacaaccattttacaccgtaattaactataagtatagaataactatactaagtataggataactatataagtatagagtaagtatataggtataggataactatataagtatagggtaagtatataagtatatgggagataactggggaactagtgtggtttggtattacaattttttggtgatttgtttttggaatttgattttttccgtgagtttttcaagttccagtcgttgtttttccttttcaagttcaattctcctcctacacaattgtaacacattagtatttggggtacagttcaagtaacttggcctcctgcgcctgcttctgctttactaatttctcatgtcttattctatcctgtcttctctttattcgcgggtcactatgtccaatgtgtgtaatattaactgtgtgtaagtgtgtaagagtaactaactgtgtaaatgtatgtgtaaatgtgtaagtgtgtaactaagtgtgtagtgtgtgtatactattgtaaggaaagatcaatgagtttttgtattcttagttgttcttttttgatgagtttcttttgtactttgaggttttctcgttccatccagcgtttctcttctctgctctcggcgtcttcaagtaagtgtggcgcagcgtgactaaacgtacgcagagtctcaaaacaacgccaaaactcataaaagtcatccacatactcatcgtcactctcattgtcacccaataacggaacaggcttcactctggaccatctaataccaagttaacacatgcacaccgtaggtatatttttggtatagtaaagtatagtatagtatagtatattatagtatggaatatagtaagtatagtatagttgggatatagaaagtgtgtgtgtggtacctggagttcatttggaagattggtccgaagaggaggaagaaatcttttcgtttagcttcttcatgtgttgggatcgactcatcaaacggtaaattcgaatcatactccaatctcatatcaacatctacacacataaaacactaccgtatagtatagtaactctatggtatagtatagtggtaaatagtatagtatagtaaatggtatagtggtaaatagtatagtagtaaatggtatagtggtaaatagtatagtggtaaataagtttaagtatggtaaaacggtaagtggataccgttgaggatggtgaatgcgtcttggagtagtagaaagagttcagatttctcctgtctggagattgtggaaactttatactttttttcgtaatctttgagatcttcgggtactttctggttctggcccttgtcagggtgtagtaacaggactaatctccggtaattggctttaattttattaatcccgtcggagtctgtgcagtttaataattcataggcgtttttctcctttgcgataaagttcctcacaaaccccaaagtctttatgctcttaaactttttatcacgtttcttcgtggtttcctcgtcaccggactccgattctgacgagggaaactccgacaataatattctggaccaaattaacttgtaaaagtatgaaaacgactcgttcttctgggaatactctgagaactgttttacaggcgctaaatccaactccagaaactcaaagtcctccctcttactactcccatcaacctcaaatatttctatcaccaaatttaacacaatgttgtaattatttcaatataattattctaatataatcattttaatgtgataatcattttaatatgataattttaataaataatttgggagataaaattatgtatggaatacgtttagggttgatgttgagtttccattctttgagtaggaagaatgtgaatccagccggttctacggttttcgtgtgtttggaagactttggtgagatttttaagccctggttatggctatggttacataatctcaagtagttacacaggctcatcgttccgtaatttcatcaggttacacaaaggaatctaatcttgcgataaatcttcaaattaaaggtaataaaaatcaaattcaccaacattaaaattaaaccatccaaccacaaattttgtacaaattaacaatctacacgccaccacgacaatgttatttatttaaataaaaatattcaataaaaaattaatcaattaaataactttttaatcaattaaataactttttaatcaattaaataactttttaatcaattaaataactttttaatcaattaaataactttttaatcaattaaataaatttcaattaagtgtaaaatttatgatttttaattatattgtgtaaattttgaatttttgaattttttactcaaatcacctgattcctcaatattatactgtataaattaagtgtatagtattagattaggggactaggatgctggtgggatcgcagtcgttaccgagtggatcgatgttgtttggtttaagtaattctacgacgaggtatttggagcatttgccggtgatttcaaagtttagccagaacagttccatgtccagaagtccgtcgtttaacacgtcttggaagtcaactgtcttctcctgcgtcttcgccaacgttactcttttctcatgtaacttgtaatgatccgttaagtggaaatctgtgcttattgttcccgggggactcaatgtcaggaccacctcatttgtacaactggcagcactatcactaaatgattccctagaggttaatttaacttttaaacttttatatattttcttttgcagatattccacgtttccagttgcaagacattggactatcctgtacaatctgtcagtattactcgtgcctacacgttctgggaattcgagatccaacactgtcctatgtaatcccacgggcttgtcatttagtaacgcagttttatcctcattgaatagtttcaactgtttattattatttctgtaaggttcttcaaattcgaacatcgtatgtaaatgccctgccagtgtacagtgggaaatttttgcgattagaattagtaatacacccgagtaaatcattgtcaatgtgtaaggaattggtacagtaatagatttgttagcgcggtacacactagcagaatttacacattgccagactagtattaggagtaaaaattaaaaataatatttaaaaagttaagatgtggaattgtttggtaattttaccaatttttaatttattgctaggggcaccataccaaacatcaaatttccggaaattcacccaaattccatccaaatcatttgaaaattattaaatataatttaaaataattaaattaatgaaaaattgtggaaaattggggaaatgaaaattttttcaatttctggtaaaaatgacccaaattgccaaaatatactcataaatatgcttaaaatatgaataaaacagggctaaaatggcctaaaataagtgtaaaatagccctaaaatgccctaaaaatagcctaaaaatagccctaagataagtgtaaaatgtgaaaaataagtggaaatggagtagattgagagatttacggcttctagtgaagcctaagaaatagaatcgcccgagattaattgacttgattgttttaatggtgtttgcctgtgaatttggtgacggctttggtgccttctgagacggcgtgtttggcgagttcgcctggaagtacgagcctgacggcggtttgaacctcgcgggagctgagggtttccttcttgttgtacttgcagagcttgccagcctcagtggcgagcttctcgaaagtgtcagtcacaaacgagttaagcaccaacatcgacttctttgacacacccgtatccggatgaacctgcttcagcaccttaaatatataagtactgtaagtctccgaacgagccttcttcttacccttatgcacacgcttctttaccattcttgatctataccactatttctcactatttttcactattaactaaatttcacaatattaaacaatttttaacaatttttaactaaatttcacaatatttatctaaaagataaaaatttttaaaatcgcaaaagatctcaaaattaataaaaataataaaaaaataaaaataagtaagatgagttaaaaataggaataattagctggaaaatagtgtgagaatttgtaaaactaacattctgagtacgatagtgaaaaatatcaagtgaatgtggaattggtggatgggaggggcacaacaatttggggcatctgagacacatttcaggcacaccatgacaccaagtctaaatccacacttttctcccactcccactcacacattcaatttatttattttcattattttacaatacttttgattcgttgggatcgggatttggtctggagttgataccctcgggatgctcaggattagaatcacggaggaatatcagggaaaataatttcctccaacacatttcatacacattttatccgatccacagccaaatcccagatttgtcataattcccaaataatttccaaataattttaaaataagattaaaattattagtaatatttaattattaattttttactgaattttctggaaaaaatacaaattccagcaacaatcttaaaattatataaaattaaattatatatataaaatacattaattatttttacattataaattaattttatatacgtattttatatataaatttatatgtgaattaatggaataatgacttgtattaaagttaatcatggcgatgtactaagtagcgtaggagatgatgattccataccgtaacccatacacacttttcccagataattgattatttagttaattcaatgttattttgttaaatctattgagatgattgattttctcaaattattcactaaaattgagtaaaatgagtaaaaaatatgtttagggatgtcttggtgcaggatagtgccaggaatccgcacgattccggcgatgttgacttggaaaataacacattcgaaaccttaacactaaacctcactcagaacataaaaaataaattaattaacactgaagatataaaaaataagttaatttatgagataaataaagattgtatccctttggggtgtaaaaatgcgagattaaatggtattaagcctgaggaatcagttgaatatttgaaaaacccacacgaagaaatttacttcgaaaggtgtgttaattgcctgaaactgctcaaagcagaagaaaaaaacggggaattaacacgtaacactgttgaacagtgcaataattcaacaaattcagttgaaaataatcaaactgttgactcactcgggcctgatttctggtctgattaccacaaatcactcaaaaattcaatcaatcaacagaaactccaagtaaccaacacaccaacacagctaaaattaacttaattaccccttaaatatctctaaattaccccttaaatatctctaaattaccccttaaatatctctaaattaccccttaaatatctctaaattaccccttaaatatctctaaattaccccttaaatatctctaaattaccccttaaatatctctaaattaccccttaaatatctctaaattaccccttaaatatctctaaattaccccttaaatatctctaaaatagccttaaattactacttaaacaatgtaaatagaatgaaatttgtgttagttgggagatttgatatcggagtgttgttacaaagttgacacgaaaacactttgtgcaaagtgtaaatacaatcacatcaagcattgcattgatctttccaactgtgaaaacactgaggaaactgatgaaaactgtttggacataacagtgtcacatgctaagtcaagaaaggtaatagactcgtttacggtaaatttaacaccagagactaataacaaatccattacgaagtttgttaataatattaaaatttccgttcaatcgaatctcgacggcactatgaactattataacctcaccaataccccaaataccccaagtaaccaccgagttaacagtgtccagagtgacgagtttgaaggcccggagggccttgaaattggtagtaccaactcctactcaatgaataacacatcaaacttcaatctcaacaattattacacagatgatcaagacaccgagagcactcctgagaccactcctgaccctcaggacactgaattacctgaggtagatactgaagtgtgtagattaatagacttgggaataaagttgcatgcgtttaagataaataatagaggtgtaaatttgccgttatttttgaatattggaaaccctgagagtatatattcaggccagggttttgtaactggggatagtattggcctgtttaaaatcgccgtagttgaggcctttgagcctaaaaaatcactcctagacactgtacggaatgccataccatttgatctcagtcactcaaattgcccctgtaaatgttccaatcacaactcctgcaaacccttcactaccgcaactattattcaccactacaatactgatcacagtagtaatggtttaaacaaggtgaacgaggatggaatgggtatatttaatagtattttgaagagtatagtgaggtttacggggtttccactactaaaccctgggacctccaacactacccctgtacccaacatgacctatgtaagggaaaatgtatgtttgtttcatagaaacttgttgactgaagtggatagaaagagatttggtaaggatatttactgtcggatgaagtattttggtagtgtgagtgctgataagcctgtgcgggttttggaccattcacctgctggttcaagggtttcctccttttttaacggctactatcagcagctgttatgtgtttcaggcgaggataaacctgaagactgtgaccatttaaagcataaatacacttttattatccggtgtctcaaggggaaacgctatggtaggaattttaccatcctcaacaccaccagcggtgagcatttatgcctcgatttactcactcatgagctcagatttgccagagaagataaattcagtaaacacttcgttccagcaatttttaagattttaccactaaaaactgtagtggcaggggtaataacagatgcgttcaactgttattacacttactacagagttgtgtcacccgcagggaaagggtttgtgacggataaagttgcagatgaagtagttgagagagaagttaagtttgatgaggagtgtgaatctgaggttaagagagagccgttgtgtcccaacagcatgtcaacaacagatcaatacattaatatttcagcttaatcttgtacacaactttattttatacttttatttacgttttagtgattaagttgtgctattatttatgtaccgtgagtaatatacaaagtataatatagtgtgtatatgtatagtattagattaacacattttgaacttcaagtaataagtcactacgtaaatttgtggtaaacagtgatttaagattatgtttagtgatcttatgtgacttttttaaccagtaacaaagtgcattccaggtagtcatatcatctgtgggccaactgttatgactgtgtcttttatactcagttatgtatccctgagaataaaatgttagtaatatcatcaggattgtagaaattaatgtaattggtaacaaaaccttgcagtatccacacatagcttaaacaatttctcatttttatttgtgtttaaatattaatttgaatatttcacatttattgttggttttaaagtgtctgagaacttattggcgactcctaaatatggccaactcactccacgccattactgacatattactaatccaaatcttaatccattattttacactaataatatagtttattcccttgtaattgtcttgacactattaatagcaccaagaagataattttgcttacttaccaacaactgagattactatttactaaaaataaatcataaagtataaatgcctttagtatattaataatatagaaaatatacaaatgtatacaaatattattaggaacacatgttactagtataaatatgtgtatgtgatagaataaaatcaaatgttgagttatgaatgatttatttgtgtctggtaatttgtctatatttttggccacttttcttaaataaaagtttatattctctgaaaaatagaaagacgtccaatcttatggtaacaaaaaactttgttggatactctttttcatcagtttttttccaaactaataatttattaattataatttttctacattttacgcctggcataaatatatatgccgatccaccagtttcattagtttccacagtgtaatgatgactcgttattaacttataatttccccttgaatctttagtgaataattctacctgtgctggtttactgcgtgaacttgctcgccacttccctctatcaaacgtcatacgcaaaattgagccctcacgaataatggttaaaacgttgtcaattttattatgaattagttttgaacagtaaggccggccaggtctatgttcataagccgtcacgccatcacaaaccacaagctcaagatccactttaaattcatatttttcttcttttctatacttaactatcttcacataatctgctccagtcattaaaactaaattgccttcagtaccttttttaaagaattgaattgtttcacattttcttaaaggtttatcataaggtttaactggttgttttacatctttttcagctgcatgttcgggggttttaggtgttcccggtgcatcctgaggtttggtatcgtctggtaattcactggtttcccctgtggtttcagttacttcaaaattttcttcctcttcactgtcactgtatgccactaggcttaggttcttgtcaccttgtttatcagcacatcttacatatacaatcagaattacgattaatatatataaatttatgccggacataggtcattatgagattaaattatattatttcatgggggatctggaaattaataatctcatactttcaccaatttatcacttgcaataataaaattaatcagtttcaatttacaacgggtcatatgttgagaaaattggacatattaaataatatgtaggtctaatacacattataatatacatatctatagtgtgtaacagtataatatattatagaaatctaaatattatgttattttgttattaatttttctaaaatgaagtatatgagtggtcctttaaaaagtataacaaaatacacatgaagataaagtatagcattattttcatggtaaaattaatcttagattgacaggctttgttgggtgttttctgtcaaattaatgcatatctacggggtatcacagctacagtacacacaacagcaacagaaataagagttgtattgtcagttttaacaccagacatttacaaccacagtagtcttagtcttagtattaatattactatcttattactatcatatcacactactatactataaatatatatgtatattaaaaattatgtatattggtataattgtaggttttgttgtggttcgataaatttagcaaatttaccattttcagcccattctctgggttctaggatgttcagatgtggtagcttatctatcctaagtccccagtccataccaacccatttcttctgtattagtttcccttgtacgtaatattccaattcctcctcaatcaagtcgtaaataaagcctttaaggtattctgtgccaatgtcatgtatatacgctgttttacagtctattaccattgcacagattttaagccctttattaagaatatactcaaaacagcctggatatattaattccacactatataaacttctacccactaaacctatcatattacctataggataatgatatatcttaatattcttattcatcttatgctcctctatttcccaacctcctcttaaaccacttggtaaattagttgtgtcaccactgtggttagttgtgtcattactgttgttagttgtgttacggattaagtgattataatgtagtgtgatgacagagttgtaagaatcaatttgtattctattatccgattcgtctattaatagtgagtaaaagtattcggaatcgccttcccagagtatattattatcaagtgtaattcttaaatctgtaattacccttgtaaaaataaacttaaaagcaaaccacttgtaatttcttatagtaatgtaatctgaatttgtcatctcaacgtatttctcgttaaccagtttaaacatcttaattctgggtgcagaatcataatgtctactggtgtcaccgtaatttagtctaaaactgttatttaccaagttgacaaagaaacctttcggttttctggttataaaattctcattaaaacgccaaattaaccttcccatgtaccaaacctccttacactccttcttaaaataaaacatataatcaaacatcctcaattgatattcgtaatcctttccctctctcaagtcaatgtcatcacgacataaactgattcgatataattttattctatcgtcagtgatatctgtccacagtatcccattaccctttttataaaataatttataatcatcttcaagtaagattaacatgtatctctccttcttttctgagatatacactgtactggaacctgcagactcagatgtactatcagatgttgtactataagatgttgtattatcagatgttgtattgtcggatttccagataacgaacccttcctccgttacggaggtaaattttttacctaaaaggcagttataagttctaaaatcattcacaaatctatgctcaaattcggatgtagatttctttatctcaatttcaagctttactccgttactaccgaggggttgagcttggtaactctcaaagggttctaattctgtatcacttccaaatcttaaagacataacttttactgagttaaattagttaacataataattttcaagagatctacaaagatatttgggaaattaaaataattactggatctagcacctgtacatccagatcccaaattactatactataaaatcttagtatactataaaatcttaatataccattgaaaataggctaaataggctaaaatatacttaataatacggtgacaaaattgagattagtgtagtttggatagataattgtacaattcgtcgtcgggagtgattggatgttctgtgatatcccatttattccctttattcttaacaatgagatatttattctcaaatatgacatatctttccctttttttctcatctgcaatgcattttagtgggtatggttcccctttcttatgtttccagatggtcttccttccatacttgattgtcttgacgtaatcactgaattctctaactttcatgtgtttattcttctcattcaacggatcttcaaggtctaatacgccattatctccatctcttccttgacctcccagcacatagtgacatgcgtctattctaatggacttttcagttattgtatcgagaaaaaacgagttttttaccaagtcaaatgatatactttgaggattaaagttatctaaatcacctgtaaagaaccagatgggcgtatcattatacttgatttggcaacacacgaattccaggaaaatcctgaaaataaagtccaccaactcaactttacagtctgaaactttaaattcagccccttcatggtctaataacgtgagattatccacgttatgtctcgtacgtgttatgtccacccacggcttattcttgccaaacctgcaatgtaacaccggcctgtcatttaccaactttgccttgtgctcatactcttttcttaccattttgaaataaatttacaatattaaagttaattcaaactaatctccgggattcatagggtgcatgcagtttcaccctaaacagctagccaattctacatatcacagaataccataggatacacagtatctagtatatagagtattatatactcttgactatatataatactatagtatacccggtatactatgtatactatactacgaagtatatacagtataatatatgtaatatgtgtagtatatattgaatattgtgtattttgggtattaaattcgttttcgtttattattgtcctgatcttgttctgtggatttctgtgtgttgtcgaggttggagtgtcttgtgactgtggacttgccattgatgaacttgaccttgaaaagtatattggcgttggtgaacatgccctccttgaggctgataatgataaactgtgagtactgaaactgctgtttgaccattttcccaatgttctgagtatggcttaggtccagcgcagcgtcaatctcgtccaggatataaatcggcgctggttttacctttaacattgataaaatcagtgccagtgccaggagtgagcgttgtcctccggaaagctccgctaacgagtttttccaaacattgttaaagcagattttcattactatgccggaacttatgtccttaccatctgacgccactagtttacaagtggcgttgctaagcaatagtgagaatatctccgcaaagtgtaaattaacgcgttcaaacatttcatcgacgctctttttcttcttaatgtccaattccgtgattgttttttctattttatctcggtcattttggactttactcagcttcctcatgaggtcgttatattcatacaataaatcatcatacatctgctgagctttctgattaattcttctactcagtttttcctttaaacgggttaacttttctaatttagccttgacatataggagatccgggttgtccaaagtgtccaggctatcactggacccggtgttaccactgggtaactcaccgtttaacccactgtttaactcactgtttaacccactgtttaactcactgggtaactcagtgttcaactcagtgtccctgtgtgaaacactaatacttgatctgcgagtgaattgtatgtcattggggtcagattcagtgagaaatgagtgttcccgctgcagtttaatcaccctgacattggcctcgttaatgtccttttccacagtttccaagtcatactccagctgttttatactcaaatttatctcatcaactgttgataacagttggtctttctcttttgtcgcagagtttattgagttttggacctcaattacttccttgttaccatcagttagttgatgtgtcagctgatcgatttctcgttttttggactcaatttcctcatcctggccctggattatttgattcaaagtgtccaactgtgattttttcatgtcgagttcagtttggtttgatgttagttggtgttcgagtgtgctttttttaagctgctggtccatgttctgttcccttaaacgttccaactgcacacttgacttttttatgctttcctttaatatttttatctttgactccaaatccactccgccagccctcacactcaacgattccagttcttctctcaactgtgtgagtagtcctgtgagttccccgactctactgcgtttaatggttaattcctccttggaattgtttaatttggtcaatgtgttgtagtattcgttattttttagtcttagttctagtgatagcaagtctgaggtacacaactcctgtttactctttaagtcatacagctcatccagcataccacggcactctgtaacgctatttctcacggtggaaatctgttgatctgtgtgtgagagttgtgtgtgaagttgttccaggagtgtgacggactttaaaagttccgtgaggtatttattcccgccaccggacattgtgcctgagatgtcatatttatcaccttgcagcgtggccgttggaaatctcctcttcaactccttagaatacgcaattttacgcgcatccgcgtcattactgcaaaagacacaattccctcccacatactgcactaacctcaagaatctctcgtcatactcaaacacctcccagtatcccagcactccacggttcacctcagatgtactctgtgcgtgaatatcatgagataaaaagagtttaatggattccaaatcgtgctgtgtgagaagatgattaattttaatgtcatttaggggtatgatggtgatttttttattactttgtgagaggttattgaacttaaaaatggatttagcagcttgtgaatcttgggctactaaataactaaatttataaccaatcaacacatgaatcggtatcgaatactccaaccccctctcactcaattttagtatctcatacacctgcccaaaataacgggggtcactgtctggagtgttaccaactctgtcgggagtgttaccaccggttctaatgtgtactgtgaatctattgatgagttgttgatgtattgagatttgatgttgtagttcattttttttctcgtttaattggttgatttgagagttcaaatgtgtgattgggtctccggagccaaactcgctaattttcagctccaacgccttgattttactgttaatttccagttttttagatttaagattttggatttcagtgtcaaactcagttctcgacgttgcgaactcttgtaacttggtctccaacttgctgatttcagtctccaaatgtgtgatgacgcggttggtatttgtgagttcagcctgcgttgctgagattttagaagtcaattgtgtaatttggccaactttaccgccggaatttgccaatttctggagctcactgagtttccttttatcctgttcaacctgttctgcaaactcttttaacttgtccacagctgaaaattcacttagtttcgctgtgtaatcggcgatttccagctctaaatcctttatgtactttagtaattctctagactccttttcacttattttcctattactctttagcttactcagctccttattaagctggtcaagctcattattctccctcgtacaccgcgaattcaattgggccaactccgattccaaaacttctaacttttgatttaacgagtggaccaaggtttcagcttcccgtttacttgataatttcgcggtaaattcccgttgtttggtgttgaatttatctctgagggtgtttactaattcgctaaaatgcttatgctgtagccgtaggtatataagtttatacttgtcaaactcaactttaacggtgttgtagcgttggaaatcttccttgtcacttttaagcttctccatcatcggcgcaatgtcatctgtgataattcgtctgatttcttccattttctcgtctttccgtttaatcagacgtagtgctacggttttcttattctcgtacactcttgtgccactggcctcctctatcaagtctaacagctctctcggtttcatattgactactttagtcactctcccttgcataattagaaatcttgcgttattcacgttcatactcgcagtgtcgtaaaagtcaaagatattcttcgcagtcgccgggtgattatttatgaaatatttattcttaccacccagggctatttgtcttgttattgttatctctttcatatttctatagggatgcattagtgtaggcatgggaacggtattgttgatgattattgttactgtggcgcgggttattccggcctggccttgtttatatattaactcgtctaacttgttcgcgcggactgtggagaggtctgagatcccaaacacaaaacacaacgaatctaatacgttagatttaccactgccatttaaccccgttaccgcgttaaagtgagggtccaatggaccaatcacagtacgagttgaataactcttaaacccatccaatatcacatattctatgaacattatacatagaattaaaatttaagcagtagggagattacggaaataaatttctcatttagtttgagtaatgtgtaacgggttagaattgtggaggatcaggaaaaaaatcaatttcctacaaaactatgaataaaatgtgataaacaaatgtttaataaatttggaggggagggtgtggaaaatttctctagatttagcggttagggatggggtgacgttgatctgagaaattaaggaatcattaaccgttttgttatttatctgaaattaagataaatatttcactctacaattgttaattttgtcaattctctgttgtaaataattttgttaattttctgttgtaaataattttgttaattctctctgtaaataattttgttaattttctgttgtaagtaattttgtcaattttctgttgtaaattatacacttcgccaaattccacagtattcctcaatattaacccaaatttaccaaattctgtaaaatatttttgttccccaaattttctctaaattaatcaaacttctctaaattaatccaatttctgtaaattaatccaatttctctaaattaatttaatttctgtagaataatttaatttctgtagaataatttaatttctgtagaataatttaatttctgtagaataatttaatttctgtaggataattaaatttctgtggaataattaaattgtgataatttgttggtttaattttcttgtaagataatgtcgttttcatcgaattcgagctcgcagacttcaataattgagcctataattcaactcattaatcccatcgatttcgaagatttcggattcttcgcagtctcagcacataccgacatcggtacccccaaaactacacattctccccttaatttcagttatttcgattaatttatttttatcttaattttccggaattttggggaatttttcgtaatttcggaatttttctgaactttccgaattttcctcccctttacccccaaatcaccttttttacccctaatcaccttttacctctaaatcaccttatttacctctaatttacgctaataattgtgtaggaaatcgtaagagtcaggaggaccgttttttgatagttccgaatctcggaaatgataggcataagatctcatttttcggtgtgtttgatggtactgtgggtcacttctcctctgacactattcagaggattattatcagacacctgactgagtctccagcctgggataatctcatggctgcgctggacactggcggggatatccccgccagagcctcagaagccgttttcaacatgtacaaaagcgccgacgaggagttactcgcactctgctccaaacacctacaagactacgcatcaaccacaagcgttaccgttctcattatcaacaactacatcgtcattgcacatctcgtaacttctcacacagtcttacatcattacagtagttaatagttatctacgtagttaattagctccctctcccttcgatagttaattagctccctctaggggtatataataagatagctctctctccctatatattatgttagctccctcttggggtatatagttaattagctctctctccctatatattatgttagctccctctgggggtatatagttaagtagctaagggtatttaagggtatagttattatggttatagtattgtatgatgtgttagggagacagtagagttgcggcatgttatgagtctggggaaagattaacatcgaaattcctgaccattgatcataaaccaaataaccccgaagagaaaatgagaatcatcgtatctccacatacttatcctacctatcctatttactatacctactttaggtatcttagatatagtagtggtatgattggtaaatagtattaacataggcttcgggaggttcggttgagtttttgtgtagtcattcgaataatccgtttttgaggggcggtgacttcaccatgagaaaagcccgcggggatcaacccatgcaactacaatactccagagccttcggcgtaatctacacactacaccagctatataccatcttaatagtatatagtaatattatatagtaatatagtaataatggtaataagactgtaacaatagggtaaggacttgaagaggtacggtttgagtagtaccccggacataacagtttttgagagaaacgacactcacaagtgtttattactggcttccgacggactctgggatatcatgtcatccgaagaagcattcaaaactcttctcaaagctcattttcaccgtatcacacaccccttacagtatttagtatagtatagtatttactatagcattatatagttatttagctccctcttctctaagtagctccctctaggggtatttagtatagtatagttaattagctccctctcggggtatattattagctccctctaggggtatatagttaagagtatagtaatagtatttgattgtgattagatcagaacccaacgagggtattgattgaaaaggccttgtcgaagcagagatcaaggtctaaaaacgcagataacatcacagcagtcgcagtcttcctcaacctcaacaacatctcacaccaactctaatcacacttcattacactgtctaacgcattacactgtctaacacattacactgtctaacacattacacttcattacactgtccaacgttacgcaatcacattacgcagtataacacagtttctatgtagtattccggtgaaaaacctgaaagtaacattccagctgaaaaaattgtaatattattctcttccactaaatttacattaatttattatttacatcaatttattatttatattaattagttaatttggtgtgtggtagtttattgagaatctttcgcaaattatgaaatttcgtcaaattttcgctctattattaattgtaataaatttattcattatataaattattttacattagttacgtattacacactttgaacatgtgtagagcttgagaattgaggagataacttgtgtgaagagcagattaaaatttacgccgagtagtttagcgctttatcctctagactttcaagtaataattttattattctactgattttcaggacatctggcaatcctcagaacccataccaatcaacatcaactactccataccgtaattttcaccctgttttacacatttacacatttacacatttacacatttacacatttacacatttacacatttacacatttacacatttacacatttacacatttacacatttcctcactatttacacacttttacacacattttacccttatttactcataatttagtactaatttacttactatttagtgctaaattagttgaatttgtaatgtttagatcgtttggagttcgcgacttgaagaggaaattaacggaattaaaaaagagcacaggtaataaaaatttattaatttgtattagaacttctgcgtgagaaggtaatgaaacaattcttttagtgtgtgataggctagggaaagtgacagtaatagaaaattatcccaaaaacttgaatctaaagctaactcactaatctcactcattaatgaacgaattcacctctcacaccaaatcaactaatttcctcccattaccaactctttactaagtgttaccactctttactaagtgtcaaaactgtttactgagtgttaccactgattaatagtgttacggtgggaatgagtttggacgtgtataatttaactcctaaggagttaaaacacttgaactcctcactatcaaactataaatcaagtaactttctacccggttacttagttactcagttactaattctgcataagttaaatgatgtttagattgtctgatgaaattgcataatttgcagagggtgaaccataacttaataatagaaaataataaactaaggcaaagcattaaatacggaatcaagtaacgaatttacacattattctccttcagatcagtcacacccaacacactaactacagagtctaccaattctactcaatcctctcagtttacacacagtaataccatacatttactgtagttacgtatagtattatgtgtagtattatgtatagtattatgtaggtaccctaggtgggttttccaggccatttcaagcacatacccatagtactaagcagatagtttagcacataccatagcactgtgtagttagttaatttctcttatttatgaattttctggtgttaagagaggttaaatctgttgaattatgtggaaatttggaatttttaaaattttcgaaatttggccattttggtctggacccaaaagtgacatttgggttttgaaaaaaaatgaaaatttttcgactattcagaaaattaaattaattaatcctaacatatttagcacatcattttagtcataaaactacttaaaattagttctaaaagttgttaattagtatagaaaattagggttttactgtgtactccagcactgtactatactactattaactaatcttatctctctattagagcgaaaatttctaattattacccttaattaacactaatttaactttaaaatagataaattatcctaaattgagttccataaaacaactttttaacctattaaaaactagaacctcccctcaaatttacaaaataaatataaaattccttaattatacccctagaatactcttaaaactattatctaaacatctacaataccatatatttagtatactatatagttatttgcttgacatggcctggacaacccacccggaaaacctacccaaaccctcaaatacacacttaaccacttaacaacttaacaaaatacttaatactataatcatgtttagaaggtttggagatacttgtggagccgaggtctgacggtgtgttggtgagtttcaggtgtgtgttgagtccttctgaggtgagtgactactacagctgtaactttgaacagttacagtacagagtaatactcaccgaatggcacaacaacatccttcaaaactcatccacactcacaaccaaacacaaccaactcacactgaaatcactcacagtactaacctacacagttaactaaataattaactgtataattaagtatataactgtataatatattgttaggagggctggaggtatatgataacagtacacttggaaggaaataacaagacactatctacgcaaactgaattcacacaccataccactcgatcaactgaatctaccgtggaatctgttaactcgggtaaacccgtaaaactgtgtaatatagtagacacagtaggggaaaaatcgggtgtgagagagtacagattgaatattggacttgatgagggggagtatttgacgtgtaaattcagtgacgcagatttggtggaagaagtggttgacaatttcatgaaggaaaataaacttaaatcttttctcaaagattccttaactcaaactatcaacgccttaaaatcatcacaagattccattaaaaccctcgatctcaccgatctcatctgattccaaccattaatattatcctcattatcattcacactatcacactttaattattttaatagtatagaaatttgttaatagtgtaaaaattgagtaaatagagtaaaaatgtgaatagtgtaaaaaagagtattgtgtaagtgtgatggggaaattgaaagaattttagttgaatataaataatttaataaatgagactaaaaattgttaaaggatcgggtctgagactgttttcaactcagtctcatcccggtgtaccggtgagtgagggattatacagtagaacagccaggcctttggagaatttatcactggacggttcagtgagttcatactccgaaggtttaaaatcctgccgaatcttcgataacccaaacatcatccgagtcatcaaacgagataaagaaactcttctcgataaattatacaggtaatcatttacacagctgttaattattctattctatactatactatagtataatactatactataaggaaggggttagggaggctcgaggaccagtcaatggagtagactggtccgagagcgaaattttttttcttgctgctcttttttcctctctcattttcacccagattactccccaaatactccctaatttacccctaattactccctaataccctccaaatactccctaattacccctaatactccctaatactccctaattacctcgtactaaactatatacaactgtaggtacatggacatcggcggtttttttacgatgttgaatagtaggaaggtgcatttactgcgtactcctgctgagggcaggcctagtctcatgtgtttcacagagtttgagcggaagcaatcactgattatgaaggccgtgctgtcactcctgctttactacgtctactactgctatgtcaggcataagttacacatttacgaccgtcacccaagtcccgaattaccaacgttcgagttcactaataacaggactaaggacttcacgtggcatgggagcttacccttccagtaccccaagggacgctgtaaggagtgccgctggctcgaactcgagtgcaagaaacgctgctacgatgatttgctacagcagggacaccagttcatactacaaaatcccatgcaaattcccagaagacaacttctcccctcaccttaccctcccgcataatatttactaattaattttttcattttatatattttatatatttatatagtaatttggtgaattatttagcgaaattcggagttaaatttgtatatataatgtggaatttgtggaatcacacattatttcacaaatttcaatttttacctaaaattcataaaatatttaatctctcaacacaacaataatttaaattttaatcttttaaaatgttaatcttaatatatcaacaatgttaatatattaataatgttaaaataatttgttaaaaagttggatatgatggagctttgcgatttgtcggataaaagggagcgaattctcaaggttttaaaaaactccaaggaatctaaccacttgtttcctccaatcacactaacttctcacaaactccatcaaaccaattttaataatattaattttaataatgttgaaaatgttgaaaatgtgtttgaggatgttagggttgataatttggctcgtgtgatatcgaggctaaaactggcgctaagtgtcttaaggccagttgtatctgagatgagtttactactctcaaactatgcaaatctaactgaaaaactgaataacacaagggaactcacgcgaaaaatcgaatcttctgacgattttacgcgtttgtcacggatagaaactgcgttgaatgataattatctcaggttaaagtctgtagaaactctcaagttacacctgagtcctgggagtaaagttgatatttctcgccctgtcacgctggacacggcgtcgctagaggaaattctacaccttatcacagcctcagaacaactcaaattatccaaacacttttgtaacaaattactgtcacaccacactgacacaactggtaacacattatgtgaagcgttacggggagtaaatcatagtttagaaaaggtgaccgagttatgttatgagattttgtgtaaggagatggaaaggattacgttattgtctgacagattaaactccgactctggcgtcatacatgaaccactcatcaatctcccacacacacaagatacccttaacatcacatcactcttcgaagtttccctcaattattctaattgtgttaattatccaaattctcttaattatgcgaattgtgttgattatggaaatagtgtaaattatgggaatagtgtggatagtgtggatagtggcaccgtaacggagaagcttgggataagattattgaggatattagtgctagatcctcgtaaactacgcgaattcctcctgtgtagtcttgggtttttatcaaatttagcgcaaaaacggtattcggcgctgttgaagtatatcatttcaaaccctagaaacagggacaacaacgccgtttacgacgtgtttatgaacttacaactggtcatttcactcgttaaatcaagtgtcatcgcactctacaacaactgcgacttggatttgtacaacacacaccaacagtgccaggctcccacagcggaaaattacatacacaaagtcaccgaaactctcgtacctcttctagaacataaactacactccctaataactcatactcatgatattggggatactctggatggtagggatactctggattgtagggatagtgttgacgtagtagtccggggagtcaatgagataattgagttgtatacggcgatacagataagtcacttctactataataagatttcaaacatattaacaccgccgtatctacaaatttccaactctctttcatcttctgtaaactcatttgaggtcacccaaaaccctacggagtacccccgtgacaccactgtataccccttagaaagtgtaaaccctgtacccactgtaaaccccttagaaggtgagtcccctgtaccaagagaatcccctgtattgaaaagtattgatcgtatgtgtaatgagtggaatgagttgataatgttaaagttacaaaagagtataacggtgccactgtctactgaagattacacgggctctgaggaggaaattttacgtctaatcgctaattttctgagtgaaattgtctcaattcagcttgaatattctgtctccaatgacctcattaccatccttgaaatgacaattaaccctgtcatcaactggtgccaacgtgtctctaactcacgcaccacacccgggaactctggtgacatttttttactaaacgcttactcacagttgttaggttcaattcagtcaccattggttgagaaatcgtttaaacaactgttggaagagttgagggaaaatgccatcgactccattgtcagtcacgcgataccacaggtgatcacagcactgggcgggaaactgtcacacccttctgaacacagtttagataatgtggaactcgatgaaaagtttttgtataatgtgaaggcggtgatatttgcggatggtgtagtggagttggtaccacagcttggagatgaatttagtaaacttgagactactaatttgaaattagtactaaaaagaatttacacacacttggctaaaatatatcaatcacacttaaacgatgatactgcacataaactcgtcacactcgctaatacatactcttaatatactatacttactatactcactatactatgtattatatactatttgtatatatgtatatgtatagtagtaggagtatagtagtgtatattatatacttaggtatacagttagataacactgattccagtgctatataccaactgttactatttaatactgttgtaataagcttaaatatgtataatagagtcattatactatgttatatacacctaatttactacccttaaacccagacacatataatactactgtaataatactatatataatactatactatatatactatagtatatattgtatttgtatagtagttagagtataccatatagtattactatacagtaagataacacttcatactgtttaatactgtaaattgtatattaaaagcctttgaattgtattataccctgtgttatatacacccaatttactacccaaaaacaccaaaccataactatactactatactaatactatatataatactatactatacacactatacattgtatatatactacagtatagtagtactaatactatactatactaaatactataagaaatgttataagattatgtgagcattagtccggagtgttccttggtatctttggtatctgtgccgtatttaacttctataacgttcgactgtttaaagccgtcacatgtggtccaggcatggactgtaaagggattacaatccttcttaaacttgtaacttttacctttatcatattccgcagggtctgttttaaaggttaggtaattcccagtcctaggacagggcacgttagactcccttgaggtctggaaatggattaccgcattttcattttcacatattattctcatttgtaatatgtcctcagtcacaggttcaaatgatatttctggcggtgcacactggttttccattttagcatgcgcaaacaacatagaggaatgcatttgcgtagtgtttggaacgcctaaaaagtgatactgaggaaaaattccataatgcctcgtaggatcatcaatgttcatattctccggaggactaaacgtcgtactacgcaatctaaacaattattcacactgtttacactatttacactatttactctgtttatagtatttacactatttacagtgtgtacagtgtgtaaggttaatattagagtagtggttgaggggaatggtgtgggaatacctgttggagtagaggagaatatcgttgaggtctaagggttgtgataatttggtttgttgaatggctttgattctcttctttccttcgagccagatgccttctaaaagtgtaaaaagatcacaggagagcttaaattgttcatcctcagtcaggcctcctatgctaattccagagctctaaaatgttattttagttaatatttttacctttttaggctttgatttggtggatttcgacttggatttctgggctgtactcctagttttaaccgatttttgcttattttcttctaaaattgaggttaaatattggttaaattcgtcttcccaggcctgggaagttacagagctcagttttgaccattctggctcaaccacagactcgatcatatcacaaacctcctgaagaccctccattcacattattttacacatttcacccttaattattttattttttactattttaaggttaaattgttatttgattattttatacatttaaagtgtataataagattccacaggaatcccaatacacattccctaattactccatttaaatccttaaattattgtaaaataatattaaatttatgataatttgtattatagcgtcaaatttgcagaatagtgtaaaatttgtagaataatgtgtcaaaatttgaaatgttaagaatttggagtgatgagttatgtgcaaataattggctggaatgagtttgttgtccctccttcagttcaaattttctctgaaggttcttacttcatcttcaattgcggagaaaactcacaaaggtaaacaatctcacctcttctcactccttaattatcatcatcttaccccttaattatcctaaattatcctaaatttggtcttaattagccttattttactccttaattagccttaattagccttaattagcccttaattagccctaatttactccttaaaatcctttaattacctctaaaaatccttattttaccccttaattatccctaaaaatcctcattttaccccttaattatgcttaatttaccccttaattatgcttaattagtattattttagccctaatttcttcttaattacttgtgtttattgttgttttaggtttagaatatcgaataggttaggcttgggtaagattcgttacgtatttttaactcatttgagtgtctcatctttcaatggtttaccaagtttaatcctatcccttgacggctgtaacaccgaacacgttactgtctttggtcccaaaccgctcaaatctcttctcactcatcttctcaacacattcaaacaactgtaaactattgaatattatgtagtctacacaatagtttacactgtaaatagtgttaatatgtgattaggagtataagagtgacaataaatgaggtggaaactgatgttaacagtgtttgtgaactggtaaagagtaactctttaaccgtttacgggttctcacattccactactaattcccatacaattgctaaatcccatacaattggtgattcccctgagaatagtacagtgtacagtaatgtgatatcacctgtgcatgagaattttattggttacttcatccagtttgataccactcctggcactttcaatcccaattctccagctctctacagtgtacccacaattaactatatactaactatatactaactatactatatactatatactcttaactatatactactaactatactatatactaactatatactcttgactatactcagtggtaatactgattgcatgttcgtaggtgatgaagagtgactatggaaagttgaagagtggtttggatgtgacattgtctgacggtacggtggtgaagtcagacgaggtctgtgacgctccaactcctggcaatcacgttctcatcctcagtcatcccacccctttacccgtaactccaataaattattattaccttaggactttattcatagtattaacaatggtcaacggtacctgttttacctacaaacacatgccagtgcaacttctaatacggttactactgatacaattggtggtgaggtatattgtagtgttaggatggaggaattgggatacatagcattacctccttactataaacggaacttactacattatcaattgttccccaaactctttcacaatcccagactctttagtattcctaaactgtttagtattcccaacttggcaggtttgtacagtgtgattactgtgtgattaatgtgttgtaggacagggaacggggcatgtaccgttgacgaaattcatagtacatcccccaaaacaagtattaacaactaataacaccaaattaataatgtgttagagtagaattgatgttactagtgtgttacctacggatttggaggtaacttaagacatgtgcagttgttgtaggagtgggatgtgagtcccattgaagtggaaattgagtcggagtttccgaaactgacatttcttggcaccggctgctccgtaccctccgtataccgtaacgtctcagccatactcctacaactacacaaacactactgtaacaccattagtattgtatagttaagtagctccctctcccttagatagtaaagtagctccctctaggggtatatagttaattagctccctctcggggtacatagttaagtatagttaagatagctccctctaggggtatatagttaagattatatagttaagagcatagagttttgtagcgatattgctggactgtggcgagggaacggtgttacagatgttacttatttccaattccttcgacgatttcattgacaaaatctcctccatacggtaccacaatagtgtaaatattgtaaatagatttgaaatatgattaggctggtgtttatatcgcatagtcatgcggatcatcacttgggattatatcatctaatatcattacgtaataaattcaattctcaaggcccaaaaccgctaatcatagcgtctcataacattagagtacgagctaactattcagataaactttataactcaatttgttacagtattggttaaaggaatttgagaatatttgccacttggactatgattttatggtgttgactgaggagtctgtccaattcaccgttgagcgaactctgagactctcattcttcaaagtattctataactaactataaattgattaggtggaccatatagaagattcatatggtataaggatagactatgagttttggagtttagtatactccggtgatactaagccctgtgacaatctcatcaaacactgtgagaacgtaaatttcctaatccacgagggtgagatcttggtgttaaaattgtattagcaacgtttacggatgagtatgctgagaacgcgatgaagacactgcacagtactgtgtcacaggctattgaggttgctgctcagtgtaacgtggaaactctattcctaacacatttcagtcaaagatttcaaacggtgtgattaatttagttaacttgtgttagatggagagagttgaagggctgggagttgatgtggtagtagcgttggatctcatgacaattccgctaaaatccatacaaaaacttaaaataccactacaacaattcaacacacaattatacaatattctcaatccatatacttattttattagtaagtagttggggtaaatttagggccaccaggagtgggtacccagggccatgtcaaacacataactagaaattatagtaaatatgcagtattgtagatgtttagataggattattttagtagtgttagggttataaacagggaattttatgcttattttgttaatttaggggaacttgctaggatttgttggcttaaaaagtgattttaaaggacgaatttcctaataatttactaataattttaactggatttatctgtttttagggtatttattagtgattttcgctctaatagatggataatagtagttaaaagtaccatggtacagtgcccaggtacctcctattacccaaattttacatagctaaaaacacttttttataacaattttaagcattttgatgtctaaaacgatgtgctaaaagtgttaaaattatttaatttaattttcggaatagtcgaaaaatttttattttttcggggaccaaatgtcacttttgggtccagaccaaaatggccaaatttcaaaaattttaaaacctcaaaatttccacataattcactcaataaatcattgctgagaatcggaaaattcataaatgagagaaattaactgtctaaacagtgctatggtatgtgctaaactacgtactcagtactgtagatatgtgtaatattggtacattaatgttgtgtgagatagtattgcgagtcttgttggtgtagcagttccatgttacagaattcagttttcctaacggtactttcagttttaaagccttggggattaatgtgagaggttgttttccagccgtttttaaacttcaaattctcgtaagtgcccttggtaagccatgaaatcaagttccaccgcttcctcctgttaaatctccgtaacctacggataatattaagttataacatacgatcgctcccagggcctaaatttattataagataaacagaatctcgctaaaaacattaaaattccacaaaatcacacacttataaggaataattattaagaatataactctaaattaactctggaatataaaattaggagtaaaataatgaataatgtagtaatgttatggaaatgtgtagtgtttgggaaaatataataataagattttaaattacggaaaaatgaaaaatatgattaaataactaggaatcaattttaaatttaataaaatttgagattttaatattttttcagttcttccaaacttccatcgacatatgaacaattaagcttgtttacacctcagtttacgcttttttagtcaaattttcatggaattttacgctgataattttttaagtttaacctttgatatgcacaaagatgcatggtctttcccgcaattacttctgaattattccctaactccttctctccttttacgttatttatcgccttaattacttttaatccgaatttactaatttttcccttatattttagttaaattttaaaaaattttctcattaaacgcgattagtacttttactgtctaccactgggctaattttcccttaattttgtactttcacttttgtaaaatttactactgttaatgtgtctagtcaacgtcacgattcgcaattttaagcttaaaatgtgtgaaatatgtgctaaacaggtcaacattaaaattctgttctagggagaaatcttaaaattgattcaatttgttgccgtggatatataaatgtttacggggacgaattataaagtgaatgataaatgtgtgacaaagggcgcgctggccagtgttttaatctcgattttcttatccacactgtgtctcacagtcatcacagcctctgacagtactttacaactcaataacataactttagatgacaccagactggtcgagattttaccctcactactcggcgctgtcgtctttttcggcagcgtttacctcatcaacctcatcaaatcgcaattcagaaaaatcatcaacgatctcaatctcaacaagttaacacaccatccaactattcacattgacattattatccataaaattatcttaattatcttaattacgcttaattacgttaaattatcttaattctgtgaattgtgtaaaattgtgataattatgtgtaaaattgtgtaaattgtgtttagaagatcttcattgaggaatccgtcggtgggctcggcgttagcggcgcttgatcgtgaattacacaggaaacataagaactcgctcaataccggcgccaacagtatactacacactatataataactgagtgataataatgtttcagcgtataatcgtataaagttgtggtatagttattcgagattatcgttgacgtgtatgttgaagaacgctggcgtctcattaatcctgtgggacattttaaaacttgttttatggctaatcacactaacttactggagaagagacgcattcaacgagaaatggaactactcactcgtccccaaaatactataccctctacacttcttctcaatctctgccgtattccactttttatcccatacccaattatctcctatttagttaacccatacgtagttaacatatttagttaacatgtatgcaatatttctacagtattttcggtgagcttaaattaaccgctgttatagtctacggctgagatatgtttgtttatactggaggcgaaggattcgaaggatatattttattcaccgattttctggataaattcgttaattttacccccgccagtactcatttctaaatggcttttcttccctgatttgtcttatcttcaagtctactggacacacgggttcatcatctggatcaaactcttcagtatcccctaaactaccattttttaactattttaacccgtacacttagttatttaccccgtataattacttatttatcctttatacttacatattttaccctttatacttacctattttaacgtttatacttagttatttaccctgtatacttacatattttcctctatattcaaattgtattgtagtttggataaataacagaataattcaaacgaaggatggatcggaaaaggctaagtgtattttcagaatttcgttaggaatattcttcatgtcttgctctttcgctggtaaatcacatttctacacactcaaacaattatcaggttcaatattcataatgcaaggatgccatccctttggaataaattcacaatattcccactcattcgcacaatacttaaattatttctatctcgcaatcatcaccttctccacaggcaactctccataccatttactcaccaatcactatattaagtctattaactcattatacgctttgttagctttggttacaactattttgatgagtaaattattgtgtagtgggatatggtgacatgatcccgttaacggtggaggctcggatgtgtgcaatttgttatatattttggatggttatttgggtccctttaaccattaacagaaccttagaaatcgtcctagccaaaaatatactctccggccatatcacctcatggtacacacacaatctattcaatctatacaatggaattaagaaatagaattaataaatagaattaatacaatggaattaataaatagaattaataaatagaattagtaaatagaattaatacaatggaattaagaaatagagtggaattagcgtgtgatttgtgtattagggctgggttgaagaagtttgtgcttgtggttggcgatgttgatcctgcacaattatcgcaattcatctccaaaatgtattacaccaaagataaatggtattaaccactcaaatatataccatagtactattctacatactatatactatactaaatactataatatactgtatatacaatacgtaagattgatggtgtattagtaagataatagtgttaacgccgaatgacattgaggtgtatacgactcagataaagcaggcggataatttatcgatatcattatgtataatgagaggtgacattgaggttgacggtcatttgggaatattggacttgattcaggcaaaactcgccacgtccgtgttcattctatcctccttcaaaggctcagatttgagattaaatgacatgaaaaccattgtcagaaccatcggaattaagaaatacggctgcagaagtgaaaatgtcatgatacaatactgctcacccatcacacactccatcttccaaagcccattcggagttgaaagttagaacacagttaattattcacacacattttacaccattttacacatatttacacacatatttacacatatttacacatattttacacatttttacacaaataatacttttagtaagtttgaatgatttgaagttatcgttggtgacgaagagtgtgacatgtccggggatagtaactttgattgtaaatctatccctgaatcagtattataacattggaaatacgcagaataattattcaaatagcaaatctatagcactttatcaatcttacctaagtggcgctgaacgaagtgtctgcttccataaaattccaaccgaatgccaaggcattcttttcgaagtttctatcatttactctccatcatttactctcaatttataaataataattatgttttagtcgctgtgtgatacgttttttaatttgaacggcgtgatcctgattggcgtaatctcagttgatgacccactgagctataaaatcaatcccacaggagctgaatattacattaaaaaaggcgataccggaatcttcatactcgatttcgacagtaccttcccttaacaccaactatctcactatcccactatactactatctacactactatcccactaactatactactatactgatcatagtttactaattccgtgtgtttagcgtgtcctgatttatcgcaaacgagtacgaagaacacggcgttaataaggagaaacacgatcttgctaaagcttataaaaaacggtgacttggaaatagacaaggaggcggcgagtaacttatcatccctgacttacgaccctgaggagtcaaatgatgctgagaatgataattctgccgatgaaatttacagaattgagccagcaataataatcccccccgagcccagtgtcagggaagaagtgcttgattcttccttttcaatcactgtcaagaatttaactcacgccaaggaaacggtctttagaaataaagagttaccagttgttaccattcttggattcagcgatttcgtacttcgactcctaactcatttctcctccatcaaccaattcaacgtcatcatcgcaggcaatttcgtatctcccaatcaaccctgtgatattatttatattaccattgacaacattatttatattattattgacattatagttgacaatgtaattgctaatttgatgttcagatgagtaagaaagttgacgttgaggtgttgaatcagtttaaatcattcttggcagtgattgaggttgatctcatgaaatacactgatatcctacggtactatccattagctaccctggtgaatatggtaataatatgaatttagggctgaattgcacttgtcgacttttttctatataactccaaatcccgtggatttgaaattagaaaccaataacgcagatttgtccacaatcgtcgtcttcagacaaattagaaacctattagtaatttaactcacgtaatatgattttgtagaaaacaattagaaaagtgaactatcaaggcattagtaatatctttggacttgtcgaactacaaaacttaaacaacgttacctttctcgatgattccaaatggtaacagacgcacccagttaattttacacaattttatagttaatttacatagttaatttacatagttaattttatagttaattttatagttaattttatagttaattttatagttaattttatagttaatttacatagttaatttacatagttaatttacatagttaatttacatagttaatttacatagttaattttacacaattttacagttaattatacatagttaagagtatatggttaagagaatattagtaaggaataattatttgagtgaatgttaggtcacaatggaatgtgtttaatgagagtgtggattcatcgttgatatatataaattcgcaggagtatgcgatgggtcagataataagtgacgagttattttacaacgttatcatcggctcgttctcatccagtgagaattacatgttctacaacatcatgatggacctaatcagcattccatcctcaagacgcaaaaatgtattctaccaacctctcacacattttcaacttattttagtcagatttactcattttaaacttagtcagatttactcattttaaacttgttagtcagatttagttatattacgcttagatttacagatttgcatgtgatatttgtagagaggagtggaattgtttaagctatcggaattgaatttgaaccctgggaagtacacctttgcaggagtttttaattacattttacaagaaatgcagtccattctcattggccttttccgaatgtaaccaatcagccgcctaattacctagtcaattatttacatagtcattgtaaacggtgttaaaatgaatttagaggaacatcgatggaaaattacgtgatatgttctccggaacctgactttgaacttcttgaagatgacatggtattacacactgtgctcataattgcgtaggtctacttgataccgaaacaatgagaatataatttgaactgaggatacaatttaaactgggaatataatttaaacagtaagaatataatttaaacagtgagaatataatttaaacagtgagaatataatttaaactgggaatataatttaaactgggaatataatttaaactgagaatataatttaaagggtgataatataatttattattatgtatgataaatgaaataaattcaatatttgagagtaaaaaaattaggtatatttctttcttgagcacagaactttttttaatacttcgtcctctttgagagaagctgtggtagcagttgcaaactttctgaatgggccaaaaagcttacccaggacaatcttagtctgttcctttgtgttaagcacgtccttgcatttcttcatttccacaaactttagccctatctccaattcattctcctacaatatttttatacatccactcagttaattttggatccattttagatccattttagatcaattttgtattaattttagataattatggattaattttggtaatttctagctaagttatagtaaataatctctaaatatgggtaaaaattaccataatttcatattcgactaaatcgttcttgacaaccatgactgggaacgcaatgttctttttgtcacactcaatcttatcatcaaacaaaccaacaaactcaggcatatcaaatacctcattctaatcacattttacaacatttatatacttatttatatacttatttatatacttatttgtatagttatttatatagttattatatactcatttatatagttatttatatagttatttatatagttatttatatagttatttatatagttatttatatagttatttatatagttatttatgtattaaaggtatagtctggtgtgtaagaacgtacggattcttgacatctgagatggctactgatggcgagaacttttttgaatttcttctaaaagtgattaaaaagttgtgaacttacttcttggtatagtttcctgaaatcattaacttctgcttgcttgatttcagtgacaagggtaatatcctttttagccttagtcttaacaacgtcctcaagttcttctaatatctgactgatagtctttttaccagcgtcagtcacatttacggccatgacgctgtggtttacatactcagagaacctgaacaactcatgattcttccatgtcgaattcaatcctctcaacaatattaacatatgactcgttgaacttggatgcacatctacaccatcatcaatacaattattaaccaattattgactaattgttgactaattgttgactaattgttgactaattgttgactaattgttgactaattgttgactaattgttgactaattgttgactaattgttgactaattgttgactaattgttgactaattgttgactaaatattgaataaatattgactaattattaactaaatattaactaaatattaactaaatattaactaaaatatgtgagttacattcgaaaaaatcgaatttgatgtctttggcgcttttagagacgggaacgggtgatttaagtattcttggtgggatgaataggttttctggcttttcaattttgaactcgggaacttcgaatttatcaagaacagctggtacatataatccttcctctacttttagcttctttgccttgtcaacgtctgttacagacttaaatacttcagctcgaagttccttttgctctggatttaaatcctcaagatttactctcaaactctcagtatcagaaattgttaaattttccttcttccttaatctgtcttctatagcctttttatcttctgcagtttgtacttttgggcctttaatatccacatctgggacgtcaacgtctacttttggtcctttgaggtcacgttcttcctctgatttttccacaacttttttgggttctttatctttgtctttatctttagcatcatccttgttccttatcactaacacaaattactaattctattgacttacacaggaaataagcagccaacactaggccaactattacagccaacgctgataaacatcccaacaccgccgaaaactacacatgcattagtccaataatttacacatacggtaaataactgattaaacagtaaataactgactaaagagtaaataactgactaaagagtaaataactgattaaacagtaaataactgactaaagagtaaataactgactaaagagtaaataactgagtaaacagtaaataactgagtaaacagtaaataactgagtaaagagtaaataactgagtaaagagtaaataactgagtaaacagtaaatattagttggtaatacttttttttgtgatttggttttccttttaatgctgaaggagtagaagaagccaatgatccagccgagaacaggtaaggggaaaaatccaataataagaaacatgcgaagcctaaaaattgattagtttatcttctcatctgattatataatcttataaactgtgaacgtacaatttatcttcttttgataaggtcttgacgcccgagcctgattttgccgccgttctctcaaacttctccggcttaactataacatcacattaatactcatttcaccaattatctcaacttaaaataactacgtaagtactaagtggtaaccacgtactaagtgagtgttaactaagtactaagtgagtgttaactgagtattgggagtgagttgagtataattaggttgtgtaccttcaatgcttgagtcttcttttgaggctgacttttgtgagctgctgctgtatgagaggtttgagctttgggaatgtgaaagttcagctgatgatgctgatctttttgaactttcagacgcattatcgggtgatgaagctgatctttttgaagtttcagatgccatttcagctgactctgatccgtgtggactttcagatttcatttcagctgacgacgctgatctttgtggactttcaggtgccatttcagacgactttgagctcatggtttcggagaattgctgtgatccttgctcttctgagctgtcaacttgatgatcttcactttcgtaatccattatctggttcaaaattgaatattcagttgaaaatggattatttggttcaaaatagagttgtttggggtttatttttttttatttaaaattcggagattctaaatcgatatcgcacagaattttaaaaacagatttctacacgcttaaaataatacaccaaataaataaagtatactttacaattaatatattaatgtttaaaaagatttcggagccaagtacattttcataggcgagtacagatatagcaccgtcgccatccagagacgtatagaccaaacacaaacgctcaattcattcaaaaaactcacaaaatcgcgcaaaaaagctattaaatgttaaatgtcagagattaaactttataaatttgtttattttggtgaaaaattccatttgaaaaaattacttcagagaagacatgacatacaaattcaggccaaaaaaagtacacaaaattacctaaaccaattaacagaataaaagtaataataaactctaaaaatattaaaatcaacacaaacacacaaaaattcaagtaaatgaaacttaatctgaaaaaatgtctaatgtttgaaaattacattaaaaaataacttctattcccaattccgtgaaatttaccacttaacaaatttatttacttaatttatgttaatatattctaatttccccacagttaagattccagacttttcattcaatttactcttcatatatttataatttatacttttaattatctccatattttccaaatttataatttatcctaaattttccctaccgactcttatatttcccacttttaattccctaacaattttataattttataattgtataattaatttatttgggaaactgtgattcaagatgatgggctttgcgggggtaagtttccaaaaaataataatttttagaaatcgaagcaaaagcgcttcatcaacgatggtgtttttaatgcggaattgaacgagtttttatcgaggactttggctgaggacgggtactctggtgtggagctgaggatcacgcctgttaggactgagataataataagagccacgaggactcgtgaggtgctgggcgaaaaggccagacgtatcagagagctcacatcacttgtccaaaaacgtttcgggttcagttcagactctgtggagttgtatgctgagcgtgtggagaacaggggactctgtgccatggcacaggctgagtcgctacgttacaaactactcaagggattagccatcagacgtgcggcctatggcgttttaaggcaaattatggaatctggcgctaagggttgtgaagtcatagtctcaggtaaactcagagcacaaagagccaagagtatgaaattcaaagacgggtacataatctccacaggacagccagcacaggaatatgtcaacaccgccgtaagatccgtacaactacgacaaggcgttttgggcattaaagttaaaatcatgctaccatatgatcccgaaggaagattaggaccctccactctacttcccgataccgtcaccgtactcgatcccaaataatcataatatcatatcataatataatataatatataatatactatatagttagtattttgatggcggtaaggtgtcctagcattgggacgattgcgggtgtcctgaagaacattaaatggtaaattttaccctctgcagagcctaaatgattaatttagttgataaattaccatgaagattctttagggtttaaattaaacaattttgtaggggtgtagcctgtgacagtgtaaatatgggattaattacctaaggagaaacaggtataaattggtgaattcgcttggttggcaacttcgtagaaggaattaagctttaagtagacaggtttctcacaaattgctatggctaggatgagggtctgggtggtacctgtaaagtttaaaagcactgcataacccgttaaattaaacgcatttgacttaataaacacatgaccagtcacctcatctctctacacttttttacttagttccacagttaccttcgtaaaatagtcgtctaattcagaatatacagttggttgggtaccttggtgtataatattgtcggaagtaacaaaagtgcaaagctgtgatttgaggcaggattgaaggagtttactgagcacagacgaatgcagaggataaattgagtcaccagaatttctatccggaattctacaacaaaattatcaaatttaacttagaaattataaaatttgaaagtttaaattataaaatttgaacgttccaatttgaaaatttgaaaatttagtagaaaaagttacattaggaaatcgccaaaaatcccttgtctaaaatttgtgccgtcatatataggcctgggctctctaaatcatatcaagcattaaataaccaagtagtctcactactgaaactgactacagactatggctacagatgagagagtttgagaactttgagggttcgcaggagtattgtaagtttaggaattgaagattaacgtttttatcgggtaaaagtgcgttgcaatcattgatattaacctgtaaaaaatgttattattcaagttactgagcaagagtttgagcctaggcattttcctctgataagttcagtacagtttaaaacttcaacagtatcagcgttaggcttggtatgatacagctcagccctgtgtaccagaacacttagtaaacttttacacaataaattactcgtcccagtctaatccacaatattaattaattagttatagaaatggtaataggaatagaaataggcgtgttagtgtgtgttgatacaatttctaaggagtaaaaagagtctagaagtgagatatttcgtccgggtaacctgaaaaatcttatggtagaaaaaatacccgtagaaaataagcggaagtttaaaatgctccaaagtgctggaaaactccaaatttaacagaaaacccaaggttaaaaccaatttttttaaataattaatcgaaagaatcatatcacattcgagaaattaagattatttaagtagtttctaggggcataacggggtaaaatacacattttccagctcaaagcgttaaaatatgtgaaactgatgccaattagtactacggtatggagtatgtaaattgtaaattaaggtgtaaaaacgggtgttgtgaaaaaggtgtaaaaacgtggtaaaatcctaacgatacgttacacattagaataaaacaatgtttaaaaagtgtaaatgtaaaatttataatgtcgtgtttaattttttgccattttcagttacacatttgaggatggggttagaaggaaattaaaataaatattttaaattatttttaaagttacatgtgcggatttttttaaacgtgtcgacgtaaaaaatttaaacatttctcgacgatgcccaaaatttgcgtatcgtaatggcaaatcaacttatggcgtaccagaaagttgtacctcaacagggcgacgttccgccgcccagatttgggcacacatccacctccgtaggaagtggaaaagtcgttttattcggcggagccgtaggaggtaattttatcacgtcacatcaaccaatttatcctaatttttacaccaaattttacaaatttaccaattttttctccattttattatttaattaatcattttttcggcatttaatttgttaaatgtgagaaaaattttaatgtgtaatttacttttagatgttggaaggtatacaattacttcggattcctttttatacgacgtgactacaaactactggacgaaactacaaactgaaaacccaccctccccaagagcagcgcacgccgccgcgtgcgttgaaaccatgcaagtcgtcgtcttcggaggcgccaccggaggtggcgcactctcttccgatgatgtaactatactaccgactcattaactatttaccatagtgtttactaattaactatttactatactaattaactataataattaactatttactatactaattaactatatactatagtattgactaaataattatactgttgactaaataattatactgtgtaaactattgtgtaatttgtggattagttgtttttattggacttgaggcgtgaaaagcagttatcttggataatagtgccgactacgggccgttctccaggtcgtcggtacggtcacactatggttttctccaaacccaacctcatcctcatcggcggcaacgacgggtacaactcagtttacaactatattaactaattcttaactgttattgtgtaattaggcagcagccgagtaacgatgtctgggtactgaatgtggaacagtcaccgtttacctggaatgaagttacattctcacccaccatacaattacccccaacacgcgtttatcattcagccgacgtatcttccacaccattctctttacttagtattacttattgatacttagttatattattgatacttagttatattagtaatacttattaatacttagttatattagttatattagtgatacttggttatagtagtaatagtgttgctgatgcttatgctatccatatgtttagttatgttgtgagggtcctgcgaatggaatgatagtgatatttggcggtcgcggcaccgagagtagatcattaaatgacgtttggggcctaagacaacatcgtgacgggacctgggactggattgaagcacccgtcaattctggcactaaaccagatccaagatatcaacattgtacccatcataccattaattattttaactgttaactatataaatagtggtaatgtgttgatatgtttgtagcctgtgcgtttgtgggatcaaagtttgtggtcttgggtggtcgcagtgattcggatttaaacaagtaattaaatactcagctatttaccttttattactaaattaaatattcaacgatttaccttttattactaaattaaatattcagctatttaccttttattactaaattaaatatccagctatttaccttttattacgagtaaatttggatgttgattgtagatctctgtcgatatctgtttacgatactgagacgttggagtggtttaatatatcaacgatacagcgggtaataaatatcagcctgaataattcttagttccgccactcaagctggcgtttcggaccgaatttatacattttcggcggattcgccaaccaaacacaaaaacatcccacctgcgaattaaaactcctagactgccaaagttcccctcaatcacatttctacactatttacacatttttacacatttttacacatttctacacatttttacacatttctacacaatttacaatttctatacaatttacaatttctatacaatttacaatttctatacaatttacaatttctatacaatttacaatttctatacaatttacaatttctatacaatttacagtttacatggtgtaggtgcgtttggtgagcagttgaagagtgtgagtgtggtgaagccgtggtttagtgatgagggtgtggatacgtttggaagtgctggcgtgttatttcagagttcgccaaaggccagagatgacatgttcagaaaaccgcaggatcgagaaatcagactctcggcacacgcacacgccgtacgcgagtccgtctccgacttctcatacctcgtcagaaaagtattttttacaccatttccattgtttttacactgtagatagtatttaccatgtaatattaaccatacaattgagtatacaattgagtatacaattgagtatataattgagtgtataattgactatataattgagtatacaaatgaatatataattgattatacaactgaaatttaagtgtataattgtgtaatatgtgttagatatcgatagatcgtttggaggatgagggtaggaagataaataagccggaggcgagatcgacgttgcattggcagaatgagaactcagacacagtttacgatcgtattatcatgagacttctcagcccaaacgagctcaaattccaaaaagacgcctccttccccatctcatacaaagatatcaacacccttttaaacactgtacacacattattatacagttttacacatattatacagttttacacatgttatatagttattattttctgagtacatagtattatcattgggtaggtgtaccatatagtgaaggaggaggatacggtgttgaatttacgagctcctattaaaagtaacagctaactgacctaatattatgtagtttacggcgatattcacggtcagtatcatgacttgatgaggttatttaagttgtataagagtccgttggacgagtatttagctgaggctttgtgtctggagggtgatattgagtctaacgattacctcttcctgggcgattacgtggatcgcggcttcaactctcttgaggttatttgtcttttatttgctctaaagtgtaaatacccagcgcaaatacatttaattcgggggaaccatgaggatcccgccattaacgcagtgtacgggttccaaaacgagtgtgccagaagactgaacgaggatgtggaaaacccgttcagctgctggaacgcctttaataaaatctttgaaatgctaccactaggcgcacttattgagggcagaatcctctgcgttcacggcggcattgggaaatccgtagaacgagtcgatgacatcaggtcactcaaacgacccatatccgtcattcccatcccagaatgccctgaagtacacactcactttatccacaccctaacatatatttatataattatattatttaccatacaattatttaacatataattatatttacaatatgattatgttgtgacaatgtgtttaggaccaattgttgttggatttgttgtggtcggatccgacggataatgactcgatgttggggacggtgccaaatgagattagggacccggaccgcgcgggatttatagttaaattcggaccagacagagtactcaagtttctcaccaacaatgacctacaactcattatcaggtataaaacaactcagtcacggcgtttagagcacatgaatgcgttatggacggattcgaacgctttgcaggaggtcgattaatcactctcttttccggtattacaacttttacccagatttatagaatttaccatatacactatctacagtataatttactatacacactatctacagtataatttactatgtacactgtctacggtgtaatttactatatatccagtatttacggtataatttactatacacactatctacagtataatttactgtatattgcaaaactgagtgtatgtgtagcaacgaattattgtaatcatcataagaatgctggagcgcttttgtttataaggagagacttgacaattgtacccaaactcatctacccgtgccaagatgaaacttcttacgattcatggtattcctcacatcttcctcagttacacattttccatagttaatgaattatatattactcaatgaatatattactcaatgaatatattactcaatgaattatagattacacagttaatatatattactaatttaatgtatgaatgaggttatatatttttagggacatgaggatgagtgatacgaggcctccaacgccgccgagaagcacgcccatggcacgggacatggtcattgaacagtcttaaaatcctccaaactctttacgattttataacaaattttaatatactgcagaaaattaaaatatatagtagaaagtttaaatataaaattttaatgtatagtggaaaaatttataatttgtgaaataaagtggtatgtggctgtgtggagatttaaattgtaaatttttactaaaaatgatgaatgatgttgaaatgagtagttcagtggaaggagcgcatgtttctgagctggattcctcggaaagtgtgcttgctctgctggaggagagtaaagcctcgagtaaagaacttggccttcaacaacttgataaagtcgtggactacttctggcctgaagttgtcgataacttacccttactgtaaacattttaccataacaatttaaattaattaatttattcataaattacacaattaaccactgttaatctgataaatcagctaataatcgtttagagaggatttataccaggataagagttttaagtccaggaaactcgcggctttggtgattagtaaagtgtactatcacttggaggagtatactcaggcgttacaatatgcactaaacgccggagaacattttaacactaagcagtactcagagtacactaacataatcctcgcaaaggccgttgaagaattcatcaacgtcaacgttgccaaatatgaacaaggcgataaatttcaacaccaattcgatcaaaacactctaggtactctttcacatagttaatattattatggttaatataatggttatatggttaataatggtatgtttagattcgctggagatgttggtgatgggaatgatgtttagtagtgtgtcgagtggtgaggagaaccaggcgatgggaatagcgttggatagtaggcgaatcgacttggtgttgaggatatttgagtctagtttaagaatcagtaagctcttaaattacaccataggcctgttatcaaatgtgaccagtaagacatttagagacttagtgtatgagaagctgagggatattctattcgactccgtgtccctgttggaactaaacttctcaaacctctgcgtgtgtctttatcaattaaatgatcatgaacgtatggcatcacttctgaacgagctcatactcagtgggaatcacctgaaagcgttccaaatcgcatatgacctcgtggatatcggagatcaaaagtttttaaaatcagttcaggaatcaaactgcttcacctcaaactcactaatgctacagagacttaaatatatcctctccggcaccagcactattgaactgtacctccagtttctacacaggaaaaatcataccgatctcagacttctcgaacaagtcatggtactctctacccacctttattatatcaatttatattattttagttatgttaatttatattacttagtttatattattttagttatgttaatttatattacttagtttatattattttagttatattaatttatattagttagatagttgttgatgtgtggattagacgagtgtggatcagaggaatagtataacgcataatgcgatagtgatatcgcatgcgttaatgcaggctgggacatgttgtgatacgtttttgagagataatttaacgtggctttcaaaggctaataactggtccaaattcaccgccacagcctcaatcggcgttatacacaaggtaccacacatctaccctagacatacatccaccctagatatacatctaccctagttatgcacatgacatttctcactatgattagggatttacaaatgagtcgaagaaagtgttatcttcgtatttaccaacggaatctggtggcggttcatattccgaaggcggatcactatacgctctaggtactcactatccaacactctacacaatttcccagttactaattatattttaggcctgatacattcgaaccattttgatgcatcttcaaaggaattattgctgaattcactgagaaatgaaggcgccgaagaatctgtacatcacggtgctgctctaggactaggactcgtatgcatgggacaatgcgattacggtacacaacccattaacacattagttaatatataaactccattaacatattagttgagttatttattgcataagtgggctggataatgtttgtagaattgtatgaagaattgaagggagtgatgtttagaaacagtgcagtaccgggacaagctgcagctatagcgataggactattaatgctgggtagttttatactgtcattgacaacttaattttgtaggaagcgggaatgagaatgtggttgatgaattgtatacattttcctacgagacacaacatgaaaaaattatcagagcctgcgtcatcgccatcgccatggtcctctatcaacgtgaaaaacatgtaaccacacactaatttatttaatatttcaggccgatgcgattataagtaaattatgccgtgataatgatgccataattcgatacggcggaatgttctgctacgccatggcatactgcggcacaggatccgtacgttcccaacaccacacaattattcatttcccaatccaaactacacaataataattattcgttactcataatccaacactacatattagtaattaccttacctaatctagaataaaatttgtagtcttatgcggtgaagcaattactgtatgctgcggtatctgatgtgtctgacgacgtgagaagagcagcggtgatatcactgggatttgtactttgtaacactccaaatcaagtcccaaaagtgttaaaattactctcagcttcatataatccacacgtcagatatggcgtaacaatagcccttggagttagctgtgccgcctcaggaccctccgaagccacaaaaatactacaaacactctcaactgatcgtagcgagttcgtacgtcaaggtattttccactctttactattcacgttaaattattatgagttaatactcttggttatactcaatttactctgtcatttgtaggcgcgtttattggctgggggttggtgttacagcagtcgagttatgaaagtgcgaatgatatgttggcggtgactgagaattacctatcagtgatatcagacaaacaccaagatgtaatggcaagattcggcgccattataggcctcggactcatgtccgcaggggtatcaccttactacccgttacctcgttaataatgatttaggggcagaattgcatagcgtcgttgtataccgtgagaggaaatatgaggagagaagccgttgttggattcttaatgttcacacaaatgtggtactggcattcatacatacacttcgtatgcctcacattccaacccacatgcctaatcggtatcacccattattccccctttatttccctttactttactatttcccctttattttcctttattttactatttcccctttatttccctttattttatgtcaaataagtgtattgtggtaaaatgctataactttagggttaacggaggacttgagagtcccgataggatacaaagtgttatgttcagcgccgccaaagctatttgattatattccgcacctgagtaagaacttttcccaggataagaaagatgaagttaccgcagttttatcaatctcagcaaagagaaacgcctggctgtcacataaaacacacccagaacctgaacctgaaaaaaccaccaaagcagatgactcctcatccatactctcagacgggaaatctctccggtacccttcacaccattattctctcacttataccattatctatactattaattattatatactattaataattgtatacgtgctgaacgatgttatagtgctgagataagtagtatagctgcaacgttgggacattcgagtagaggctcatgtgcagattcaagtgtggataacaacggcgacatctcaatgagtaacaatggcgatgtatcaatgagtaacaacgaagacatgtcaatgagtaacaatggcgacatttcaatgattagtgataatgaggatgtgtcagtgtcgaagatgggcatatatgattcagcaattgagggtttgaaatcaaagcattttgaggcttttaccacacagttggataatccatgtagaatgttaccaaaacaggccgttttctgcacttgtaaagatgacaggtatgaacctgtgttcccagaccgtaactacggaattacactactggtcgataaccgtccgggaggaccggaagagtacctcgtctacgatagcagtgaacctgaagccccacccttcacccccttcattctcgatgaataacactttcatacactattccattaatttgacattaatgtatacaattaaccattcatgtttagcattgtatttttatcttttgttgtatttgatatcagtggattttacagcattatatacactattaattatacactagtgattatacactagtgattatacagtgagggataatacaattgagtaataattaccaggggatattaacctattaaaatatttccaggccatataaaagggtaaaacactgttaaaagcattagaatagtaaaaacagtactatacagtacggctggataatatacaaatctactgataccgtggaaactggtgaataaatgtagtgacatgcagaataaaattaaaatatataatgagctgagtcgcattttgtactcagacacaaggcgaagttaaaatggaaattaaagattattcatgaggtcggtgaagacaactttgctaactgggctccatctaccatcaagcttcacatggtattctgacctcgagttatgtgggctgtaaactaagacgtcagccaggtacttttgtttatctttattgtaaaaatgaactccgacacaggcctcgacgtccacgttacgctcaaatatgacgtgatttccgtccctaacaacgccaaagaacttaccaaaagttgggtaaaaagactgaacggacaatttattatcaaactggcccgttacatagctggcaacagaatttggcacacgttttgaaaaatcaagtctaacaagcttcgtaaaaggtattggggcattaaagtgcctgaaatcataactctcaggtttagactctggcctatactcaaaactatcatcaacaaagtcggaaggttgggttaagctagttttctcagataaattgaccgaggaaaccatgaaataagtcggtgacggactattgttgagatattccgggtaatagaaatcttcaggaaaaactgagtcgtcagatttgaggaatgtgaagggttgttgttctagactggtccaagttttcccgactttgaggaagttgaagaatctgaacttgaaatcagcgtttctaacgagtaagcgagccagataatgctccttgccagatttgtaggcccaggctgcaacagctctctcacctggtttcgtggcaaaccataaaggtgtcacgttgtgataaacttgtgtggccgcaaactctgttttccactcatcaaccagcgaattctcaacgaagaagctatcgaatttcttgaaattcgttgtgctactatagaataccttctcgctactctgagttaaatctaaattaagtgtaaattcctgagtttcaacgtctgccttgtacttgttaagcaaatcacaatagtgtccaaaagaggttttataccatttgtaactttccaaatagtagtaatagtgttttggacctgcgagttccgacttcacgtagagcaggaatggcattcctaccttaagtgaaagtagtacgagccgggcagtttcctgctcacacgaacttgtccagacggtttcatcaccgaatagcactgatgttatgagcttctctttcagaggcttgtacactgtataggtcacgttgtcgaaccgggccgtctcagtcacgtaccggctctcatctgagccgaagaggttcagggcaaaccggtccggctctcccaacaccaaattaagcagtaggagcacgaaaaacatatatttctgccacattttttagcggaatatacagaataagcttcttcatgccatgtgcatggggataattttcctgtctttcaaatttatccccttttctcacttattccaccctatcatcttgaggatgttacgtttatcctattgttatttttttacttcttattcctccggtaaatactcgttggaagttgttccggaattacatcttcctcctcaccacacacctcttcatacacatgtttctcaccctaaattccatactatttcggttacttatttaaaattctaatcctacatttatataactttagaattttaaaactagttataaaaattctctagcatggaatatacaatagtattatattagtgtacagatttgatttgttgtaataattgtgtgaattcttgttttctaatgtacttccacatgccgttgactttcttgagatgtattgacgctggtcttgacgaggccagcatcacgtctgccagcacgtatacgccgtcgcttgagtacaggtgaactcccaccgaggcttcagtattactcatcctcgcgtacatcttaactcctctttccgttatcccgttaaagtactttccaggcattggctgtatgaacttgaccttaactctacggtcgagcgtgcccgttgtgatctccacaaacctcttatccgggttaaatatatccaacgacatacagtcgtacataccataatacggcaccacaaaaccctccataaactcatcaatcaaaccatttctaccactactgataatagtgttatcactactattactacttagagtgttaccactactagtgctactatttagagtattggcaatgtttagagtgttgttggtgttaccactgctagtattaccagtactggtgtcatgtttggagagcgatttatagtatgagaagtcgtagagtgttttgtaggtatctaggggatacgagagtgggaactcggtaactttgggtgagaaattatactgcggataataaaagtcctctaaacctctaatcacctgctcatagtgctccttcaacacctctctcacctgcccatttattattaatttatatttttttacactactgtttacactactgtttacactatcatttagactattttttacagtatcatttacagaatcatttacagtatcatttacactattgtttgtaatattgtttgtaatattgtttgtaatatttgaactggcatttgcggtatttacagaattatttacattactatcacttgtattatttacactactatcacttgtatttccatttgcagtggaattaaagctggttatgttattggtttggttgatgttgagggatttgtggagatttgagggtatgacagacttgacgatattgaatttaccattaaacaaataatatacaagaacttttgaattttgagtgttgtcggcgacgacaagtttaacaaggtacggtgagccattatcataaacatatgcggcaataacccgttcattatccttggaagcccaaatgacctccagctggttcataaccttggtaattttatatgaaggttttggcgcatagtaggagtatccctgagctggtatgtagtaaaatttaccactagccgaaggtaaatatatgtccaattttacctcctccaccttctcatacgataatgcactcaactgctctatcttctccttataatatgtcaacgtcgttcttatccaacatgaattatttatataatcctcatccctcaaatccacaccatcaccaacactaccattgatgctagcgttaccactactactgataatagtgttaccactactattaatactactattgatgctagtgttggtactattaggactgctgtgagaatcggaactgtgtgtccgtaagatctttttacggaaataaaagctgttaatggtattgccgatgctgatgatggtgtacattaggattggtatgttacgttcataggctacgatggccagttttaaattttcatcacggtatgggttccaaacctttaaaaatgattcccggaccctatataccatcgcatcacctttcggtttaaacacctggtagtacacaccgtccaaatgtcctttctgtgtaaacacatactcattggtaatggacatgtcaatatacagtaaactggggtcagtattacttgaaacaatctgggttccaatcttttgaggtctgaacggtgggaagtgaattagaccaattttatcgaaaaaatcatattcaggatgcagaaaactgtctggatgctgaattccaagtattcctgcgaaacgaccagactcaactggtcgatcccaacgcctgttcttctgataaaattccaatagctcagacccaccatcagaatgtttaatcaataacttaacatatgaaatgttaaaaccatccagacgatacccccaaacagctgcacagcgactctcattatccttagatgaccaaattgtaccgttaagatgcactcgccaagctaaataaccatattttggcgctacaaattgtactctatacttattattatactcgtggaccgtggcgtaagtcgtcaatgttgagttattatcaagaaatagtgtgacacagtgtgactgacgcaccttttccaactgattaatcagttgtttgtaagttgaaccgtcaatcggatcccagccagtctcatattttatataataattatcaatggtgaattccgggttatccctcaatatatacaagagataaggcgttttatgtttataagccacgagggcatatttacaaaattccaccggagaggtcctgttccaaatgttatgttcaccttcatttactgaagttatcacaacacccggcaaaggcttaaaatatgagtaaaaaacgttatctaaaaattgttcgttgtattccgcacaggaatttagtgatctaactgtaatgtcaagtttccgcaatttcagcgggttaaagcagtaggaaaccgccggtaagattaggagaaggcccaaataaaccattacttgggatttaactaactgaatctaactacaaatgttggggcattccaatacaggtgtgtagaagctgctgacaaatatttatccataaaatctcgaaattcactatattgtcatatttcaacttcgtccttgttattttcatatttttttataactaattcatttttatacttaactttactcataactttagatccacaactttctatttcactttccatatctatgcactttttatacacctacacatttcccccaaatatatatacaaatttataatattatctaggtatatagtggtataatttttactatattcatatttggcgatttaccaaaacaattcaaatgattccaaaatattcagccgaatttaaaacatcttaacgtgtttcaacaaatttaaaaggggcctgtgaaatcctcaaaacattcacagaattcataaatgtctcctggtcaatatattcccagttatccttgttttttctcagatgtaatgtcacatcttcgttcttaactctgacaagtgcatctgccaggtacgaggctttatttttaaggtatacattaaactcatagcatacgtgggtcgtatgatctccgtggaatatgacgttgtgaccctcataaacagcactgaagtattttcccggcagtgctctatacgtgagtaacgacaatctaccatcaaattcagctctgacaacttcgtaactactcatattcatcggagatgacaagtccaaatatacacaatcacttgctgaaattggtctgtaatatattttatacttttgcgacactgcttttctattacaaatcttatccactactgcgttctgaactgctctatcagttaaattaggcaccggagatttcacttcagcacctccaggaacgtttgtctcatctttatcatcagaatccaaatatatattatatacatctttcggataatctacactattagtaacactatgagtaacactgtgagtaacactgtgagtaacactatcagtaacactgtgagtagaatcatcagagtgtaagctcagattatccaatgcttctgataattttgtattcacataatccggttcagttttttcaccaacttttgaaccagttgtttcaccaggtgttacggagtgtgttgtagtttcactagctgagtgggagtgagtgtgttgtggatatggacgaatatcttgattgaagagatattcggggttataaaagtctactggttttttgaaggggagtttattggcaaatgagcgtttaaatgagttaaacaggtcccatttattcccaacattaatgtatgagaggacatcacaggtgtcatcactcaactggactaataactttaccatgtaagatttaccccaactgtcatatgcccaaactgcgacacacctgtcaaatgggtttaaaggttcccaaatggtctgaactccgtcaactaccctgtgacacgtcgctccgaacctgggaagataaagtatgcaaggggttttaccaagcttatattctactgagtatagacttgattctattttagagtttaaatttattgttatatcatcagtggcaatattcttcttaagattgtcaatgatgtttttatagtgttccaggttagttctcttccattccccttcagatttttcgaaaaataaacttttcaactcatttcccaattctaataataggtaaagagctatgtgttgaccctctttctgaggcgccatcacatgcacacatctttcagactcagattttgctttccaaacctcagtcttacaatcaactacggttctcactactgtatcagacgttgggttatataacttataaaacacattatcaacacatctcaactgtgtaaacaaatttatcgccgtcaatgatatatccaattttgtactcaaatctctactgtcgaaagtatcgtcagtatcttgagtttgaagtttaaatttgtaaaattcatttgttaaatcatagtaaggttcttgacacgcagattcaacgtagtcaacatagtcataagaatgcacatgatcatgaaatccaaatgtattatccgtatcttgattctgtaccttatacttgtaaaactcatcggttaagtcaaagtacggctctgttaagtgatctggctcctgtacttccatgggaaatgtttcaaccctggaaactgacaagggtttacaagtaaaagtataatttggatatttaaatgattctggtttctggacatataactttttatcatgaacttcttccaatgtgtggacgtgtacccatttattctttagactgaaataggtttccaatttcgactcctcatctgcatttgttatcaggagccttatcatgtaatattcatttaaatgtgagtaacaaaaggctgcggaacatctttcgccttcttttttagcgttccaaagcttctggtttttaaagtacacgtgagaggcgaaataacctactgctgacgtatactgagtataaggagcttcttccgactcattttctaccgataccatgctattatttactgcgttaaacaggttaaaaccaaatattccattaactctaacttcatttttaacttccttcaaaagattgcaatagtcaactatatcaatttttttccactgattctcttcctttacgtagtataaattaaaaagcgtgtgccctgagtcaacttgaaaatagagcaaatatggcagttgtttcctgtatgccaacagggcatatacacacgttccaaaaccgtctgattcccagactttattctccgattcgaagactgtaactgcatatttatgcttcaaaggcgcgtaatgtttgtaggaaacgttgtcaaactgggtggtttttactttaaaaacgtcttctttagggtcgtccaagctgagcctgtaaccctcaagctctgagttaacgaaccccaatgacaaaaatacaactgccaagccaaaaacagagaaccttttcattctcacattcttccgaattatcggtatggaaatgataataccgttctatggggatactatacacattaatacagaaattattactaatttttccccaaaattttcaaatcttccatattttctatcaggccatcttattacactgttttattatattattattcctatttattgtgtttctcaggatgggtattttaaaattagtttgtcatgtcttttattcatttaactattatttttatcactaaatacccataatattagttttatttatataattattatttatttttacattttttatcctaatctaacttcataaatttttataaaattacccttccaaatgttaatctacacatttatacacaactatacaaatctaacaataaatataattctaaacacaagtctaatgtgtaaatgtgtgaaaaaattttcaagaggaattaattggagtcaattggtaggatgtaggatgagtttggtgagtagaggatgtttgattgttggttctcgttttggataaccatgccttggaaacttgtgttttgtggcattggtgcctcctctttggtgccatagtagttgtagggtgagaggtaagggctactgacggaggttaatgagcagttgtagcctgacatgtagttaaggtttgggtcaagagggtcgacgttatgcattgggtgtagcatcttatagtcgtgctcactgtcaatgttacttacaaccatttgttcctctgcaaagttccttgatgggcttgtaaagccattaaaggagggcatgctgaagctcgaatcctgtgattggctgtagtcttttggctggctgtactgctgtggctgtgagtactgtgattgactatactgtgactgtgagtagtcttgagactgagagtagtcttgggaatagtcctgtgagtgacagtagtcttgagagttcacaaacaggttacaatttccccacatcaggctctgattgaacatggttggagtcatgtcaatcatatctccttcaggtttaaccctggcaactcttgcgagtgtgggtgtgacctgtttctcatgactcataggattattgatgaactttggcctgagggcatcaaagtacatatcacccatgctggcctgagtggaacaactcataggtgaacgtttgttggtaacctcagttccaaactccttgtttgtgggctttcttcttctccttgtcctgggctcgttctcatcgtcaaactccggcgaagtcttaatgtaatgtgagttactccagtcatgcctctcacgcctgttcttcctcaaactacacttcggatgcttctcaatgttcttcataaactcaattgctgccaatttcgctttctaatatcaaattatcacatatacaattaaatgtataattaaatatataattaactatacaattgactatataattgactatacaattaaatacataattaaatacataattaactatataattaaatatataattaaatataaaattaaatataaaattaagtataaaatacctcaacatccatatcgaagtatttgggatgaaaggttctactacgtctggttccctggtcgtagtagaaggcgagccatgctcccatgcgtttgttccagcttacgccggggaatccggagctggattgtggcgaggctctgggtggcggtggtaaaatgaactttttgttcgagtacttcttgccgtttttgaaggaaacggtctttggggcggggctctttggcggctcaggtttgggctcgtaggcgtcggctgccttttggcttgcctcaacgctgcttgagttttctaacatgttttcgctagaatctcccatcttggatatgatacacttatagtacagacaaatattacaaattaaaaaaacagaaaaatgaacataataaaaggaaatgtgtgtgttcctttatccttgagaatattttacaaagtgattaattttagatatagtacacgaaaaccaatttagttaacttatttttgtgattaatcgaaaattcccgacatcacaaggctaagaagcaatgcttacacacctgacaataacaagtcaaaaaaattagagataaaaaaattatcaacagccaaaatataatttacaaattaattctgagcttttgctacaattccgagaattcacaattttcgacactgtaagttatcacaaacatgccttatttatcaactttacactaaaaactttaatgtaaatgctatgttgtttttaagaatcactgtaattccaggcttcttcaaaataatcacaatttactttacacctcaacaatattaacacaacaatcggttaatacaacttttgtgtgtaaaaaaatgattataataatttatttttagttgtttttacaattcctatttatttacaatgatgcaccctcacgcattattcaggtgtcatacatgtcgtttttcgaacacccgtgagaatcgcatcttctccaaaaatggattcgtgcctaatattccttaaaggcaaatttataattttaattaccattttattcacatttcttccccttttaggggagaagaactttgtttactctttccaaactcgtgattccacgcctgatgggaatattcccacagtcgatgtacaaatgataccacaaaaaaggtattccaatcccttacacattaaaacattattttctcccaatcacacttttaaccattagtattatgaatccatgtaattttagttatttaactacttaatacaattatttttatatccgaacattccaacaattgtttaatgaaatttctttacacatttaactcagatggttatcttccagccgcgaattccaaaatttaaaaaaagaaatctcttatgtcattgataaaggttccaatacacgtatataatttatatataaatatatttttagtaaatattacacaaccaaattgaaacttagaataatacaataatataatagtgaataatacttattagagattgagaaggagaagaagcgtttaatggacatggaggattctaggtttaacaatattaagcaatcgattttacaacttattcccagttcgtattttcaatataatttacgttaaattatataaataatttaattttaatgtgatatagattccaggaaaaagtttaagaatgaaagttaatgttttaacccaatttggactatgtacactagtttaagctaaagctttagattctttattttcattttgttttattctttttaattttaatttcaacctgtaataaactatccctaatgtgttattttaaatcaatttcattctattcttgtatttgcatatttgtattatagagattctgttaaaataacaatttctttttgtattatagtttttaattttattgttttttcaatttaaaatgagacctttaagtgaagacgaagttcaaattgttttaaagaaactagcatcatagtaatttttagtccgttaataatattaattataaatagatgtaaaaatatgttttttcttagtattggagataaggttcttcaaatggttgaaaataatcaatttggacaacattacttccgcctacacaatgaaagagtttattacataaggtaaccatgctatattacgttttatatctctaatttttcttagttcttgacatatttaatttaagtatcagcctgcaaattcaatttatttctttctttagtgaaaatatacttaaatatgttggctccatcagtagtaaaaaattggtaagtcttattattacaaaccttttacacatatttaacctattttctcacatttaaactatttttcgcacatttaaactcactccaaaatatttttcacgttaattatttatggtagatatcggctggagtttgtttgggaaagttcactaaatcgaagcagtttagattacacattacagcgctagagtacctctcatactattctaagaataaagtatggctaaagatggatcaaccttttctatatggtggaaatgtactaaaggtttgtactacttttacacattaatgatacagaaacatgtcgatcaaattagtgaaggaattgaacagaacgcaggagttgttgttatgtcgaaaaacattcctcttgggtttggaataacctcaaaatccacagagaatctgaggaactcactcccagatgatatcgcagttataaaccaggtaattattacattgtttatatcattttaggccgacatcggacattatttacgtcatgaagaggaaataatttaacaccaacaatttatttttaatcttctacgaaacgttgattacagtacctacaccttacactattaatacatgactagtatgtgattagtatatatttgtggtaaaatggccaaaaataggccaaagtcaaaatttaaaaaacattctaaggataaaagtaagaaaataaaggtttcaaagaatttaatcaagaatataaatcatgatactgttagtaaagattctgtaactaagccacgcaaaatcaagataaaatccgataaagtaaggaagaaggattttgaaaatgtaaatattaaaaaattccagactttggaagaatacaaatcatacatctcccagatttgcacccaggctataacgtacccagaaactgagttaaacaatgttaaccttctttataatattattgaaaagaaaggcggcggaccagaaaacttactggattatgtgaagaagttatctgttctctccttggtttcagtagtttgtcaccttctgcctcgtgtgagccacgagttaaatgaagtgaatttagaagttgtaaagaggactgaaactgcacattcggcgaatgttatagcccaggaaagggaaataacgaacaaaaccatcgaaattagggacaaactgatcacgttcataaagaataatttgaactcaaatccagattttttccttcctctagtttcaaaattagttgagtctgataacagagtatcagatgaacttttatcactgtgtttaaagtattctaaggtatcggaatcctgccttgagtccattaactctttgtttacctacgggtcaattgttgatattcacagatatctaaaattcattttaaagtcttcacacactaatcacaaggttgttagagttattaatgaaatccaaattaacaagaaacacgtaagttattcataattaacataacacttagcaccaatttttactctctgaaggctgtttaaagagtgaaaaaacgccaaaatcaaaattaaacaagtaatcacataataatttattattttgttagggaggataagtacaagaatgagattctgagttggattatcacatattatacaaagtaatttagattatttaaacattaatttagagtattgagggactgtaaaaattacaagttgatggagtcatgcattgatggtttggggaagttcggattattactggaggagagtttacaggtagaacttctgctggagtttaaaaggatagtaaacgattttattgataaggatgtgaagaattacagcttaataatatcaggaataaacgcaataattaagatagtgaagctggtgacaaactttgagtataactggctctacgaagtgttcactagattggccaccaggatagttccactactattccagggagaattacaattcaacaaacatcctggatcaaatgatgaagtcaatggtgatgaaaatatggatagaaaagagacgaaaaaagaggaagattctgtttatttcacttggccctgtgtaacaataaagttcttgaaatgccttgataacatttcaaacctgcttctaaaatcgaatattatcgcagactttcaagttatatctcagctggtacaggttttagtctcaatttcaccactcgttgattctgacgtagcagtaccacttatgtactatgtaagttattccaacatttattgttaaattcaggtcaatgatatagtttcaaagacgccaaagctccaggcgatcctatcaaaggaaggaattgttttctcagtgttaacaaaggggaaatcgtcatactgggacttgaaactcttaaaatctcactattcaccttacataagttccatatttaaccaatctaaggagccaaacacagtaattctaaagccaaaacatactcctacacccttggtactactcattcttacacaattatccattaaaattcacaaaatattaaacaattatacaatattataaataaatcttcttcttatttatttgaggattaaatgtaggaatcgaggggtgttgatgctagtaaattttataaccaaagcggcctggagatgtatcagatattattttcagtagattttttcgataatttaaagactttaaaatcttaagctgcaaaacaataattttacactatgtataatgtaatgtgtggtttatcagtttccactttaaattatgggaccagaattcataataaatatattatttttataatgaattttattaaggggatagtagatggaatattggcaactgatatagactcgagtaccgggaaatccaagtattcatacgaccctgatgtcgctcatgatgattctgatccacattccctgggtgatatatttcaaaatcgaataatttcaaacgataatgtatttttaaacacttcaatttctaacctgagtgaattgtacaaaattgagagagaaaactgtattaaaggactggtgctccggtatggcgaaggctgtgtacaacatctttcacagttacttaaatctaaccacgaaactatactcaccctttcaaaccaaatccaaggctacctctctgcattaaatgacgttaacagcagaatggaatctgctgccgtagagcacttaagacttaaaaatgagaacattaacctcgttcaaggtctacagctccttgaatctgaaaacagtattctaaaatctcagctagaacaggcaaacataaatataaaatcaagcgaaaaccaaatttcaatgctaaatggtatttaactacttaatattcacaattttgcacattatataatccatttaatatttttttagaacttctgagggagaataggaacacttttgataacatgaaggacagatgtgaagagttttacacactaaaatcgcaaatcgagagtttgaataagaagttagcactttctgaaaatcatatcgctatgttaaataaggagagagacgagttctggtcaaacccaaaccataaattaacagacaatgtaagttcacaaaaattgtaaaattaatgcttaggattataagaatagaatactagaggctctgcagagacaagatagagcattatctgtagctaaactcatggcatcgcaaaatagtcaatcagggtattttttactcaaatttaaaatttttaactaaattatttttttaaactaatttaaatgttttttagtcctaaaagtactggaattaatcaagaaacccatcaggaaccagctgttagtactaatcaaattaataatttatttagagagaagttgaccttaaggagctttctgatcttagacttagagttgaccagcttgaggatgagaattcacatttgaaggagattaatgacagtctccacacaatgtgtgcagatattagcaaaaatttaaaggaagttaaggctacatacttgaaggagtcagttgataacatcaagatgtttatgcctaccaaaactaaccctatacaactcgttttcgttcagccaaccggagttttagaccttagtttagatcaggaatatttaagtaaactttctcaatctaaagattcagattatagtaaacaacagtatcaacatttggatgcgtctcacacaccacagtctactcaacactccacttctaaggattctttaggtttaaatccttcacaattgcaaagcaataaacccaaacctcaacggagacctaagaaaacaaagatgaatttaaggtcaaaagtaattaattacgtgactaatctcgacgcttcctcaagctcagagagtgacgagactcatcctcctcaaactattcctcaagatactgaaaataaacatggaaatcagcctgaaagttcacgacgagccgttcgatctcaatttgaacctaaagtgcatcaagttgaatctcattctgaacctaatgttgatcctcatgaacctcaagttgttagaggtttagataaaggtcagaggctgagtagttggaattcagattgggactttttagaggaggatcaatcggcttcaaataaggaaacaagtgttcagcctagtactgaagaaccaaaagttgatactttaaattttaacaatagtggttcggatgagaacaaattatcgcatcctactttctcagaagatggcatcttcgactcaatcataaatgaacaagagaacgagaattctgatcaaaaggtcgaacccggtaaaagcaaggcttgggatgacctggattttgatacttctaattcatagaataattctttctattctaatatactataattgtaatataatagtattttaacctaaattcaataataatatagtattatgatagtagtataacactattttagcagaagtataatgtgtattatattacaaattgtttatcctattgagtacagtattaagttcaggatgagtttgtgatagttccttaagtgatctaagcaaatgagagcacttctttaactggtagtctaaagagttttatgtaaaattcaactgaccagtgaatgaatttagtcttttgaaaagtgaatccttaaccaagtgaagtttagaaatccttgaaaagctgagtatcaagtttattgtgactaaagggcctaaattagtggattcattattgataattgatgctagagcctcgtataagggatcatttgtgtagtaggaacgagcaaaaacaaatgcaaagttctctaaatagtcttcaccaatagggcccttgtggtcaataattcttctggaaacatagtcaaatagctcaggtttaggatgacaagaattaattaaataggccaaagacctgaaaattttaattaaaacattaatttagtattaattacagtaaaagtaattataatattaaataccttaaaaataattataacattaaataccttaaaaataattataatattaaataccttaaagaaacttcttctttactggattgaaccctctcaataaaataatcaaacagttttcttatcgaatcttcaacccttttatccactttacacttgtttttattccttaattttggtccatacaccataacagtcaggtacattgaaaggacacagagtttagattctgtgaagtcagatttagaaagaaatattaacaattgatcaagaaactgaaccattacagtgtcaataaagtgtgaaaagttgttctttggaaattcagaactgtttaaaccggctggaattggagttttaaatagatttataacagaactatcagctaactcaaaaatgaaaggatttgataaaatgccaggataaacaagtaggttattggaattaaatctcagtggtcctgattggccacttctaaattttggactgacattttcaaatgaattggagtttaaaccgtcaagaatatctgaaaataataaattggaagaacaagtttcttcatgtttaactacatttgaggttttattttcaaagttgtgagtatttattctatggtacagacgcaatttagagaaaattttaagtaatgataaagtatttgatgagtttaaatattcgataaaatgatattttggtacaggagtattaacttgccttaatattccattattccattccaattttagagtaggaacatttgaattgtaaaacttgttgttgtattttaaaaacaaatcacttgtactgatcaagatgtttatacacttatcaaatttgcattcttttggatgtttactcaaatatttaaggtaatttatgaatattagccactctgtgcgattcttaacaacatcatgtgtcaagggttcagatatagagttaggagttgaaggggaaattgatgaagttaaattcctcttatgtttaaatggaaggaaacagttgttagatgtgttaacaaagttttttagaaatctgaaaaatagcattatccattactttaaaattagtatagaataaagtcaaagtgatcataatataaacacatatataaaatataattacaatatcaagaatttgtttaaaatttatataaaaaattaacgaaattaattattaggtaaagattctaattatactgtggtgtaaaataaaacataattataattaaatagtatacaaattttcaaaattaaacttgaaaattatttaatataataatgtaatgtctaattacatattttaattcatatactatgatgataagagcacataaagtatgagttcatcagaggataatatcaacgaggaggataataccgatgaatcatcatattacgattcatcagatgaggaatcatttgacgagtctaaagtcggaatcgcactcgagcttccaaaaagacaaaacagagggaaaaagtcggttttaaaccgttaattctggttttagatacacccagctcgttggagaggaactagaaaaagatcagcagttttgggggcattctacatggcaagaagatgaagtggatgatgattacaattgcagtgaaggagaggagcagtacgcttactctacagattcagattttgatgaccctgaagaagaggtacagaaatttcaatttgatattaatattttaggaaaatgaagaagtcgatgaatcccaatttaaggaaccgaaaaagaaaaagttcggtgcatatgttgacccaatgctgctggctagtaagagaactatacaggccttgacgagaagaaaggtatttaattatctatcacaacttttaggcacctgattcaagcccatcaaagaagcaaacaactccgcaatataaaccaacccttagtccagaaggtgtgattacactattaatattcaaattattatctatatattaatataattattaatataatttgtagattttaagagagaaaggcgtgaaactacaaaacagaaaacagaagctattcgtgagttggaggagtatcgaaagataaaaaaggtttttattttcatttaatattttattttagagaaggggttccaataggggcagaccaaagactagaacgcgtttaccgaaagtatacacacaggaggaacttattgaagaagctaaaagaacagaagaagctaataggaaatcactaaaaagcctacaagcatgggtaatcattaaaattatataaaatatatattgaatatataaaatcccggtgaatataatataatataatgtaggaagatgaaagaaagaagtatacagagacgaaaagatcgacatataagggccattatgatatttggataagctggaattcactactatcagtagtaaacccatacaagctagatgaggaaggtaatccgatggaaacaatctcaccacaagtggaagaaaaacccctagaactttacatgttcacaacaggaaaactgcctgaatattatgaaaaagcaagaatggataagatagccttggagagcagtgagaagccaaagtgcgccatcacagggcaggaagcaaagtatctcgaccccgtgacgagaaaatactatagcacagtagaagcctttaaaatgcttcgtgtacaatataatgatgaaaagtcggatataacagaacccaaaatttataatttaaatgatgaaacaccaaactacgttaaatgtgaggattaaatatgatccacaaatttaaaattttttaatttttcctaaaatttatattttttaaatattttagattcaaataattttaaaaattttggaaattcatcaaacaaatcaagtagtgatatggttatggtgtacagatcgcctggattttctaatcagactatttaaacttaaaatcaattaattttaaggttccaaaaatatggagccgccaaacgaaccaacccaggctccgtcgaagcctgaattcccatggttgccgaaggagtgtatctttactatgcagcaatggctatatcgacgaacgcttcatacaaaaagatataaaaagagatacgtggtactgcacaacgaaagactttatagtttcaccaagcttccgtcatttgaaaagtttgatttaaataatattcactcagttttgagatcagcatcaaatagctggattttaacaggatctgtagtatcagcagacccagacgtcaatacaggactctttaaatggaaaatagagttcaaaaattataagaaaccagtaacatcaattgagaacatcaataagttcttgacagataaaccagatttgactataggaaatgtagatcatatagactgtatatttgaagatgtaacatcgtctgttcttgaaaacaagagcgcaaatatagaaccgcaggattgtttgtggtttgcaacgactaatcataagatcgcatcagtaagtgttatgtactaattaatataatgtaggactggctaatagcactattatatacatcaagatacgggtctctgtataatttaatatacaaaaatccgtctagaagaagatttcagcagttcacactaccatggtacctgatggcgttggactactttccaaacctatccaaggatgaaaactcaaaacagccattaacctcgtttacatatataaagatagagattaaaagggtctttgacttcccaatgctcccaaacgcaaaaatctactgcgcggtggagtttaatagtagtttttacattatacaactgcatagatttgaacacgagaatctcacctcgacaccctcagcaatggtccgtgacgacgattcagtttcaagtttaacagcatacattagtagaaactcggagtactcgattcataagctaccatcagatgaattaagtcaaatacaagttaattgccagaagacgtatttaggagatgatgaaggctcacaatcaagttattatccaactaatgtacaattttcgacattggaaaatggtattggtaaactcaatccccaattaaacacagtagcaccgactaatacaagtgtaccaaattcagtagcaggaccgccagaagatgaccctcagaacgtaataacaaggcttctaaacttaaactcccacaaggatatcaagaagaagcaggtcgtggaaaagagaagcataatttatgacggagcatcagtgtacatcccagtgtataaaaatacaacacaagaaatagtatggctgcatttcttcggagactatgacgtgtatatgggaacagcaagcattagggatgttgattttgcatcaagagacccagcgccagtgaagacgtgtatgataaagttcattgagggattaaacccgctacactataaaagagtagacgtgtcaagctataaaggcgagtcgacagtgttgaacaagtcaagcgcaaggtcaatttcaaacgatagaggatttgtagaattgtcagtaataataccaaaacacctggggaatttcctagacccagtgataatatcgcatggatcgccgaaagaatatttatcaaacgcaagcagatcatcaatatcagtaggaatacaaatgttgatagcaaatataaagagagtcagacagtcgtttacagttttaaaggatataatacacgcattgaagtcgatcctggagtttagaagtatgttcacctcattcacagcaatgttctacttcatactggtctttggaatattcccaaaccgaatgctcgtaattttcctgttgcccatcctggcatatatagtgtgcacacacccaagtttcatcgatttaacgttccttttcttgctcaaattcccaattttaatcgcaattctgccaaagagatttacatacccatttctgctcatgccaaagctctcgtgtatactatgctctaaaaagccgagttttttgaaacagaacgcacaaattgttgatccagacatggtctcgaaagaggaaatctcatctaaaacatttcagtactcatcgaataagaagctgccaaagtcaatgtacctgaatccgaacaccaacgatgaggcagaagtcatagtgaaccccttctcagcagcaaacgcaatacaagtaaacacagactcaaataggaaaagagacaaatcacaagattcatttgatgaaaataatatgttgaaccagccaacctacgtggattttgagaagagaatatcagtacacctaaatagcctgccaatgatcacctcaaaacacttgcttaacgactcaatagagataacaagatacaaaggaaccagaatcgaaacgtgtaagcatagaggaatcatcatgtcatacctgagcgtgatgtttataaatgaaatgggggttgaattatttgatagcgtccacggagacgggctctcaataattaaggggtaccacgatatatactataacataccgccatacagacacgtgccattctggcccaacgtgaagttcacgttgtatttcttgttttatatgttctttttgacgttttttgggggaatatcgaatttccagctcctgcacctgcttcacagaaataaactcatttgcagactaacgctggagtcgaaaggagtagttgaaacaaaaccaaagagccaacaacaacaaacgaagcaaaagaatgtatcgctgtatgaaaatgaaaggaggattttgttcggaaagttttcaaagcttaatttaaggttctatgaaagggggtatttttcaacagaagacggccagtttgtgtcagtagacttgagtaaatacttagtgcgcttggtagtcaatgagaacacggatcaagaaggatggacatacgcaaagaattggaattcacagtttacaaataaaccaaattcaatgacatttgtgaggagaagaaagtggatactgaccccaaacgatagtaaaaacatagagtatatactgaagagcagattctcatcgaaactttcatcagactactttgtaaacatggcacaaaatgataaaaacaaccaagttgaaaatgattgtgttagcctaacaagtgacgaatcgtgggggacctcaaaactatcaacagcaaacgttaaaaataacttaaatgagatagcgttggaggataaaaataagttagttaatggcatagggctagaacaattagggattaatgaaaattctaaagcaaccaagaaatcaagcgacacaaactatgacatatcctctcaggatgatgaaaacatagcacgactgtactttagaaaggggaaagtgaagagattagttgacaggataaaggacgcaagagaaaggagaaagactcagaaacaagacaactcaaatatgcagcaatacataaactcactagtagggaataaaacctctgataaatcaagtgacattgataaacaaaaacaaccaaggagattacatctgctgcgggcacttagaaaggggaaatactcagaaaacataagtactacatctgaactagggaataaccacgttaataacttgttgcaagacacagaacctgaaataagatcagtatactcaggattaagatatagagaaaagagtgagtcctcattacaaacgatttcagatgtgcaaaatgaaggtgatgggaatgatttattgatgtcattgatgaatttgaaccagaatgacccttcacagacgatttcagaaaacgagattttcctaccatcaacaatcaccctaaaccttaatgaagacatattaccccaaccatcaagtctaaacgataccacaccttttgaccctaattacgtgaaaaagaggccccccaaagtaacaacaatcaggaagttgtacagatttacaaaaccgctggaaaaggatataataacaaaagaacagtctgccactaagttatccacatcaaagatcgcaaagttggttaattacttaacgtctctacataacccagacgagactcccatgtcggatcgtactccatactcaacaatatcacaattttcaacagattcacaaggtaataatagataaattgtacatattttgagcatatttgtagtttagttacatatttagttagattatatatatggttacccttaaatactctgttagtattaaatggttgatatatttataaacttaacttaaaatttgatcaggagttaagaggaagagcatgataaggaaggtgtttgagacgatgtttgcaattttgttcgcactgccgatttgcatactgctggacttggggaagctgtttgtgggattcttttggctcctgttgagaacagtgctgggaataccagaaccagtggaagaaagaagaccgacagtaacgaaacaaagggtgttcaagtatagagcagtgtgtagattagcaatgacagaagaagatgagttgtattttagactagtaaaaccgagaagatgctttatgttgggagaaaggttaaagatattcaaaagaatatgttatgcagaaaacatgtattttgtacataacctgaataagctgatgattgactctaccaggaaatatggatcagagtcagattcatcatcagacgaagagtcagtgggatcactaatggcattaagagaaagtatggaaaggtcgttttcgaaccaatatttggaagattctgatacgttattggagtcagatatagagacaataaatagaaacgaaataacatcagaagatgatttggaagatttgagaaccttttcaatgaacccgtttgatttggatgaaagtgatgaggaaatactgaatatgatgagaaaatcatacgactcaacagagaacatagaagagacggtgaaaaaagtaaagaagaagaaaggtaaaatagcaaattacatttctggaatatattctaaaagaatgtcaagaaaaggaaaatatgtagatgaacaacacttgtcagattatgaccaagactcagatgaaaatatagaaacaggtaataaaataggagtaataggaatgttaaagaaagtgaaggatcagatagtaatggcaaattacaaaattaacctgtacaatatgagatttgagaagtttttgaacatgttctcatggaaaaattactctgtgaccaccatagtattgtttttgctgatactgatcataatgataaacctgttcttcagcatagaaatcataatgctggcatatatcctgtaccaattcaaggcaggatacaagagaggaacgtgggaaagaatagtattaagtacaacaaagaggcatataagtaaagcaatagtggaattggagattttcagaccattttgggacctatcaacacaccaaatacaggttttgtcaaatagaatcaaggccttttcgtcaatagagctggaaatcaacacaattagagaagcaaaagacgaagcacacctggcatatatagtgtcagatcgattaattaacgggaaattcgcaagaaattggaaaagatacagatggatcaacaacctgttcaggcaggcaccatgtaaacaatattaatttcattttaaatttattacaattttttatatatggaattatgcacatttaatgttaattacggatacctagaaggtatagtacgtggatatcgatccacattcctaactgccatggattataagaaaatgggagtggcagagtctctagaggatctgagaacagttctggaggcaacagattatacatcggcgtttatagatgaacaggcacaaattacaactaagttaatctcgaaaagatgcaaggaaaaactagcgtcagactaccagtaagcacaaccacataattcttcaatacataggtacctaaggcagcaatcggacggagatttagcagtatttttagacttcatagcgtaagtttaaaaaaattaaaaaacaacccaaatgtgtaggagagaaaagatgattgataatctcatagccctactacaaggattgctaaataaaactgatccggacgagcttatggatagattagacccaataggatggtttcgaggaataaaggcattattgagctcagaaataggccaatcagccgaagaactctatagaataattttatgtgatacacccataggtaggaaggataaaattatataaatgaaaacacatatataaataaatataattattatcaggaccatattttgaaaggtatttaccaacagttacatatacaagaggatcgagcagtaatattgataagactcacaagatactggattctgcaaatatagcgatcatgaaggcaacacttaaaaagatgtggctcgaggacttttacaacttctcggtgtcactaggaggaacaacagcagatgtcatgggccatattcttaagacggaagcagattttaaggcgctctctctcaccctcaactgccttaacatgacacaaacggcagttcaacaggataggaataaactttacccatcaatagggtatttatacccgtatggaacagataagctgtgtaaagcattcaacgaaactacagttcaagcagctctggtgccatatccaagatacgcggaactttatgagtcgtcgaaatcaaatttcagagtatcttcttacacattcaataattttattaggcagaagcaagagtaactaaatacgacgcgagtgagaagtctttggaggacctgttctacgcggaaagcgtccacctgtgtgagatgagcttcgaacaacaactccattttggaatcttctacgcgtgggtaaaactcaaggaacaagaaataagaaatatcacatggattgcagacatgattctgcttaaaagaagagaagaaatctcgagagttttgccgatttttaaatctagggtgtagagttagagaaggaggtgtctttacatatgtgtgtacattatatgaatggaatcattaggaatcacgtgaaaatcaagtggatctatgataaaaacagcttatttaattaaatcaagtaataattcataaatctataaatgtgcttgaaaaaaatcctattttcagttaagagatctacgacattatgtgtcagaaataaaccataatttttttccattcgctaatcttttacggcctcgaacgtggacttgtggattctaatattacaaactctttcactgttcatctagcttttggaggggcagtcgactccggatctttcgaatctataattccaatttccccatacctatcattaaattaatagaatatattaaatacattttcagttcttgtaaaatattgtaacatatccacaatgaagtttcttattttgctatttaacattttatgtttgttcccagttttggcggcagacaaccacggtgttggtcctcaaggggcctccggtgtagatcctataacttttgatattaattcaaatcaaacaggccctgcatttttaacggccgtagagatggccggtgtaaaatatcttcaagtacaacatggctctaacgtaaatatccatagacttgttgaagggaacgttgtaatttgggagaatgcatcaacaccgttgtataccggcgcaatcgttactaataatgacgggccttatatggcctatgttgaggtactgggtgatccaaatctacagttttttataaaatcaggtgatgcttgggtgaccttaagtgagcatgaatatttagctaaactacaggaaatcagacaagcagttcatattgaatcagtgttttctcttaacatggccttccaactggaaaataacaaatatgaagttgaaacgcacgctaaaaatggagcaaatatggtgacatttataccaaggaatggacatatttgcaaaatggtatatcataaaaatgtcagaatatacaaagcaacgggcaatgacactgttacctctgtggtgggattttttaggggtttgaggttattgcttattaacgtttttagtattgacgataatggaatgatgagtaacagatactttcaacatgtagatgacaaatatgttcctattagtcaaaaaaactatgagactggtatagttaaattaaaagactataagcatgcttatcatcctgtagacttggatattaaagatattgattacaccatgttccatttggctgatgccacttatcatgaaccttgtttcaaaattattccaaacacagggttttgtataactaagctttttgacggtgaccaagtgctctatgagagttttaatcccttaattcactgtatcaatgaagtacatatttatgatagaaataacggatcaattatttgtctacatctaaactacagcccaccatcctacaaagcataccttgttctaaaagatactggatgggaggctacaacgcacccattactggaagaaaagattgaagaattgcaggaccaaagagcttgcgaattggatgtaaattttataagtgacaaagacctttatgtggcagcattgacaaacgcggatcttaattacacaatggtaacccctagaccgcatcgcgatgttattagggtatcagatggaagtgaagtgttgtggtattatgaaggtcttgataattttctcgtttgtgcatggatttatgttagtgacggtgttgcatcacttgttcatttaaggataaaagatcgtattccagcaaataacgatatatacgttctcaagggtgacctatattggacaagaattacaaagatacaatttacacaagagataaagaggttggtcaaaaaatccaagaaaaaacttgctccaattactgaagaagactcagataagcacgatgaacccccagagggacctggagcttcaggtttgccacccaaagcgcctggagataaagagggatcagaaggacataaaggacctagtaagggatctgattcatccaaggaaggtaagaaacctggatcaggtaaaaaacctggaccagcaagggaacacaaaccaagcaagataccaacattatccaagaagccttcaggaccaaaagatccaaaacatcctagggatcctaaagaacccaggaaatctaagtcgcctaggacagcatctcctacaaggcgtccatcacctaaactaccccagttatcaaagttgcctaaatcaacatctcctagaagtcctccaccaccaacaaggccttcatcacctgaacgtcctgagggaactaagataatcaaaacatctaaaccaccatctcctaaaccaccgtttgatccatcattcaaggagaaattctatgacgattacagtaaagctgcaagtaggtctaaggaaactaagacgacagttgtattggatgaatcatttgaatcaatacttaaggaaactctccctgagacacctggaactccctttaccactcctagacctgtgccaccaaaacgtcccaggacacctgaaagtccctttgaaccacctaaggatcctgattcaccgtctactagtccatctgagttttttacaccgccagaaagcaaacgtacaaggttccatgaaactcccgctgacacacctttgcctgacgttaccgctgagctatttaaggaacctgacgtgactgcagaaaccaaatctcctgatgaagcaatgaagaggccaaggtctccttcagaatacgaagatacatcaccaggagactacccatctcttccaatgaaacgtcatcgcttggaaagactcagactaactactactgaaatggaaactgatcctggtagaatggccaaagatgcaagtggaaagcctgttaaacttaaacgttccaagagttttgatgatcttacaactgttgaacttgcgcctgagccaaaagctagtaggattgttgtggacgatgaaggcactgaggcagatgacgaggaaacacacccaccagaagaaagacaaaaaacagaagtcagacgcagacgtccaccaaagaaaccatccaaatcaccgaggccatcgaagccaaagaaaccaaagaagccagattctgcatatattccttcaattctcgccatccttgtggtgtcattaatagtcggcatcttataaaggaaaacctgttcagtgggacgttctgatagagtaaacgagtcatacccggacatttgaattatgcatttagttagtttaataaaaattttatcaaaaaaattatttttgactgttttgcctgaaggcctaaaaaggccaagaaattaaaacatgacttaaatagtaaaaaaaataagtttaaagtaaaaatattagatttatattacatttagctctgaagttattaatagggcctatagttattcaattctggactcataaccatttggcgcttttattaatttaatttgcaaaaaatatgtggcagttagtatatcgtgatagttacttaaagttggaggatttcttcctaaggttggtcctgcgccatattgatttccagtgagtgtcatttcccatctgcttactcattgagcggattttctgtcttaactggctgttctgctcaagacagtagaagagtcgctttttaatttcaagctcagctttgttgtcctggtcatacctgacaacaggccttattgcagatgaaaaagagaccctgtcaaaccaaattggtctatccttgtggtatagagtcttttcaacgagttttgtcatctttatattgttaatccacacaggctcagaagagtcctcagttaccgactccggctggaaaatccacgaaagtttctcaaaagactaaaaattttatgtaaaataatgattaacaattggtgtatgatagaatagaataaaattgttatataaagaatagaataaaattgttatataaagaatagaataaacttatataaagaatagaataaaatgagtgaaaagtaggaaaaatttgtcagtatattgttatcgatgtgttaaacatggaaaactaagctgtttaaaaattgaggaaaagtaatgtagatataacacttaccgagtttataatgtcgtgtaatgttctgaatgtggtagtcttgtcatcagagaaagacttcaaaacttcatcaaaaattaaagtacgataagtaatgtaggtggcacgggcaatgaccattgcgatgttgagttgagattgagttttatcaatcctaaaaataataaaaagattaaaaaatacttttctaaaagcctagtgcgttcttcaaagttcaaatcagggaggttttcataatattcaacctatacaatttagatattatttagagataaaattataaaattaaaataaattatgagaaagtcaaaataaatttatgataaagttacgataaagttgagataccttaagttcattgcaagaaatccacagtttgaggagatcatacatttcataggaatcgacaaattcttgtattttatcaagctaaaaagtttaaatatgcttaagaaattacctcatttttcatttcagacttgagtgagtggtatttagcaactaacttagagttgtcatatctaacaataattagtgaatagtgggaaacaaactttgaggaaagaagttttagggataaaagatttgcctgctttgcctttttagtatataatgcacggagtttcttttcaggaatcatattggcctcgtctatagctgagttagtagagtcgagttcctgttttaaagcctcattagactcgatcctgttacccattatctgtttgcaagtcttgagatcatttttcagattcttaatactttcatccctgaggtaaatctcgttcaaagcctgttcaagttcatttctaaggtgagaattctcttgaagttgaagttgcattccttcagagtacagttggctattcacagcagactgggttagcaataaagtattatcgagcttcaagttctcttgctgttttttgagaaagtcatgctcatacttgagcgattctagtctgtttatagctatattagttgtaatttcagccttctcttgaagagcaagatagccagggcgagcattgtaaaaactcttaccaacagctgattttaggagagttaaactacattgtctaagtctatcaaaaaggtcatcggtgtcctctctagttttacagaaaatagccaaaaatgcttggtcgggatctaaggaaatgtgtaaatataaaaggggaaataccatctttttcatggaaataaataatagaagaatcatccaaagattttaattctaaattatcaggaagagtaagaaaatgtgtaggaattccaagcttaaaatttacgtgttctaaaagccatcccataacaggcccacattccgtacccatactttgatcattagcatcataagccaataaacaattaccacgaatttccaaatttaattctttccactctgtgttataaaaaatattatatctgtgtgccttgtctgtgtagaatcggccaccaaaatttatataaaatttttttatatactcacttggccagattttgacaaactcttccattaatttggaatttaactccatagtaatgtcaatgtaaactatgaaaaaatatacaactaaaagtacataatggtagctctagacaacgtagggactcagttgccaaacgatgcattcaaggatttgacatcccagtgcatatcattgcttgaagcagccgtggcaaggtcggaatccagatttgtaattagattaatgcgacattacaaaagtttaagaagtttactcaaggcacatccggcaagttcagtcccatttcttaggtcactcctgaaggaatatgctttcggtgcaaatccctgcccagttgcagaaaaggcctataattttcttccttcggatttattgcctccgatcttttcagaacctgaatcttccgcgaaatccgccgatgtttctgacacaacaaaaccacagttcgatcttccaaaatttcactacacaacgtcgacatacttggagatccaggagtatgtttcacaagattctcaactcactgagaccaaagtcatgctttcaacccttgctctgatttatttgattgatacgaggcactatgacaaggtatcctatcatattatcacacagtaccagtagttatgtagagattcttgtgtatattcaatattattgattgtattaatgtttaggcgatggatttggcagattcacttgcccatttaatgttaagtttgaacaggagaattatggactacctaggagctaaggtattgtctattcagtttaatattaaaatacgatcaattttacgaataccaattaaaaattatatttttaggtctacttctattactctagaagctttgagcttggaggaaggtttaaggatgccaggaagttagttagtccatcttaataattatttagacttttgattgtttcacacagaaaagcatgtctacaccacgacccaatgacacaggcagtaacatttaactgtatactgaggaacctgattcaccacaagctgtactcgtcagctttcaaattcgtatgaaattaatcaacgattttgaatcaacgctaatttttaatttagatatgcaagaccacgttcccggaatacctaagctcaaatgctcagtacgcaagatacctctactactacggtaaccgaattcatagataaaggtttttaggaaaagtactttcagttcaacttgagtatagtgaggcctacaccaagttggttcaatcgctgaggaaagcacctcagaacgataaaactgcatacggattcaagttattggtacgttaaattccatgaaaaattctgcaggcaacaaaaatgtctgtaatcgtcggtctcttgatgtgtgatattccaagcaagagtgtgttcacaaacccatccatgaggagagacctgactccatacgaatcaattgtagttgtaagttttcataaaactaaaatatcataggctgttcggaacggtgatttaagtgtatttttgcagctgtgcgataaatatgcacgctgctttgtgaaggatgacacgatgttcctgatatcaaggctaagagacaatgtaattaagggaggactaaggaaaatcaacctggcatactctaaaattaatttggtaagtacaataacttagtcattcaacacctttaggcaaatgtagctcacaaactaggactaaaatcagtcgaacacacagaaaacataattgcaaaggcaatacatgatggaattatagaagctgttatagaccatgaaaatcaatgtgttaattcaaaggtaacataccataaagttacagtaactattgtgttgaatttataaattaattgtaatcacatattgatgtttaggttaatgtagacttgtataaaagttatgaaccaatgagagcttttcataaaagaatacagttctgtttgaaactccattcaaacgcaatccaggtgtgcagcaaacattgatatatctcctgatagcaagacttagaatgtaacctaacctaataaattcataggcaatgagatatccagaagatccagaagtcacaaaggaaactaaaacaacctcgaaccccgataaagatcagttggaatctgtaagaaaataaaaaataacaattcttcagctggactacgacaatgagttgggagatggaggatatatttagataatgtgtttcaatttgatatacgttttaaatattttcatgtgcgtaaactatcacctgattgtcggaatccacacatggaagcagttcttccaataacatttttcatttatttattttaaattataaactaatgcatggattttaatttttcaataaaattcaaatcctaatggatatctatacagaagatgatttcgacgaaaacaacccggtcacgaaagcaaactacgccgatgtaccagaagaagataagtacgaaaagttcgaaataagtgatgaaaaagaggaatttgaagacgaggactacgatgaagacgatgaatctgatttagatcataccacactagtccaggtcctgtcaaattcgtccacagaatcacgttgtagcatattacaagaagaaatcaggttattgaagctggaaaatgatctgttgctctcaagagaaaaatcgctaaaggatagattagaactcctgggtaacgataacgaaacactcaacaccaaggtcctggagtatgaagtgaaggtatcgtcgttgaataaggaaatcgacctggttaagtgccgctctgaagcgcgccaatcaacactggagaacaattacagggaattgtgctcaaaaatcgcagcaagtgaagagttgaaccagaaaatgaggttcgacctgaaccagcagagggctaaaaacacggttttggaggaattagtggaaaataaaaacacagcaatagctgaattagaaagaagaatggagcacttggcaccttcaagtcagattaccgtaaaactgaacggagaagtacagtctgatgacaagtacaaagatctcaagtatagattacacgcaacggaaaggcaacttgaccaagttgttacagagctctcaaaagttgtatcacacaacactagtctcaacaatgatgcaaattcaaaaactagtaccaaatatctagactaccgagcactaataaaagattataaccagaagtctttaagggtgaaagagttggaagagagactctcaagtgacgaaaacaagtcaaaaatcgctactttagaggacagtattaagatactgaatgaaaaattggccaccagatcaaatgcactaaaggagactgaaagagagctcaaggagttttattcaaaacagcttgacgatttaagaaccaatatttctgagcataaacaaatgattgattcaaaggtccaagagttaaacacatacagagatagaatagagtccatgaaaatggaactggacttgaaaaacaagtcgattatcgataagaacgaggctctaaacagagaaaaatcgcaaaaccacgagatttttttagaaaacgaatccctcaagaggaaaatcaacgagtatatggatcaaatcagatcactgaagctggagaaccaggttcttctggacagagaagcgactcacatagctgagtttaagaactactcaaatgaaactgacttgaagttaaagaaaatggaattggtactcagacacactcagcagatgaacaataagcccaactctacccagaatgacgagactgataaaaaggactactcggagtttaagaatcagctcttggaggaatttagtgagatcaagcagcttctaaacactctggaaagatcgaaaaaggagcaacagcagaacaacaacctaattctgactttaaggcaccagaacgatacaacgatgactgcactgagggaagagaataaaaacgcactaaactccttctcggagaagaacaacacaacccttactgaattgaagcaacagaacatgaatttggctacaacggtgacagacaatgtcaacaaggtcctgaattcactgaataacaacagtgataacctgttgaaagaaataaagtcgcaactggaatcacttaaggatgaacttagggcgagtgaggctgaaaagtttgttccagaaactccaacgaaaacgcctaatctagatgaggcaaacattgaggcttcagatgattcattgtctgaaaagtacaataaactgaaggagtcgtttaaagaaaccacgacaactcttctgagaaaggagaaggtcttaatagactccctaaaaaagactgtcttagagtgccacacgtataagatgcagcttgaggagttgaagaactcgactcccaacgcagacgataacgctggagtaactaaatcatcactaaaatgcagctgtaaagatatggtaaaacgagattctgactcgaaggtcaaaaactgttggtgcagattcaaaaacttcaccaatcttagacgtgccctgtctaggaaggcaatgttgctcgagtctcaagttttggattcgatggagaaaccaaaagtgaagcgtagaactcgacaatctgagaacttagaataatatattactgaaatctactctataaatactagtttactgctccataattatagtatattagtctataaaatcagtttagcggcataactagataggtatgaataatttacaacattatattacagcgagagtttatcgcgtgaaaacaattttgtaattaatcaattcttcaacaatgtttggattggtcttggctatgtccctgtatctttctctcatccacgtcaggatcatatcttcagtcacttctttgctgggatcgaacttcggcatgggaggagtaatgcttctccccgacatcttcttgaatagtctcgacttccgaccagtctcgatgtactcatgtttttcgaacattcctttgacgaagaacaagatcctgattatcgtaagacctccgtagctctcgaaaaggtgtactgtcacgttttcaagatcggggcttagagtaacaaccatatcaccgaacttcaccttgtacagatagtaaccggtgtcaatcgtgtagaggaacaaaacacgcaggtcgttaaacttcacaccgcggggaaggtacccgtcaaatatatcgaagtggatggcatctccgcctagagggatctgcccatccttcgtaaggactgtatgtccccattcggcattatatctcgtgaaatgcccggggtggtaatctagcagaacgtcgtgcaacagcttgttcagcttctcgtcatccatgtcagttaagtccagaatgtcaagctcgtctttgacgtcgctatacgcaccctcggggaaatctatgggttcttcttcctttggtggagtgaactggtgatatggataatctagcccaaacaagtagttgaacataccttttaaagcagatttagatttaactctatcagatgagaatgtgactcgtggaggattttcttcgggaggtggatcttttcctctcgaagttgactctctatccaccgggggaggaatcgtctcttccctcggtggtccaggccctctagaaggcccaggtcttgctattccacgctcctcatcactgcctcctgattgtgtaatgatatcagtgctaacggaagttttgatggagattaaggtgattgaaaggacaagccaagccaggcattgcttaaatgaccatctcatcaaggtggtctggagtaaacaacggccagctagcttccttaaatttttttatagtcgctaggacattatagtgtcattttgattagttaaagatacatttattaacgattctcgtgaagcatgagagattgggcctcagagatacaaataaacaattaaaaataataaaacaatatttaaatataattattatatgtacatatacaaaaaatatacaaaataagggccgtattccatcaagcttttcataattgagttccccatcacgagactaaagcacacaatctatgtaatacggagcacttttatttttttattattcaatggataaaaatactctaaataaaaatgatgcctataacgaaatggttagggccgccaaaactgatttctcattcgagccaagccttagatatcgcactattaccggcgttaggggacccttggtaattttggataaagttcgttttcctcgctattctgaaattgtacgaattaatatgggagacggaactactcgaagaggccagattcttgaggttagaggcaacgtagcggtcgttcaagtcttcgaaggcacggccggtattgacaacaaatcttgtaccgtcgatatgactggcgaaaccttgaagatgggagtttctgaggatatgctgggaagagtttttaatggaagcggtttcccaatagacgacggaccttctatcctgccagacgactatgtcgatgtcaacggatatcctatcaaccctatctgtaggatgcacccacgagaaatacttgaaacgggcatttctaccattgatgtcatgaattcaatagttttaggccagaaaataccgttatttagcgctgcaggccttcctcacaatgaaataggcgctcagatttgtagacagtcccgtctagtagacgggaaggatacaaaggataagcatcctgacaatttcgccgttgttttcgcagccatgggcgtcaatcttgaaactgccgactttttccgcagagattttgagcaaacaggcgccatgtcacgcgtagttttattcctgaacctcgccaatgaccctgcggtggaacgtataatcacgccgagatacgcatacacggctgctgaataccttgcatttgatagagaaatggacgtttttgtaattttaactgatatgagctcatatgcagacgctcttagggaggtttctgcagcgagagaggaggtgcctggccgcagagggtacccgggatacatgtatacagaccttgcaagtctatacgaaagggcaggcagaataaacgggtctactggaagcataacgcaattccctattttaacgatgccaaacgacgacataactcatccgatccctgatttaactggttatatcacggaaggtcagattttcgttgatagaactctatttaacaagggcatttatccaccgatcaacgtccttccaagccttagcagactaatgaagtcaggaatcgggtctgatttgactcgagaggaccatccgagcgtcagtgatcagctttattctgattatgccataggccaagacacgagggccatgaaggctgtcattggtgaggaggctctgtcctcggatgacttactgtaccttgaattcactgataattttgagaacaagtttctaaggcagggtcaatatgaacgcagaaccattgaggaatccctggatatttgctgggagcttctgcgcacttttccagaggacatgctcaagaaaatcaagactgatttggtcaagaagtattaccctagaaagttataaacctgagatcgcactctattttaattcttactcaacgatttaatttataactaatgaagtcaaccataactcctgatttaacagctttaactatttatggacactaaatgtagtaaaatgtattatatatgctagtgtacaagatttatcactaatgctttaaagtccaatgtgtctgtcactccagacctgcgatccgtggacgctaacgaccttttcctcgcgaccgtctctaacttcgaaccctgactctccaatgcttttaaccaaaacacctaatcattattttgggaatgttatttttattaaaattgtatttgtcaaaattatatttaatacggtaagagtatattgttcattataccaagtatatattacaatagtatatgttttatattatctatagatataaatcacttacacttggcgcctttggtcctatttgcattaatataagactgccaactggatatcctggtcttatcagcttcatcaaacagttctctaaaactattatattgtggaaattaaagacataataattactgataactaaagtaaggtgtatctgctactaagtaaaattttaagttatggaagataccgttttagataaactgtgctaaatagaggaattagagacgacttagaccaggggaaatcaaagaatgtgaagacaaccgcaagggtcctaacgaacgacttgagctggagggtcatgagctcatctcttgtaggaaggtcaaaaccgtcactaagcggcctgtttaaatcagttagtacaaatccattcatggtttcagagataaaatcctcaaaaaacttctttagattatttacaatcgtatgaaaaacaaacgggtcgttctcataccatagtgatgaagagtatccgaagctgatttttaggagtgttagaaataaaatctcttcagttgtaaatttaagcccatcattttggtgatttcggtctaattttttatcttcagtactgagtttcgtgacattttgctcagactttgcttcattattactctgagtcttggcacttccgtaatcagctttgctagagaaacttagtagataatcaatgatgtcagttaaggaagagagcgcagctttctcatcgaagcagtctttcggaacaactcctgagaattccctaacaaagacatcgttaactgtgctaaaaacatggaagaactcaaggtgagtaacgtcagtttcagccttgcaggattccctgaagtatgaatttgataacttagaaagaagagccacacctttagcgaatttgtttctgtttggaatgtgctttttacgcaaatcctccagaacctctttgaccgttcttttaaccggttctgattttacagtaggatcaggatctgacttggtaggcttgtctttattagagacttcggggaaaggaagtggtttattaaattcaatatgtggatttttatcacgttcctttgattttaattttttaagttctttcctttgcctattataaattctatccaaagaccgctcagcagccgttctaccaattaaattaatggattcctcctcgagttttcttttcataattaaaaatagtcaagtttattgctaaaatgccgggtttttagtattttataaatccaaatcaacatgctgtgaaaactttgataaatggtttaaaaataacagtatccactatttaggatctcatgaacaataaaaaattatttaaaattaaatgaatataatacaaataaatttacaaattattttacactaaattcctctgattgtgttgaagtggtgagaaggctcgagaatacagttaatatacagtggaacacacacaattcggaatatctattattaattatttttaatttattcaaatttactgttcatttcaattctgagtaagttctgaccacaaatgcaattcatggaggattccctgcctaccttaattacctgaaatactaaaataactaaataattaagttaagcataatgtaagcataaatgagtcttgttcattgttagtctttcttcctatcatgcctagatctttcgaggatgtgtataattcagtttacataaatgaagatatttggcgcagtgaccatacaacaggcatatggaacaataagaccttctgccttctaggcttcaatgactctcttgagagttgcaagaagttggttatcaagattcttgaatcccttgttaccagaggtgccaacgtcctcaaataccctaacaaaaagctagatgtaaagagactcagcatcacgtattacttgtgcaactactccgtgggctatgaatcaaaacctccaaactcactagactataagcttgtcactcccatttggctttacagctgtaacagagataacaaggtctacttgaatgaaacacctccttttttcagagccaacaggagctttaattgcttaaaattcaaaagaacgggtttaaaagtatctttgtttggtagtttcaagaataaaccggattcatccactgaggataccttaaattatataaggtatagctttgacacattggtcaggttcatatcgcattgtgggttcactttcctggaaccctcaaatttaaagaaagaaagttagtcaatataggttatcatcattgtattagattgtaagaaagataataaattatatttactcttctgtaagacttttgacgagagtattgacgaccatgttgtaaacctttcaacttctataccatgtttgagtatcgagtggctcttcgactcgtatttatcagtttgtttaaaatcaccataacctaattcttagggcgagttaagggagattaagaactacctcgtcacacctcaaaaattcagtaagttttcaccattaaataattattcagatgctaaaccagcacctaaggtaatttttacttcattattcaatattgtaaacgctaagaaaatactaaccaatattctaaacaataagaaaatactaaacaatattctaatttcgttgatagaaacgtaaaaatgtcaggggagggtatggaaacaaggttttgtgtttttcatacggttttgccgttgaaaatgaacttaacaagactgattttaaggactttggctcagttgcagcctacgttgttaaccctatttacgtcttagctccgtggtctcttgataccaaggataatgatctcaagaaaatgtacaacagcatatctctagtggaggataacaagttgctactcttcgtatcaaggtctgagagtagtcatgaggggatgggtatcttcggggagctatcaatgctggttgagaactgcgctccaaaactgggtaaaaacctggttcgacatgttaaaatctacaactcctttgacaccaccgatgaacactttttcgacgtatctactaaatctatcatttttcactgattattttcagatcccatctgaactcctggctggaaacaagctgcaaatattcgaaaggagtggaaacgtaaacctatatgacttggctgagagcattacttttgtcgacatcgataacttatctcagtaccaggacgagattggttcggagacaactcaggaactacatgacatgtaagtcagcattttagtaaattaggttaggattgaagagttttccaacggcttgaaggagtctgagctgcgatggagacaaatttctcgcctagaatgaagagtttaggtgttcggagagagcgaattgtaggttggcgaggtttgccaagtaggcgatctgaacaaatataaattataaaactttaaaattaccatgaggttatcctggagtgaaagctcgcatattttctctatctttttcaggttcatcagcttctccgttgagactgtcttcaacaaaaaccttccaacttccgggtatatcttagaattacccttttcctgcaattaatttattcacccctcaaatcgtgtcttttgtaattattacttaccattgcgttttcaactaattttatacacttgtcaataaggtcctttagctttagcagagagttcccaaaggtgtttgggagtaaagtttctgaaaatttatttagtgaaatggttgtacctgagttatgtgggttcctactcttagagttatctagggacttcagcaagtatgaaactaaaaatcgttgagatacttatttcttacttcctgcagtatctgaaggtgaaactaacagctcgaggtcaacttcatgaaactggaaacacgcgtcttttgtaatcgtcagtgggagttgaacgtaggcctataaaatgttaaatttccatttataccttaatcatcatagagccgctgtcacaagttgcgtcaacaagtaaatgaatgggttcataaaggttagggtttgggtaaaacttggaaactgagttgaactgtttaaaccatccatgaaccgcacatgtgagttcagtcatctcagacccagtgcaaaacctgaaactcattgaaatttgattctgagaattagataatctagaacttaattaattgagaagttaccatccgaccacttgttcttttgggttaattttttgttttaattcgtacatattttcatgatgatcttttataatttgcaacaatccctatttcaaaattaatatttaattttgtatataaaagcgtgtattttattcgaaaatttacctcatctgtaagggaatggcgatcaacgaaggaatctgtgatttcaactgtgttggcttcacaaacaacacctagaagtgtaccaataacattgtattgaccgtcttcacgcctcatataggaatccaaaattgtaaaaatcaccatgggatgtaccttccatttaatattagtcagaggagtagcgtggaagcacttggatcccaagtgttgataggattcgcctgcgttaaaatctgaaagtttacttctactcattttactgtattaaaattactaatttaacaatatatacaacaaatttataataagaaacaagttcattggagaatatggttgtatttgtaattctcatgttgggtcaaaaactcaaaagaatggaaattttaataattatatatttagtgaaattaaaatttataaattatgtatttggtgtatcagattcctacataaaatatcgtcccttatccctttcatttgttcttccacttcctcacatattagcatttttattaatttaaattgtaccctaacttttccttctatgctaaaattaatcgtgtggattccataaattgaattctggtccgggtcaattttcatttttttgcatccaacgtttgcaatatgttctactaatgacacacaccttagcaccttgctgattgaattacttcggtaccattttttatcattaattacgcttttcatcacttctttcaccttttccaactcatttcccctagatttattaacaacttctttatttttttcagttaaccccaagtcctatataataaaatacccattgtgtatataaacttacatctgttttgtcttcattttcacataattttgagtcatttgtcatatatttcagtatcgagattaaccagataatttgtgcctttagctcattttcaaattcgttaagttccacgtaatataagcaaagatcagataaaagataagcaaattggaaacattctgagataatatcaatttccattgctttacccatatcatacaccaagtaagataaagaatagagcggtaaattgaacttgacgagtctcataatttccttctcgtagtatatgagctcttctccatctgggaagttagcctttgtaggcgtttcatttgttacacccaagattttagttatttccctggaaagccctgctatttcggagtattctgtcgtattgtcacatctgtaatactcctgggagatttcattaatcctgtgcgctattttaagacagctgacgaagatcgagacaacctggtttacctttacatctcccaacaaaaccagcacgttaataaaacactcaactccagtgtgaaccgttaaagaagataatttgaagcattttgcaacataaaagtaccaatttacctaaaaattaatatgtgtcctaagtcgccatacaatgagcttgtgtatcacttgatactccatactcgagcctggctgtttaatggtgccctcattaaacacacgatttattttatttataattacagctgtgtctttcagattacaattattttgagtcttttcatcctgaatgacaacaaggtgtatctgtctgttggtcagcctgcactcgtcaccggtgagtagacactcacagcccacttccgggattttaaactcccagaacgctttgttttcgatgatttgagtgatatttggtctatttgacggtaatacactaatgaattcaaagagtaattttgtgcatgcagctcccattatcgtgctaaagcgcaccaacttatcaaaagcctctagttgaccagatttagagtattcgttacaaaggctattgtattcttcagaactacactggtgttaatgcacgttttatacatttattgatgttaaatatatagatgattatttacatgcacagtggtgtgtatactcgagtacgtatacacctgtgtgtacatagtagtatttgtctaagtaagtatataccattttgaacttgatatcacatgttcaatatctattggcttatttgggagtataacactgttccatttgagataaagatccatagacaatgagttaagtgacgtatggtcagggaagcctgtgacgttgaaaatatcccatacgaggctgatttcattaatacccttgaacaagatatcattacaagcaatttcatagaatataacaccaatggaccacaaatcaattgatttatcgtaggaatcacaccttagaataagttctggagctctgtaaaatagtcttctacactctctaaaactttggtaacgctccttggtttcctctggggagtactccattaaccccgttaatcttcccatagcaaaatccccaatcttaagacttttaaagttgtaaatcaacctggttccatccacaattacatcacaatccacaaagatgttctcaggttttaggttcctgtgaaacaccttcatagtgtgtatagaggataccgccttaagtaaatcaaacattattttcattacttcatttctcagcaaactcttacacggggtaatacattcaaattcgttgtgctttcgttccatgtattcaattaaattgtactctaaatattcagtaactataaacaggttgttatcgataatctgggctccgtagtacttaaccacattggggtggttgatcattttcatgaatgacatctctctaaggctcgacgttggaattccgtcgttctttcccgcgttggttagcttaaggtttaccaccctcactacaacatcttcatagttatttttgtttttatttgaatcacacaggtatttacccatatacaccttacccttagacctcctctctgataagattttgaatgggttaatggttactcttgagagaattccatatttttcctcataataattccatatttgggagttcaacaacattttattccaagttttactaacataaaagaggctcgaaatgacttctctcgggtccacaaacacgagtatcatacatgccagctgatgaatgggataggaaaagcactgttcgtaaaatttactcgaggttttactaaattttcttttcactggttctacaatgatagaagaaggagcaggacgtttattaaactgattaataagtatcataagtaaataagcataaattaactaaatggaatcattttaaaaatgtgtaggaggaaaaggtaagaaaatgagtggaaattgatatgaattttatcagataatggatgaaacgtataagtaagataaatatgtgtcataaaggtcaaggaatccaaaatgtgcagggtaagaatatccaaatttacaaagtttgtgtcaacacatacaaaaatttttggttaaaaatttaaaaacaccataattaactataattaaacaaatcaataatgattcaataattattatatttattatatttatataaaacaataaaattttataactagatagctaaggtttggttttaaaataatacacattctaaacgttatttcagaggttttataagcggcggtttgtccgagcggttaaggagatggacttgaaatccattgggctatgcccgcgtaggttcgaatcctgcagccgtcgaacttttaatattttattttatattttatttaaatttattttaattttaatataacacatgggtaaacggtgtaagaagcaacacaagggcatgggccacaaccgatctctgaaaagaggtgtacgagatttaaaacacagggccaaggatattgatcaaagtatttctttcatcaattaattttatcagttttcataaaaaaatttaatatttatttagtttatgactcccttttcaagattcgatcacctgacaatcgcactcaagattcttcttgtgaatctgataacaagagttagtttctctttataaacatatttacaataatgtttgctatagaatctctctactgtcaattttgtgaccggtattttatggatcagaactccctcatatctcattcaaagcagaaatctcataaacgcagaataaaatccataaaaaactatattccgtacgatggttaactaaagaataagcacaatataaatttaatttattatattcccaatacattactgattgaaccattgtcgatattggcaagaacgaacggaacattaagttttaaatttaaattatttggttatattgtataaaaactcgtttttatgacttaggctgttcatttttagcttgcatagtatttagatccttctctaaaatcaaaagtgtgtaatgcagataccaagggatggttttaataatcttttcaggtatattgttatacgaagttacgatagcagttaatcctttgacgtcatcgcagaccccaatatgttgaggattaatccagttatcattaattaagaagttaatcaaagactttacgaggaactttttgttgttgtaacagaacttaagcttctcggtgtcgtccatcctctgtattgagtcttgcggcatatggttgaactggcagtttcctcctaagttgcagaacccattaattacattctgcctacataggaatttatggatttcatgtgagtatttacattcttctgcggtctttttacacccttcgttctttacaaagaagtgacacagctttaaatcctttgagttcaggggagtacaatcatgagaaaaaatacaagcttcacccttggtacaggtgccaaatctgtaaaagtatctgcatattatcattgatttgtccttatactcgttcctaccatatcttacaggtggtggtggtatgtcatttcgacgatcgtccatcattttacgcctctctagaatctcattatacctctgtttatgtcttgcaaacgcttcgccggatctagtcttcctgcgcctatcgtcgtcaggattgtgtgagtccaaaggaccctgaaaccttcttctactatacatttttgaatcaatgtttaaaaggctcgtttaatattttacaaatcaaggccttaaacatgttaaaaaagcaaggcgatttcaaagggtgtaataaagaatgaaattttcaaacatgaaaatccaacaaaacggtattgcaagtttgaatataaaagagcttaaaaatcatcgagaaggacgacttaaggagtccataatttctaattaaaatcaacggaattgtaatcatacataaaaaattttaaatattttatacaacgaacttcaacatatttttccatcaaatgtgggtatcgtgaataaattatgacagtataaatgaaatataatttttaaaacattctaattccaagaaaacaacacaaatcccgttttatttaaaaaaaacaaacacttaaacaatagtttagtatcacttttacttttacttaaacgattacacactaactgttgacatactcatataaaactcaaaattaaccttatataacggtaaatcttattcatttcattaattttatactcctttcccgttattttttaaaatattccctattttaattggtgcaatccagtgcttttgtctaaatcacttctttttacttcctcttccttctattatccctgaatttctctgattttggcattataataaaattttcttaaacatttttagtttttaaagttttattttattttacttctcgtaactatccattttgtgaattccattgtctaaattatcaatatttccttctaaacatttttaaattctatttacctcttaattatatccaaagagttcaatttggatatgcttttaactttcttagtctaccttgtttgtaaaggcaatttttataatctgcctaaccttaatatactgtccagataagaataaggtcgatttaatgagatttaatatttcttatccaatttaaaaaacagaaatgtgtttggattcttgattcaacactaattaatagaaattcactctaaatttcattaaaagatgatgtataatacaagtgagggtccagtcggaccttcaataggtgtaaatgaggtcgaaatcagacccattattgattttaaaaacaaatctaaaacttcaaaatcgtcaaacgcagtaaatttacttggaattttaaaactttttaagtacatatcgctacttttgttaattttaagtaaatcgcattgcttaacaatatcttacaccactgaaagcgttaaaaaaaactcgacaaacttcggtaatcttgactccagctatgcaaatggagctcctttgaacagtaatgatctagaaaatagagctttaaaagctggtaactttgaaaccagacataagttatccatacaaatattaactacaaagtacactggaatattgaatcacggagcaaataatccgtcattaaatttacatagtgttgtaaatgaagattcagattacccagaggggaacttgaatttaaaagttgagggcgataattctctcaatcttgtcactggtggtattaagcttaaacattggagcaaggttgttgccggagttgtaatcctgacctcgacatttgcattgctgatgatgaccataattagaataatagagtcaaagatagaggatactcaggactcatttctcaaaaacgcatataacatgtgctacaagcagatagcattaataggtgtaatcaaccttgttctatggttgattctacaaacaaaattagctaagagactcgatagaatgattttctacagggtaacttccttaatttaattatttactcatgaactcaattattaaaattattaggatgcaaatttatcacccttgaatggcgacgttatccctatagttgagccagttttcgagtgccttttgtctgtttgtgtgattttactagcgtggtacatcgtatacgtaatttacttccagtttatcgtaaggagaataacgacctggatgaggaaaactgataactgtgatgtgctttccacagcgtctgatcttcaagtactggaaggcaactggtgctactctttatggagcaggaacacgtttaacagagggaacttcctagcaaacagattcgagtttatagataacgtcaacaacgcgagtttgccgaaaattgatcccggtggctactactttatggaataccttagagcaaacatacttgattattcggtccaaatgctcaaagttccaggagaacttctagtatttgtaattgcactttcacttattttaaggtattatttgaagactttaatcaataattatttaacaattgatatgctttattaggaaaacgtttgattttgagggcaaaaatgaggttatgcttatttcaatatttagtttgttctgcgtagtatcattggttatactggcttactatgtaagttgtttctaaattaattaacttattaaatcaaaataacacacaacatacatttattaggtgtttttaattgaaacaaagttgtatccgtcgaatttatcgtcttacttgatgtttaaacacaacactgacgacttggaaatttcaaagtactcccttatgaatctattaccaccatacaaactggacaattctgaggtattcataaattcaatatatcttatgctatttaatttcttaagtctatcaaattagttaacaatacaatataaatttgtagtccgaggctaccaattgcttggttagatttgttcacggtgatggaccagtaaacaaacacgagaacttgtttgttttcaaatcaaagggccctaagattcttgccaagttatttgagaatctctgctttggctttcttcttgttctttccatctgtgtttacttaattcagcagcacggtgatacttggctcaagcaatataggttcggaatatttgttgtttttgtgagtaccatcgttataggatttcttacacctaaaatcctatattcattaattgtaataagcaagactgggctacttattgactttgaaaccgtggagaaggtctgggagtctaaccggtcaaacaacactaggcacgcaatggagataattgacgctttaaaccttgactatgttatgaattctctcaatacaaagggtgaaacttactggagacacttggttgggaagcttaaaacttctccgttggctgtgcaggaacaaatgagtgaggtttggcgtagccttgatgggagaaagaagggttacattggtatggaaaagatcctcagatacatatcgtcgcaaggccttcaattcagcaacaataaaaaaatcaaggtataaaacttacacactgtgctattactatacgttctattttcctgaggcatttagtataaatgggaatttaggagtttataaaggcgtttaccagaactgaacctcacagattaaacgaggatgagttttcagtactcggcttggtggttaagcagataatagtagtgccgcttgacacatcacagatgaaggtaagaggattagatgacactcatcaaaaattttcataggctctgtttgaggatgtgtacaaaatcccatggaacgcaccgggagcaatagattccagcacacttcaaaccattatcaaaaaagtaagacatagataagtaatttcacaaatgataacctgtaaataatacatatcaaaattggtcacaagctagatagaaaatttctaataaaactaattttaaagataaattaaaacacataaatagtaaatattattaaaataaaatttcagcttgggctaaagtggaatgagggcgataggaggcacttgcttgactttttgagcggtggacgctgcgatggaatgtcggcagaaaaattcgtaaaccaactatcaacagtagaacaattgataaaagcaaataactacaatggtctgggtatcgaaatctgatttaaattataaatttgtttttaattctaactacatgtcgttttatgtgcatcccaatattaaataatgcctgaattcgactcatttacactcaaatgtgacttgaatttattttattttaattttaatttttaatgtttttgtttctttattattttaatttttatccaagttaataatttcaaaatgtcagtttaaatgattctacttttcttcacaaatttcaacccctttagtaaggtttgatggattattttccatcagtatacacctattttaatattttaaacgtattttaacttttaactagtttggaaatgttttccacttctcatacttcttaattcaaatgacaaacgactctgagactaacaattctagccagcaattcgacatctctaagtattgggcattccgatccattaacgttcttttctttttgtcaatttttgtcatttttgtcattcttctgatccctatttcataccttaataaggaaagagccccctgtattgttccacttgaccttaacgtccccgcatactcacatgctattaaggtttcagcaataaaacagaaagggtccattctttctgttacttacagtactcacaattctgatcacattataggtatttttaaacactagataccctactaactcatgtaccataattgtacataatatttaggaaccttaacatttggtggtgtaacattagaacatgacggtaactacttgggaagatatgttagtgttcatcatattgaaaacagaaaacgtttaccgtttcgtgtcctagtcgtggacgtttacccatacgtgtttgttttcaggaggttcctgctaaacgagtatagtgaatcaacttataaacagatcgatggctacgtttatgtaattaaaggattagaacaacagaggctggatctccacatgagtgatttattcaactccactccgatctccgttttcaagtccaattacgaggatgtggacgggagatatgtgacccagtatgttgcagatagtacacacagattcgcaacactcaaatataatatcaatgatgaaacaaagataattccggaatacccaaatgctcaacaaattaccacaatcactgtcatatcaaacaaatcattggaagcttacaaggttgtcattacatactactcaaatttggcaagaaccaatgaaccccaattcaaaggtatttcttaccattatatattattaaacttattttctgcattttattttagaattatactattctgcttccgatccaacggtgttttatgataatgttcatgatttatcatctcgagccgatttgaagattgctgacctagatttccagttaaacaggcatgaaaacgtccaaaagacaccagtggagtacttccactcacttaataagaacgattttctattacatttttaccttaaccaggattttatcaaatatgaaattgtaacttctgatttaatggacctgattctcactgttcaacttgacttagaagaaccacttgaccaggaattactagacaggactctagttatccagtataaaccacgattcacagctccgccaacattttacctcttccaccgctacctttattacaccaacgttacaatttttatagaggaagtttgatttgtttgttgattatgaatcctaccaaagcatgagatttaaatttaatattatttcaattttaataccctttattaaaatatgagtaatttagtgtttttatgagtcagtcagttcatttgatatttaatgtgtatttgttccaaaatgagaaaaaaataaaaaatctgtaaaatactgtaaaatgtaatgtcgactaatatttttaaaagaatattaagcatacaagaacaaattattagtcacatacactctcgctcatttgaacatatacaacctcagctgaatcttctaatttcatctcaaaatgaactggttcttggtttaagaaaaactaaattttacaaagaatttaatagtattttctcctttgaaacccaaacaaatgatgaaaatgttttgttttacgagatatcaactgccgataccagtttatctaaagaactctcaaaaaattataaaaatttgaaaaactacataaattcagtaattagaaacagagaaaagctggattctaatactaaatcagttctttgtgattcagcaactgacgaacatgaatataacagtttcataagttgtgagttagaagccaagctacatgaggtttgtgataaggtttcgttgtcaatggacatcggtgggacgtttattaagattttgttaaatttacctatgaagaaccgtgaaaattatgagtttttcaaggatgtttacgtttcgtttcttgattccatttacttctcagatagattttctgagttatttgggtcaactgataaacaagtaaatgtagaataccaaaaggatctcgaggatgttctcgaatttctccattccatattcctgagtattaaggttcgtgatagagtccttgtttttaaatacttaccagtctctgatttcgaaagtgttatcaagctaattcaaggtaaataactagtcataattaatgtttagatagggggtatcctaaagaaggtacgtgtataaattttaccggaggaggagcttataagcacacagagtttcttaataacacatttgtaaaatctaaagtaaaagtgaacggattcgatgagttctccgccatggttgaagcctcaaaatttcttactaaaatggagaaatcagctgttagatatgatttgatacacagaattccggaaattatctcactggtaatatttactctattaatccatgcgtaaattattatttaggaaccagttcacccgtttataatctcaaatataggttcggggactttttacttaaaggtttgattcattacctctgctgattttatcggcgttttaggtggacagtgagaataaacatcaacatgtttttggaacctcaatttccggtggtactattataaaagttttaaattttactaatttaggcacttcattcgggctagtgaattacctcctccctttaaatgaaagaagatcattcataaagatatttaaaactggtaattatatatgattcaatagatttaacacagggacaaataagttagactcattctcagaacgtgagaagatggataacgacaattcgggtgagtgtgattcagtatcggaaactttaaataaatcaaaaccttacggattgtgtcaaaggcaggtttagacattttcatttcttagcttaggaaagtttaaacctgaagaaatcaccaatgacagtaaacaatatccaagagagttatacaagagcttgattgatatggtagcatacaacaaagggtgtttgggatatattctagcaaaagcaaatggagccaagagaatgatttataacggaaatttcatatgtaacaatacaatggactcgattgtcgcggggttcgccttcacatcagatgtttataaggacaaatcaattgacctgtgtttcccactccatggaccttatacagcagcattaggatcctttttaatgaaaaactagtcctcttcatagcttatttaatattttgatttaaaatatattttaaataaattttaatgattggaatccacatgttaattcacaaaccttgggtattatttattttttaaaattacttttgattaaaatttgtagaatctttaaattaaaaatccagttgttatttttgtgtattaatcgaatggttatcttaaatcgcaagtgttagttatgaatgtgcagggatacaaactactcctgtatgttgtttcaaacgacggcgatgactgggaaactccaaacgcactaataattccactcaaaactccaaactcagaagttactctggcagatatacgtaaattgttcccacttccaggaaattatcattttaggtactacttacacattttaaattatttcacacatgtgttgatatattgatcaggactagatatagacataataattcatttgtttggttagatttaaccagagaagacgagcctctacaaagtgcagataatgtattctatatgaaagtaaatttatattattttatatatttgttctgttcaattataaatttattacttttataggttttgagacttggtaacggctcaggaggagaaaatttttgtaaagtaaaagcaaatttaataactgaaaccgctgctgaaaacttgaatttcgatcttatataatgcttaaattatcaaaatttaggtaacctgttagtttattagtatttattttctgttttatcaatattaattcttaaaacgtttagtttaagcagggcaaatactgctaaaatcgcacaatatgttgacagagtcatttatctgggaaagagaaaccttctattcagagtcaacattactcatctctactccatctggaacatgtaaattttgcttacatattctatttaatacgaattacgtataaatattcattaggtgtaagactgagaaggactataagtatgccttaactgctgtaaaccacttttacaatttcggaaggcagcttacacctgaagctatagataaactattcgtcactactctaagatgtaaccaattggacgaagctatagaagtatagttgaaatcattaattttaaactaatttttagttaattcatggagcttcagactggctgatcagaccgccaagtttgagcttgatttacttactgttgggagaactaatgtctaaaggagattttgacagggtttttagactatataaaattataagaacttcttggtaacaagtacgctatatattgtgatttaggaaaatacctttgacatcaacattgtataattatttgattaaatttatgctcaataacggagaatacccagttgaagactcgttactagtatgatatttatctataagtatgtgaatataggtgtatggagattccgatgttatggaggttaatttaccagaggagactcatgtactactgatggagagtttattgaggttatggaaggataaacctgaaatgtgtaaatcaacatgcctatatatcattaaaagactcgttaatgaggcgttttggccacgttataagagtaacgttaggtggaaaacatattatgttatgagctggttcatgtatagatttcaggatcagaaaattagtataccaggaatatgtcaacacactggagattggcgcacattgctagagtattcattaaactctgccctaatgtcctctgaagtaccaattttttgtgaagagtttgtaaccgaactcgggactcaactcgaatccttaaaatttttcaataaaagttaatatattaaattcaatattataagataatataattaaaattagatatttggattctagtgaaaatatagcgtacgggcaccgaggatcgaactcgggacctcctgcgtgtaaagcaggcgtcataaccactagaccatgcccgctccattaacactctatttcaacgcattaaaacattaaaattgtttcgttaaggttcattttatattttgttgtattatattatattgttttatggtaaaggaatttttgaaaaaaagaactgttgatgatatttggtcaagttttgatcgtgatgtctcaggtccaaaacacctcatgtttggggtcaaggagattgaccaggcccttaacggcggccttcttctaggaaaagtttgtgagatttacggaccttctgggtctgggaaaacacaattcgctctatccctcacttctgaggtgtttatattatctattactattatttactgagatgtgtacaaccttccactgataaattaccattttaagataaaatttatcaaaaatatttataatttaccaattattcagtgtaatatttgatttcaggtcctgattaataacttgatacactctaaggattatgtagtactgtatatttacacaaatggaacatttccaattgaaagactaaacgagatcctaagtatgtgttaaactcgattataacagtataggatcgaaatatgaggatgcaaagggtttgataaaggctgacgaaaatttcaatacctctcaattactaaaaaatttatacgttgaaaaggttaccgacaatgatgtaagtagttttggtagtaaatttgtttaggagttgtactttacatttacaagtaaactagaagagatgcttcaacacaacgtatgatacacattattcacgtgttattagtacccagatagatttagagataaaggttttgtaggtaaaactcatagtgattgactcaatagcagcgttatttcggacagtccagaatgaatcgtaagatattaaacttaaaagatttgctttatgttaactaattttgaatagataccacggtcaacggatcaactccattacaaaagttggcttaattatgaaaagaatatcacatgaatataatcttttgatactggcgattaatcaggtaaaaatctccacaaaagtggttaaaattatttgatataggcctcgggagtgtttaatctgagcaacattccattcttgaacccaagatcaggggtaaataatttagaaaaaaagtttaataaataatttatagattaaacctgcacttggtgaagcctgggagagatgtattaactcaaggatactagttacaagaaggcgtaagtaaaacagttattatgattcctaggtgaccagaggtttaacagggaaattcggcattttcaagtcatttttagctctaactcaccgtcaacttatcccataccatttattacaacgaaacgaggaattgaatataatctgttattgtgacatatttcaactaattgaagataatttagtccattaatgagttaaatggatttataaagattaaatatcttaatcataagtaaatgtgtggataaataatattaaaagttgaaaataattctatacaaggcatgtaaacccccactgctggctgttcttgtaaaaatagagtaaaaaatgttccaaattcttccggagaaaacaaaacccagttcttctcccataattttgtaaattaagtataaccagtttgtacaatttgtaattttaacctcaatgtatacacacccgggtacagtaactccaatacttgaatccctgaatcctactttaagggataatatgaagagcatccttgacaaataatttatggaatagcctttttagaaatggattccaacaattttgcggccaaaaacgggccggatgagtcagacatcgcaagaaccgatgacgagatcagctatctagtcaacgcagatgtttacaaaaaatggagatcgcaatacgttgatgtaagtccccctattattttctcaacacccttatactattttgcacttaaaataactaaaatattcaatattaagtggaatattgattatcggattcctgtataggaaattgagttatcagtatggacagtagaaatggtcactttctcagttaacaacagttttgagaactatggctctattaaaaccgccatcagaaggtaatttttacacacatttcttttttaccattagttttttattttacgatctgtttagtggctatatattataaatctgatcagtaaaatcagaaataattattgtttagaggagtcccggacataataaaacactttatatggataaaggctaacgatgcagaccatttctacttccaacaccctgacttttacaagaattcattcgcgtctacattcggggtaattttatcttaacacactattatttagcacaatgtaccctccgaactgggagactattgtccaacattttcaggtattttaaaatcttataaatctattcacctttacataaattctatcaaattttaggtgggattttgggattacaggctgacatattggattctccgttggtgcttgagaacttgcaccaacacattgaccagtccctggaatcagaagtcgtctacgattctgaaagcgagtataattactggatcaacccatacaaagagtcaccttcgtacatgaggaattcctcttccgtgagtgtttcacggtctaaatccggtcgcttctttgggaacatgtactccaggttcattaacaagtttaggtcaaatagccgtaaatcaagcctgaactcaaaccatagtgtaccctacacttcgtcggcatcagcgaacttcgcatcctctaacaactcaaaaacaaatgctccatatccagtagaacttgagcccggctcagtaccgaaatatgacacatcttcaagtttctatagtgttcaaaatttagattttaatcaatcaaaccagccaggtactataaaacttagcatacaatgtagatatacggttttacttattgatatattgttatatatatgggttaatatatgtgtttagatgtgtcgaacagagatagattaatagactatatacacctgttgaattacgagaatttaaataaaagagaacttatgaagtcagctttgagacgtatcagaagaggaacgtttgatacgaagccgtttgcaaggaaccttgagaggtcaagacagctgtcagatactttcatatacaattcaaagtacaagtatttcccgccgaggccttcacatcattccaagttgatccatcgcactaatgactttgacgattcagaccaccatgacaacccattttacacaaaccataaaccagagacttcaaagtcctgtttccatgttttttgtttgccaatttgtcgctcaaagcctaagaaaggagagacgaaaaatgtcttcgagtacatcccactcacaaaccccaacacttttaacacaaatgaaccgccttttgttgagattttaagaccatttgctcctccactcccagttgacaccagttcgacagctgatcgctttcagatgacacgacattctgacaacattaagagttacatatctgattctggaattgaaaagtacgtcaacagagccacagattttggaggtttaccaatgattaacacaattcccgagcatatatcatcaaatagctttgaccagccttttagccaaaatgcaagttcatttggaccagataagcttgcctatgaatctcatcttccatacgacagtaggcctagcagcttactctcgtcagatttccgtgtcattgctaacacaattgatcccgagtcttccccagaccagtccttcaataatcccgatataactccaactaaaaactacgaagaaactttgtcaaatctagatgtcgatactgaagatattgaacttgtaaccaacctttcagccaatttcacacaacaaattaaatcaaacacattcgaagggtattatctcaatcattaccatagttattgtatattaatgttatgttatttattatccaggtttggagtattatatttagtatgtaaattatactacttgtagtaatatttttgtataggtcagtgtataaattgagtgatgtgacagactttacagttttactatcagaagagggcgttttggaggttaagagagttctttggtgcctcaattcatatttttcatcacacatcgagttcttaccggtatgcaatttttccaattgttatatttatctatattatttgttaccacttttaactatactagttgttaccatgtttaactatactagttgttacgatgttttgatctaataattccataggttataccatcactgtgttgtcttcttttaatgtatttggcaccaagtgcagcactatgcgtgttgtaccagtttatgaaaaggtccatagatacgtgttctatggactgtggaagcaggttcttcttcattgatcgaagaggctttgttagatttgtgacctttatcctctcagtgatggtttcccacctgaggaaaacagtactgcacttgagaacactcaaagttgaccttgcagcatgggttgccaggtctgttcagacagggttctctcaaattctaccctttgactacatcgtgagaatttacggtaactttctttttgagggcgagatggtcctgctgaggtactcagtggctctgataaagtgtatccgcttgaaacttatggaatgcacaactaagcgggacgcggaacagttactataccacattggccttgaccctgcagttcacatcgacaaggttaccaaggtagcgtacagtcttcgaattaagaagtttgacaagagaatcagctcagttgagaccccatccccttaccttatgaatgttaaaatcaggcatttttacagaccaaggcttcactcaaaatcctgcattctctctgaaactaactgggagttcatctggtttaacctcaaaccaacatatcgcattctggtacccgttatttctgtttaaattaattatatagttgtgacttgttttactacgatatttaaattacaaaattgcacctttttacatatttacacattccaatcactatttacattttcattcccatttcttaatttatgttaggatccacgtagactatattgttcgaataagcacggaaattctatgactgcggtaataaagaggataacggagcatgaaattgaatcaagccctgccttgctgttcattaaaaccactaagctaaacgtccttggcgttttcataccaactctacttaacaacccaattaatggacattttacaatacaagacggtaccaacattagcatatactaattagtactacaaattagtaatagatttgatataaattatgtatataaatccgtagtacaaattgtttatacaaattcttactacaaattagtaatagatttgatataaattatgcaattcacttgcagatagtattgatatgttatagtaccacaagtggactcgtttgtttttacattggccccaaatgagagcgctttcaacttcagcgggaagaataaggtgggcgttaagctgtctaaggacaacatcgtggtgggggcaaaacaaccggcgtttatagttgacggaactctgtcctcaggattcacagcagagtgtgaatcttacgactcgccgccacttttacaaggaaatcggttcagtgtctacatgatagagatttggacactgtcatagtaatatactagaaaatccctaacataaatgctatataaattagattcatgtaatactagaaaatacataacatatatgttatgtaaagtagattcagtgtgttctatgctaacattcgcctgaatgtagctatagtggagggtttgaattcaatctctgttaaagatttcaaaagggttcttgatgtcacgccaaacagccctgaggatcatctttagccaccagcgaaacttttcacagttcccctccaagtcgtcagtgggccaagaaccggtttgctccatgatcaactcacactcaaataagatgcggttgtatttgaatccaacgtagttccagaacacgtagggaatgacctcaataaccctgaccagcgcaatgaggaaacaaattattgtgccaggatcgccagtaatatctaggcattcttcaggctcacttctagaactcggctcgactgtcgtgtatccatgaagctcactagcatgttcaaactcctctttgttcttgatcgggtaattttcagcgattctggagtacacaaatgatacagtaagacctcttactgacgagttgaacagtgttaaaagcatcgccatggggaagcgaaccataaattggagggccggcacatccttgaagtgtctttgaaagaacaaacagaagcaaaaggcaattctgaggaccagacatacccagacgagggacacggcgaccagggacctccctgaaagcttcttgtaagccactcgagcgattttcccaatactattagtggctaggtgaaccacgactttttcttcagctttcccgttctctacgtcttcttcaccgttgttctgagacgagtctgttcttatgggcgtagcttttgcagctatccagccaatggccttgggcatgaatcttccaaacagatcaaagacttcatggcaaatgaaaattatcagcgatttaaacagttgttgaaagtgaggaaaaggatcaaccaaaaacaaaactaataaaaatttaataattagtatataaagtattttattacatgcttttactatttagtatgtaaaaagtgtataattaagatggtataacaatttatgtaaatatactttggaaaaaactagggaaatacctataactgagttaaaaaaggcctcagaagactctagtaagatgagtaacatgacatagttgaacctatatactaataatttgagtgactgagtcaaagcaggtctgctatttatgatgtttgatttctcccacttgaactcttggtcactcatttggtgcaggtagtcgtaaattactactgtgattggaataatcatcagcatcatgaccatgatttggtacatgtcaaaaacaattgattcgtgtaaaaagttgttttcttcaccatttccaattgacgtgacttccagaattgtacagatcagtatcactagcatgtatcctatagggtgtccaagtaggaagaaaaacagcttcatatttgttgtcccgtggataaacttgttattcacagacgccaatgctatcatttcagtgactcctaaaaagtaacatccagcacaaattgcgaggagatagagtattttccctagatgttcaggtaaaatcaatgctacgaaggaaaacaaagacatcaatatagagatgataacagaagattggagcattattaagtttacaggacacagtatgtacgatgctataagtcccaaacaagaggataatattgtaattgttagaacgttagactcaaagacgccggagttctcttctggcacatccaggattgcgtaatgcaatctggatgaaattgagctcataacaattccaaaagtcggcaaaattcccagtaggaaccatcctatgtaagcgtacctttttctcaggtcacttaaaaggatatgatcaaaaggtgcagaaccctttgaatcaatcatcacacacgaaattaagagttactaaaaaatataaattttggataaatttttgaaaaaaattattgtacaaactattatatttttcaaaatttccattttcggacagctagctgttctgaaataaggtttcactttaattaaattacacggtggctttttctctaattttctttaattttatgtttattttcgaaaataaaaaggcctcttttaggctaatttcaatattactttctaaaatgaatttattcagaaacccagtcagtgaacagtaaataaaatacaaaatgtgtacattatttaagagattaaatcatttagttagacgttcaagatccttctgcacatctttgtaatattctggagcagtttcagggttcctcaggactctttccggcaatggatgatcaataactctctgaacgtgtacaggaacagggacctctctgtacctatggaattattatttttgtataatttacaaatgattaaatgtgtataaatgtgaaaatataccttggctcgaatttttgacactgaatcttcttaacaacttcaagctcaacaggtacagggacgttcctttcaataacttgttcaacagggaccctgcggtagtgagttacaggcacctccacaggctgaggaacgttgcgatactgtgtcttgtacacgtccttgtaaaggtgctgaacctgaggcacttcaatcaccttctcaacctcgtaagggcggtcaatgtaatgagttacgtgaacttccttctccacaatctcaggaacttcttcctcaacctcaaccactttctcagttatcacctattgaaaataataatagtataaaattagacagtaagtggatgatatatctaatagtataaagaatagttaagaaatgtgtgaagatacctcacgatattcaactcttggaacttccacgaccctttcctttgttacttttctaggaattgagacgattcgttcctgaacaacgactttcggtacctcaacaaccttttcctggtaaacatactgaggcacttcaaccaccttctcaaccacctgaaccactggaacctctacaatcttctcctgaatcacaggcctctttacctgcttgacacgctcacaaaccaccggctttggaacgtggacgatcttctcttcgtaaactggctcaggcacttcgattatcttctcgacatattcaatctcggggacctcaacaatgcgctcctttatctcaggcttggggattctaattatattctcgtgaactacagggtccaatattatggcgtcagaaggaggggattttaaaactgaaacaggcgaattatccaacatatttcataatcttaacaacttgttatattaaattgaatttttatatttacacattaacaaattttataatgcttatcaaaaattaaaggtgtattaaacaaaagctaggccgctgaattatttacaaattaggtttaaaactgcaatcaattgaaaaaattaaaaggactgaattaggtttacacatgaattaaataattgttgctgaaatgacaaaaattattaaaaagctaaaaaaggacaaattactgaatttagactaagcttaaagcattttcagtgactaacagggtaatgtgtaaaaccgaagaggcaccgaagtgcatctgaagctgaaggataaaataaaaaattaaacacaaaaatttcaaaaaatttgaaaatttaagaaaccataaaataaagagaacaaaggtaaaaacttgaggaatttgaagattccaactacaattgtcaggaatgtagacaaaacattagattccgaaggttaaatggttattaatataaaaactaattaatttaattaaaattttaataatttaatgtgtaaaatacaatccattctagaaaaataatatatgttatactgtttataaaaatggcgtaaattgatgtacttattgaagattcctagaataaattaaattccaaattttaaaatttttaattttttaatttttatgtttttaatcttctaatatttttatctattctataagtgtggttacacgatgttgggactttaaaattttatgtgtttataattcgatttatcctggcctaatactcgttttattacggttcgacacaactaaatgttttgtaaatttatttaaaaaattctgtaaacaatattcacgatgaggcttcttcatctctataagctctgcagtccctgttttaataggctttataggccctgtattattaataattcccgttccagatttatccaccttacctctaaaaatttagcactaacgacatttaagctttcagacatcggtgaaggtaattttcctttttattaaaatttatttttcttctttacccatattttattcttatacatcaaataaccttccttaactttatcatttaggaataaatgaagtccagctagtaaaatgggaaaagaatgttggtgatgaggttgaagagatggaatctgtttgtactgtgcaaagtgacaaagctgctgttgaaataaccagcaggtacaccggcgtggttaagaagctgtacgttaaggagggtgaaactgttaaaatcggaggcccactcatggatattgataccgtcgatgaggtaccagatgatactcctaataatattagtagtaatcttaacgactcaaagagacattactccagtgttccgcaatccaaggtatttacacatcctcctatttactcattaatgttactaattactatatcgtttgacaatataaattctacttatttatttttataatattttttagctattttttaactcctttggaaatggaaagaaatcattcagcaccagctcaacaccagaagatgatgtaactttacatttacaatatttaattaattaacagtagtatatattctattaggttgaagaggttaaggttgattttattggagaagccatggttaagtcaatggtggcatcacttgaagtgcctcacgtcaccgtgggtgaggagtgcgacatcacctccctcatccagctgtacaaatcatatcgtaatgaagcacccggcccctccgatcaagaacctaaacccaaaattacgatcacccccttcattatcaagtccatttcactagcacttgagaaagtccctatcatcaactccaagtttaacagcaccaacaccggtaaaggcccaagctcatactttttgtacaagaaccataacatcagtgtcgctattaataccaaaaacggcctaatggttccgaatataaagaacgtcaacaagttaacaattcgtgaaatccaacgtgagttaacttccctgcaacagaaggccaacaccaagacccttactttcaacgacattaagggtggtacgtgtactctaagtaaccttggctctttgggcggaactttcgtaaaagcaaggcttttcgacggccaggctgcaattatcgcctttggaagatcaattcaaagggttgttcctatctctaaagcacccaagactgacagtacaaacttggacgactacactctcgaatgcagatcaatttgtaacattggagtgactgccgatcacagacacattgacggcgccattatcacaactttcatttctcatctaaaacatttcctccaaaacgcagatacacttaaacagtactattaatctttaaattcaatatacacttagacactgattttatattatcttgtatattatagtgagtatagtatagtaagtatatattattgtgtataatgtttaatataatgtttaaaaggtaataaatctctatgtattgaatataaaaatggaattaaattagaagatttaagggtgaattagtagctgacaggtgagatttaaataactttaagtgcttgtcaaactcactggaggcgatttggaccatgttttggtatccagggttcctcagcaaagtgttcaagtttaaactattattctcaatagtgctcaaaaactttgaaacattcttcatcagctcagaactagaattgggactatctgaatctgaatagactgagttggttacaatactaaatgttggattatcattaaaggcttgaacttcagacgcgaatttaacaactattaatattaaactcaataacgatgaaagaacttgttcgtttgataggaacatagagtcggtaagtttactaacaagcttttcatgggaattatatagtgaaagtaaatcactgtattgggttgaattgaaaagtaacaattgctcagatacaacatcgaccagaaaaaaccttaacaatatcttaattaaaaattgcattttatttagagtaaaaagttgaaagttaaatctaggcattaattcaggttcaattgcgagttgaccagctctaacatgatattgtgtaagctggttcagggaatgctcggcatactttagctgaaacaacagtttaaacattaacttgtatctatacattattttgttagttaataccagcctcattggaaactctacgtcacaacacaggacaattcctctgaaatcaaagctgttgtttccctcaccaagtgatttatcatgtctcaactcacccgattctaaactattccagttttctagctgtgaaacgcctagatcacgagcataatgcgagaaatatttaagtgcacctgcaaaattgtccaaattatcacatttaaagtataatttaggcttaaaagtgtcagttgaattacaaaaatctctatcaacatgactttgtagactcttatttaaatcagaataacagttactcttgaaattattaataacatcctggatataacaagatttttgaagtaggaaatagtcaaaaatcatccttaaggttctggaaaaggggaaattctcttttgaaccaggataaacttcatgcattacttcattatgagcattttttatcaaaagactcaactcctcgacagtacgaaatttatactttctaacatcctttggattggaactggaattaggattggattgggaagttttggtattttggttatccagtaaaaagtgatattgaattggattatctaaaaatttaagtaaaacaccgatttccaaaacgcaaaccgctacattcttaagaaactttggtacatatctttcatctatagaaactcttggcaatccaatttctctacacaaagaactcaaattccactcagtgccctcatcaccataagcatccgagggactgtattcatcgtcttgatttatttttatgaaaaagtctgaaacgaactctgtaaaatccacttgagaaaagttaaagaagttaatgtaatggttaattaacagcgagtatgagtctaaaactgagtttaaaatgtgctgcaagagtagttttttaggaccaatttcactcctacatctgaaatccaaggagtcaagaattaaaactcctatgttggagttatcatcagttagccttttggtgtcaaagtcagtaacaagactggctagagttgagagtgtttgcgttgagggtctgaggtagtttaatagcttctgaagacccagaaatgtagtaatgtgtatgtcgtgaaacctgctaacacactcctgcaaatcctccaaaacatcaacaaactcagcagttatggtctcacatatcactccggtgtaacttgaggctacaaattccaacaacgtcaattggtcaaaatgtatcctcagaatttcatgacacatttcaatcatgtcatctccgacatctgatacacattaaataaattatcatcaaatataaaagtttatatgaaataataataaattaatatgaaatagaataaattgtaaattgttttaccctgaattagtggattattttctatgtaatatgaagaattttcagagttttttgtccaaatgaagaaaaaagaacctaaacctgaaaaaacattaagtaaatccaaaactaaattggattccttaattttatgagacaaagaatgccaattcctagttaagcgttcgtattcatcgtcggaaacgtcaagagagccttgaactgatgacaaaatcaaagcacattcagattccattcacaaaatcaattcacattatgaatgtgtaaaatatttttaaatctatggtacaaattataaataatataataaataatttacactataattttacacaatttttgagaacacaaaaattccaacaaatataaaattaaaatgtaaaaatttaagcaaaattatttgtccagaatttaaaaatgttattaaaggcggttttgaaagttagtcctgcaaagtcccagaaacgctcatgaacattacccttgaaccttaccctgatatggcttggctttttgaggtattcgtagtaggtaacatcagttaccatacatcttacgattctggtccagaggtagagcacgaagacgaacatcaatccgtttgcaatgaatccgtaaaggaataggagaacgtcaaataggctgaatccgccttggaacctatgcgccaaatatttacacaggattacataaaagtgccagaaaacacagaccaaaagagttaaaaatacaaaaaattccctctgatttccggctccaacacagttatctatccaaccacaatgatggtcttgcctcctacacatgtatatagttcgttatttaaatgataaaacaatatataaccattctaacccataactaataaagtaagtaaaagatacaataggcaagtattgcatagagaacaatgatgttctctgagagctttggttttcccgcaagtatagcacactttgttcgtggtgtcaaagtttaagactgctttgttatagtctattgagttcttgttacaccgttcatctgcaacctggggatatacagacctcatctcagtggtaatattgttgatctcatcgttacaggaagtaactctagatatgaatggatttcccaactcctcatcgtttaggggctcaaaaaggtcctcatcagcatatgctgacttgtgccgtctggtgtactttcctccagtggagcttataaaatgacgtctcaaatcccgatttacgcagtaaaactcaaaatttaccatctgctgtctcctatgaagggagtcaagcaccccttcaaatccaccaacatcgtcactacacaaatgttaacactaatatatgaattaaactaaatatatgaaccatgccaaacctggttggtgaaaaagcccttgtgcgatcctttttgttatcaggtgagactccaggatcactcagcttgtctaaaaattatattaaaccacgatataatggatatgatagttatatagtataagtgtataaagatactgatgatccagagagtgttggtggcgagaaaaaacacaatacaagaataaaatacagagttgggaaagtaggttgaagctttaagagatcggtacatggggataacgaggagcaaattgaacgtagtcatcatccagtagagaattggataaaacatgttgaatctaaaaacttttccaaaggccttccactgaagccaaaagagccagagtaacatatacctcaggtggtttgcctgctcccagcagaggtccataggagtttggtcaaacactccgttgtaatcattgttactaatagacttaatccaagtgagcggtgcaaggccgttttgggccagaaaaagcaggacatctaagcttggactcaaggctgcgtagtgaagcactgtggctccatagtgatccctgtgcgataagtcagcccctctcctcaaaagccattgaactacaaacaactgacccctcttacatgcaaacatcaatgcactggtaccctaaacaaattttataccatttacacaactaaaatataggtatgaactgtgtgtacaaaagtttatatcagaaaataaggaactatgtaaagagtacattgttgtcttgttcatcgagtgagacgccggatagataaagaaactcaagaacgtggagaactgcgacgagatcatcacatgtaaactctgagactgcgactaagaagggagttttaaacttgacgttttcgtggcagagaattaagggtccgaagcgtttaagaagtatggagattatgtatgcgtttgaagacttaactgcgtaataaaccggagtctcatagtttacagggtcagccagaaaaggatcacatcctgtgtccaaaagtctgttaacaagctcaacgtggcctgcgtagcaacaccaatgcaaggctgaaacggaatccaaaaattcaacccgacgtttatcaatcagcgggtccaacatttgattcattccgtaaaaatcacgattattcgcagcgttcataagcccagtctacagaaattacatatattacaagataatataatcaataatttatccagtttctaactaaaattaggtataaacaaggagtaaattaatgtaaaagtaccacaagagtgagataatcagcctttttcataggtttatccctatcttcagctcttagagacgaaactgtctccaggtgttcaagttcaactgcttttttatcaaaaccatcagtttctggtgggaaagtcttgcgatgaacgacagcttcagccattttcaacaatttaaataaaccaactgaaattatttaataaaaatatttggctgccggcaataaattaaaatgtgtaaaaaagatctagaaactgtcggatacacagtttgaaacggcacaacaaacaattcagacaaaatattaatactagtacagataatattaaaattcaaatattttacaaaaattaataaataaaataaaattaaattagaacctgataatttctcaagctcaattaacacatgtgtaattgtaatacacatttttataatttctgatcaaatctaaccaaatttagtttttttaaaatttaaaaaatttcctaagattccccgatttaaaagtaatcatagaggagttaaatatggttaaaacaacttaagaatcgtgactctgaaaaagtccttatatctaggatatcaacataaaatatcatttatagtataaaatttaattattccccaattttattccgatttttacattttggttgcacattttattattaggcacctgctacttaatattgtacaaacagatcattatatttaattatgcatgactttaatttattaattataattctctgacttaaattgttataatgttgtttttaatttttaatttaatcttagatttggccccgatttcgtttaaatcattatttattttaaaatgtcaccttgatccttctaaaaagttttaaaattttaaatttaccatatttttaatcaaaattttcaaaaatgtgggagaagctttgtaacagagtgatgaccgccctggatttaaaccaggcgactctttcaggctcatctgacattatatgtgtcaagcaaaaaccttctgatagaactcttgaccaagttgctgatgacggtacttatcagaacataaattatacctatttctaaatataacaccttatttaatgattaggctgggtgtataaatgtacaccttttcacgttcgtttcggaaaggcaaagttgttaaggagcagggagaagcgagtctcggtatatgtaaatggtcaactatctactctatcaatgaagcttgggtctgcgggagaggcttatttcagggaaggagttgactatttagattcactagatccctcaaccttctcgtcaagaactgataaagactcatccaaaagtaccatttacacatatattcatcttctaatacaactcagtaacacatttctatatcctaatatatctcaacaatatatgtacaggagttgttgattacggatactatgcttgtaacagtaagactgattttggggagattggttcaaacttcgattacgaagctgccttaatgcctgaaaaaacaggtactgagactccaaactcagctgacaataaccgagaaaatgtcagtattagcgtaaatctgactcctacaagcaccacaagcgtaacagacgctgatcagactgtacctttcagcaaggaatactatagacaatacactgttaaaccctcaccagcacctctattaacaacttcacccatgaaaaatggtatttacactccaaatagattaaataatattattatataacatctaaagtgttcttagatacggtgagaaatttggcatctggagatttcgcattacagttcagcctctgtggtcatcttctaaccagtaatgatcatctgttaaacgagaatttgtttcatgctaacttagtcgactttcagaggctaagcgaggatccaaagttgtggtatcacgagtctctagtggcttgttttgacttaaagcctccatattaccctatcagaattgcacttccactaatcgcctcatggatggtgtttaacaagcccctttctatcgactcaattgagaagcttctgcgcacaaacttgttaattaagaataaaaggactccaaataaactccaaaaacagtcaaattattcttcaagaggtcaatcaatattataatttaattagttataaaatttgtaaattaataatttgtaaaattgtgcaggtagaagaataacactaaggccaacatctcagcagttagcaagtttgccactcaagtatggccagaacaagataacttttagtgtgtactccgcactccaaggagtaaagagtgttcatgccagtgtgtatcttttaccatcggacgccaagattgtgatttctgatgttgacggcaccatcactaagtcgaatgctctgggtcacatcatgcccatcattggcagagattggacccactcaggagttgcagagttattcaccaagataaggcaacacgggtactttgtgctctatttatcagccagggcaattggtcaggctgatttaactcgtgactacctgtttggtctaacccagaatgcaagggagaagctccctaagggtccccttttcctttccccagaccgcttagtgtcttcacttaaacgagaagttatcaccaagagcgcctatatgttcaagataccttgcctgagagatatccactctctattccctcagaaacataacccattttacgccggattcggcaataactcatcggtaacacatttatacagtttttcacttatttcattactttcacacttatataatatatgtacagtaataatctggtaatttgttgtataggaccatagggcttatgtatctgttggagttcctgagagtagggtcttcataataaacccttcaggacttatttctcatgttagcaatgaggatataaagacttatgataacatcgtcgaaatcgcagattccatgtttcctaaagtcacctccgaacaggttgaacaggatgaggagctgtacaactctagccagttttggaacttcccagtactcaaagagtctaaagaattttaaattttttataattgtttttgtcataatcacacttaaatctgtttaaaacatgcattttatccattaaactataaatttagaattaaaaacaccgataaatctactaacactataagaatgatgtggataaattaaaagttataggattagtcaatgattagttcgtcgattttccagtcctcatagcttccgtttggaaggtatcttcttactataaaaggaactgttttttgatatagttccttttcagcaatgattaaggggtcaattgctgttgtctgtgtatctccaaagtcacctagcgttgtaaacccatcatctgtggcttctgaagggccatcaatgggtatagtaattggcgcatttagacttatttgaagcgccctagtaccaattatcctagctttttcatatttcgttaaatagggacttgtgatcctatgggcactatcaacctaaaaaataaaattattaccacagcatcatatatgaataacaaattaaataataatattaataataataaaaataataaagtacctgagtcttaaattcagctgggtcagtgatgatatcgacatcagaaactctgcgttggtcgtactcctcgaaatcaccaaagtcctcctcctcttcggcaaattcgtcaatgccgaaattttctccgaactcgtccatataaaggtctcccatatttgataaaaaatacaaaaaatttcaagtgattccacaatcacccaatatacacaaatacgacactatcatcaagatgttcaaacacatatactgagtaaataaagtacgatatattgtatcactatatacattagatgaagtgctagaaatggccgaatactttgagtaatactacaaatagtatgatcagaactgggacgtgccacacttccagtgtgattttattgctcattttactccctgggtttagttgcagcttttgccttagctgttcgttctccttcagcaaattactctttaacttctcaactgataatacatactgaaccagttcatcatacttttgccttagctctaaataaaatagtgaattttatatataaacaattattaaataatataaccaataacatataaatatagtcaacattgtactcaaaaatgcatatatatatagaatatttgagatgtgtaaaaacgcgtctttgtagtaatgaatagttggaaatgtgtaaaatacctggtaggtctacattcgaagattggggcgagataagtctagcagcgatttttgggggtattccatattggcttcccgtggattgtacagatacgttattctccttgaggaaaccgacggataatctatggtcttggatactattcttgacatgggtccaaaggtcctttggtacgggatcatcgtttggtacaactacaaattgcacaagaaaacgatcatttacaaccttaggtgcctcggtaagaggctgaagtatgatttgaacatcttgactttctccgggccttataacacctgtactcggcctaaccaaatacccctttggagttgtagtcttgattttaaacgccacaaattccgctgatacgttctcgagcttaagaacagtagttagtggagtatataggagaagaggaaactcgattgtgtccgagggggtgatcttgagcaaacgcatcataagaaactacaataatttcaaatattcagtgaaaaaaatcggtttaaaattataaatgaaacggagaaggtttggttgcaaaaagaagtgtttcaagtcaagaaatctactggagacatggtaaggatgagcgggacggaggtgtctgtaaacacaggcataatattttcaaaaatactaaaatatagttataaaatacattaaaatgcaaaaatctgttctgattcacgagaaatcaaaaccactgggggcaatggtaccccatgagcaatttgagtaaaagttaaaaattacacctaatttccaactggaagactaagtctagaatttactggttcccaaaatcgttcctacaccgccattatacactttataactgtttattttttacacattttttcgtcacattcctccatcattcttttaatattccttattttatttaaatatctatataaaacttcatgtataacgatgatttaaaccaaaaactagttacgaatcatctaacacataccgagggagaaatcgtgatttgtttggcttgtgaaactgagataaaatttgaatttgccaagattaaaaccctcaagaatacaagtgatgctttcctagcatccaatccattagttagcttatcaaaggtaattgactcaaaatcaactttcctgaatgtttccctcagccagttaaggatatccaaagtgccaaagccatcattagtttcttgcagtgttacatacgaagttgatccaacttcaccttcggtagtctttttgccatccaatccaacgttatcagatggtttaccttttgatgtgttatcaccattgaggtttgaagtggttttaggattcatttcagttgttacattaacgttcttgtgggctgaggttcccatgttagtccctactactgtactaaaatatttgtcaaacatttgatccaaagtcttttgtctaggattaactctctctgactcatttactctgacggtcttctccatctgactgactttatcctgtttatctgtgtcaacgagcttggatagatcagtcgtgagaacactgcttaatcttctttttgtattattccttttatacttgtattttgccggtttcctgtcatatctcggctcggctctaacaaggctcacatcaaacaacttcatggtattgtttttgcggcgttttgagttatcatcggtaatcgataacgccttgttcaaattatcctccaaacctcccataaagtcatactcatagtgcttgctactgtagttgagtggatcatttttaaggctccagtcaatgtcataactggtgtcaaatgatacctcactactagcagccacagtcgcatcatcatactaaacataatcagtaacgaatgaaaaataatatctaaatgagtatattagtgaagtctgagaaatacctgaggagtaaatgaatatgcgttaagtttaaatggtgatgaaagcatcctcaaatcatcgaaactcagccaatccctgtcatctacacaatatattactacaaaaatggaaatataaaaactaactgaattgaactcacttagtttacttgataggtttaattcgttgatgtaatctttaagaactgggctgagttcattgtgttgaaaaaagaactcatttcctgacaatcctaggttcattactctcaacatttcaagcctttcaattggcaccaactcactaaataatttataagttatatttataagaaagtaacaatggaatacgaacctctgatatctttcattaaggtcctgaattgttgaaacactatcagtatccttaattttacgttttctcctgtgttttggttttgttcttggctcatattcagtatcactttcgtagtaattgatggcttttggttttggttctgccgacaaatcaggcatttcgaacctcttcgagaacacaccgaaatctgaagacaagtaccttactttggtcaccagtaggagacatagccccttaaggtaatttccaaccactgagaacgggttatcaacggtatgacatgcagatggcaaagccgttgaaagcttccccaaatcgatatctaccaccagcctaataatttataatcatgtgtgtactttgtagtttaatataacaatatgaattgtatatgtaaattatacaaattaataccatgaaactaaaatttttcaaaaataaaaattatagttaaaataatttaaataagtgtaaataaatataaattactctttttttagcgaattaggtctataaagagcgtcgagtaacggcaggaataatatgctgctgaacccattgggcacaatgacatctttatcgattttgtatgatccaattagctgatcttgatcagattcctgggatatacaggggaatatgccgttaaatgatacgctagacacgtcagtgcgactttcaagtgtcgtcgtacttttaaagtctctatctaacctgctgtctaccggtgtgaagaattcgaaatcatccatgaggttaatctacagagaaaaataaaaactcctaaaatttaaaaaagtgaaaaacattttaaaaatctcactacacatgtggagtaagtgataaatgcatgtatgttgtatttttcatcaaaattgacttttgatcttattattatttattttcttttattttttaaaattttttcgaaatctgattacacattttaggaatcatctattcctatggtatttccgacatctacgccactcacatcacaactataaataccagatattatacaaactattttacattaaaattttttatttttattctctgtgtaatcttttaagattagctctttgggtaggagctgatgttcctgctccatacgctcctaccatatgtaacatttcatttcttctgaaggggtacatctataattgatttattttatgaatttcagttacctcagagtttaaatgttccagttttggtgtacttctcgtcggataactgttgagtgggcacaacctgctaggcagaggttcaaatccgtacgacaaactaatcattcatgagccaaccattatagggtttagcaatttataaaaatgactagataatagtatgacgtaccacaacactataatgttacttctttttaccttttcccttgatttattacttggaaatgataccagcaactgcaaattacaatatactcatgaaacaaacagaaaaaactaactatatgatccatactgtgagattgttcgtgtccatgtaatggacatacgcatagcatataaacctccattggtggaaaatacgtcttctaaaaacctcgtttgaatccccctcacacaatcccacaaggcaaccacttatcattggaaccaactaaaaactattttaatcatgttgaaatagaattagttaggtttaaacatgaaatatggaagaaatggttagaataatacctgcgagtaatctgatgggataatgtcggtttgtgtaacaaatgtgtatttgttcgcgtcaagttcaatttgtatcgggggatcaaacttttctgcaaatttcacgttttgtttaaagttataggtctccacacttccgaagaactcctcgtgtctaaactgcggaaaatgaagtgcttctgagaatccactattgaaataggagcaaaatctaagccatcttgtatccgacgggtgcaccaattctctcttactacagtaattattgcaagaatgcgtgaatatgtaaagtatctaagtaaaaattacagtgtgagtccatagaatcgctgtagtttacagtttgcacagaaattaaagcttttgaggaggtgtaaatagttctggaatgatgaaacatagtactccctgttagtcttatcccaaggcaaacttcctcctagtttttgtaccagatcagtgaatgatggatacgtgtcaattttatgattttgtgtcggcttttgtagatattcaccatctaaagtgttaagtttttctaacctttccttcaagtcctcatgaccactaatctcaagtgcctgtaaaacattgttaatcaatattacaaatacttgatcctttggtaagtttacaagtttaaccagtatctcaacttttgttattgacgctattgcttccaacacttgtgcacctaatatttttaataatttatatgaatacaaacccattccggtaatccatccaaatgtgttaatgaccaatggagctcttacgttccttctactcttctcatagaggtcaaagcattttttaacatgcgttaagaacagaggcgagtttgatactttaatatctgaagtttcattttttttaaataaaatgtacctcccaacagtaatgaaatcatgggcttggcttctctaaccaaattgtaactaggcgttgtaacactctccgatatctaaaaattattaaattaaactccaacgacattattattataataatataattgaccggaataaagtacatgaacataccagtgtaagtgtgattaaacctggagctgataaaaatggtagtccaacatcaacatccatcagaaacacctagacaaaatgatagtttatttatataactaattattttgtttaaaacctacgttagaaacgaaattgagcaagtaattgattgtataagcaactaatgttgattttccataacttttgtccccgtgtaacataattactgggttcccagatacacacaatccaagaaacttttcataaacagtgaatctaaattataaataagatttaaataatttagtatggtatattgtataaataataatactaatgagaatacatttgtttactaataatttttggtggataaaccgtatctagtgcctctgggactgttactgttccaaaacagcttgaaagttccgttaacattacaatagtatcatagtcctaaattaattgaaattagatagtatatataaaatacctggccagtttgcgatttataaaatttaatgtgttgatcatatttggtatattttctacttctttccaaactattctcatactctatgccaaatcccttcctaaattgtgtaaaacacatgtattaacatacatgaaagaggccctcaatgagttgtatgttgaaacgaattgacagcatgaaccaccgtggaattgtgttagaacatcctcacaaaatttacatgaattaggatcttcaagggtctgtgaattacaattgtgagtttcatccaaacacaaagataataatcgttctgaaggatcccatggtgatacaatgaatttccggtaactgtccattacacgatagatgtgacctccaacctgggctgatcctctgagaaattattagagagttatatactaattttaatagggaaaattataattaaacaaacctaataaccttcaacctcaatgacttattaaacaaaaaagactctccggccatgaggccgagcaaataaagacactcgtcgtcataaaggtctaatttctgcaaaatttgttaaaacaatggaataattattttattttagtaagaaattagatatataaggaagatgcgacaacattattaataatatgccaataaatcagtaataaagaataaaaaaataaactaacgttagaattattcgagtgtgggcttaatttagaggattcaaaggcaataagcctatccctagcctcagtatgagtaagttggtaattattgtgaaccatttatagaacacatttgtaagatctaaccatggttttattcattggttaaattacgtgaaaaatgaaaattatccaaaggaaaaatggataatttatgtatgtttgaatagtggtgtaatgtacactccatcagttgtagttgtaaaattttaaaacgatggtagattatattatacattaaatatataaaattataaattagtccctgtgaaaattaaaatgtcgaatagaagaaagtggttgggaggaaattggaaatgcaatggatctaagcaatccatatccgatcttttagcacactttaataatcttaaaagtaaacataacaatctaggtaatgattatattattcttatgattcttctactttttattaaaaccttaactttagatatttttatttcaacacatattacatattacttaaatatttttaactttctatataactttagatgtcgtgctatttccgccttctctgtatgtagaacatactagaaatgtgttgaagaccggtgtttttgagcttggtgtacagaatgtttcacagtcaaagtctggagcctttaccggagagttgagcttacctatgtttagtgatttcggcctaaaatggtcacttgttggtcactctgaacgtagacaactctttaacgaggataactttgacgtgcgtgcaaaagttaagatgctccaagacaacggtgtaaatgcagtcgtttgtttcggtgaaacattgtccgaacgcgaacaaggccaaacagtaaatgtcctaaagagacaactcaacgcctttgtaaaggatgttaaggactgggacaaagtagtactggcctatgaacctgtttgggctatcggcactggtaaagttgccactgttgaacaagttaaccaagcacacaaggtatcagtttatacaaataaaacctttacataattatataataatttccctattcattatttgatgttataacaattatattatagtttgtgagagaacatgtcaggggattagctggagctgtcgccgacaaggtcagagtagtttatggcggatcagtcaacgagaaaaactgtcatgaacttgcaaagtgcaacgatgttgacggatttctagttggaggaacttcacttaagaaggaatttttagatgtgttaaaatcgctagaacaataagttaatttctgtgaataaactttatatattttatattacattcaaatcacactatttatgaaaattataaagcttataaattacaattgtatctaatttaaatataaattacaaaattatggtgattatcatattttgaacgatataaactgagcgtatacttcgtagtgcttctgtgtttgaggatttcattttatattattttaaattacatatatttaatatcattattttaatatgattattttttattaaattttaatggaatcttctaagagatctaacgaaaatgacgaatcgcagactaaaggtattttttaactatatttatgtaattaatttactaaaactcatttaattatgacatttaatttatattttaaataattttgtttagttaaaaggagagaaactgaacatggttcagttctaactggatacggctcaattgatgccataaacaatataatacaatttcaaatacaatcagggcacattagcggagaatcagtagactctctacagcttgagaaacaagtaaataacactagagtccctctgaaccagacttatatccccgtagagtcagttgaagaggagccagaatatgttactgaagaagattttaggcttgatagaataaaggagttgttatctaagccagcacgcgttcaggttaaggattatgcaaattcatgctacgttgagggtaatcagacgtataacatttggtataataaatgggctggggaacgcaactgtgactacgtgaatggacgaaccagcctagcccctgccatgtacacttgtgaccctgaacttgactcaggctatacaagagctaactcaaagcactcagtggatgattcaggcaccaaatttatctgcctttttttcgccaagggctgctgcagtcagggcagcaagtgcaactatttacaccgtgtacccatactcgaggatgaatattttcttgatacatccgttgatatattcggccgtgaacgtttcagtaaacacagagacgatatgactggagttggaagctttaatagtagctgtaaagtattatttataggtgacataactgcggacgtatccacctgtaaccctgtggaagatttaaaaattgaactcgcaaagaagattgaaaaatatgtcccgcttcaggaactaaatgtcataattaacaaaggagttgcatttgctacctttgaatcaagagtatatgcagaatttgtcaaggttgctttatctagccaaccaatgggagtttacagcactgctcttaacgtgaaatgggctcatgatatacagaaaacacagaagaaagacaagaaagatgtaaagaacttcggagaactggttagaaaacatgaagaccagctgaggaacttccaggagaactacctttcagatcccaattttgttactagtctaattaataatcatgctggaactgtaaatccctctgtcaagggagaaagctactccaaaaggaaggaaaaaatggatcagattctaaccactgtggaaaatgtaaatgacgatcaattcaatgtaaacatctgataagaatattttaataaagatgtaatcggttagatttattataaaattaattttttaatctgctctatatcaagcgttcatacttattataaggtttattcaaaattattcataacgtttcttatactcatgactgtgtttacgtctgtacttatctctatcgtgatgttctcgctttgaatggtcctttttaacgtgcttatgatccttatgagaatcatgtgtgttcttatcatccttaacgttcaaattcacattctttttcttcttttttggagcgtaatcaaattcgtcgtaaacgttcttgcgataaaaagtatcatcactaaagggaagtcatatatgaagtatgtaaaggggtagtaagtataaatggataccgtttattatccagattattgttgtcgttatatttatccttaaaatatttgcgggtggagtgtttatcagaatcttcatcctttctagaagtaggaataactgcgtgaggattatcccactttctatgtttcagaagtttatcagaataagggtcctgttctgacctagggacttccgggtcaaaaacgggaacgaatctaggcataagttataaaactaaataaaaataaaaattacaacataattaaggtaaaaactctggaaaagtgtaaaatctaatatatattattcaaattagcatatccatcaaccacacatatataaatagtatttcaatattacatttctatttttaaaatggttggattttatatttttatgtaattttaaataaatgtgtaaactcatgaaaagttgtgagtcacaaatgtagttttaatgtttcaagatgctcagagattcaattcagtccagtaacaagtattttaaagtgctctacggccctctagatcacgttttctacttaactttacataacagaccatacaaatatttcgtgctctatgatgaatgctatcgtcacatcaaaaagatagatgctaccaatgtttcctgtttccagaccaagtgtgttaactccgagtcaacttacgagcatagaaataggaaaaagaccgttttaactacaaaacatgtaagatcccaaccatgtaacttgttttaatttagattctggagatatatttcgggagtacaaataggaacccactcattttcacagcactttcgtttgatgacctcaaacttttaagcactgaaattgaaaatgtgtttggagttagagtttattcatacgggagccttaacgcagcctttaaaaaggcactccaacaatctgacgatagggaagaagcccgtgaagaatatgattatgacgacaggattcacaaatataagcttcacaagtaagctattttaaatttattatgctttaggcatgctcacgacttgaagaatttatacgatttggtacaacaattgtttatattatacaatctgttttctgtgattccaaaatataataaaattttaggcacaattggaccctgatgaacacggtgagcctatggcagagttttcaggaaaatatcctgtggtaattgaaggagacatggaaagtggtgagtaatataccatatccatctcattaaatgaataacctaatcaattatataggctcgttcgtatcctacagagatataagaacaaagcacggattaactaactcagtttataaggtcgagtggtacctttcaactgcatttggtagtcaggatcagttctttcaaataccttctgagacttcagacaccttttatctctctgaatacatggtaagcttttgattaatatccaatatgaatcagatcggtcattacttaatggtgaaggtttatagggcaataaagtattatgaaaacaggtcctatgtatactcagtttcgcaaaaaggacctatctgtccaaccactcagctttgtcataacatactaatcaactcatcaagggtatcttttctagtttaatttacataaaatgtttagaaatccgactttcatgatgtgctgatttcaactcttgacctagacgttctattcgctgttgttgataaatctagcaaattcggggaatacaaaccctttaataacccaaatgtagttaaaaattaccctcattttcaaagagcggtaacgtttactgaggataatttactagacaatgagtccggttctgaggataacaagcaggttgcgaaagtcgaaaaaagcctttcagcagaagttgtaactcatgaaaatagtgttaataatgataaaattgtggacaaaattgatccaacccctgtagaaacggttgaactagttcaaagtgataccagcaatgaattggaggaagaaaattatcttgataacatcgccgatgatctgtttgaggatgaaaacgttcaaaccaagataccaagagggaattatattaagttaaaagctccatccaaagaagttaaaatttacgatttagcccaagatggcgatcacgttgagaatagtgaggaacaagaaatgacaccagaacaaatacgtagtaacaaggagagtctaaaatttctttatggtatttcaagctcagaacttgatttaataaatgaatccacaaccgtttctgacctctcggaggacgaaaagaagaccaacaaccctaataaatatattgaaaagggtaagaaaaagaggttctcgatttttaatttattcaaatcaaataaaagagctgaaaatcttaggatacctaacgataaaccacaaaaacaaatgaaaagaaatcaaaagactcaccctcaacaacaaaacattaataaaaaccctggaaaagtaaaatctgatcagaaaaatgtggttgatgataaagaattagttgagaagttggatgaacaaaaccatggccttgaacaacctgataaccaggaaccaaaacctgttaaaaatcaacctgacggtaacatttcagattttgaaattgaatctggtgactcaaaaatgtatattaaacagtatgatgatattcaaggttctaacgataagattcctatggacagtaaacttaagggtaaatggtcacttaaattatttaataaaggtaatgctaaagctaaaattgaaggcggtgggtctaacagttctagatcatccaagagtactgacagcaaacctgataaaaagaataaaaaacccaaaaaggttatttatgataggaaaagagaaaaacaacagagagctctaagggctaaaagtgaaatgaacaactcgccaacttctaattctgaattcactaccactggttctgaggactttgacgaatcagtttcatcaaatgattttgataaaaaactaagagaaaaccccaagtctttaacgcctcaaaaacctgctaaacgaaaggacaaaccagctaaatctgaaaagaataagcctttaaagggagagaaacatgttaaagggccaaaatctccgaataattcaagaatttcaggttctagaacacccagggcggggaaaacacccaccaattcaccagtgtcaaaacctattaaaggtaaagccaaaactggtaaaaaccctcctaacaaacagaatatgaaggttcatgagactaaaaagggcaagggtggtattttcagtatttttaagaagaacaaacatgaagaagcacctccacaggatcagatcaaaccaattgatccacgagaacaggagaaaattagcttagaaaagtacaagagaatagttgataccataaaatttgttccagttaaattgaggatttgcttgaacgtaatgattggatagatttttatagttttacaaatctgatacacattgtataatttaatgtttaggagcttattataacatttggattgacaagcttgagtttgaggtggaaccaaataacagttgagaaggcagaccaactatgttttagtcagtttccatcaatccaacaacaacttgaaaacaaactgacaatagtttacaacaagtattttttacattttaaaaataattgtttagtggagttccaatcaaggttagactaagaacgcagtcgtcatttcaaagaaatgttctattccactctataatatttaacaaatttagaagaaattacgtaagtttaattgcaattaaatctttttagtcaattgaccgttgtgatagagaacttaacacttgtttttacgacggaataaagagagcatacgtaagagtttgcgcagcatattatgaagccagtaaaagaaatgaagaaaagaaccagaattaaacctagggaattctcatgaattttaaatgcagagatttatttaataatgtagtttgatttttatttccacacattatgtacttattgttgtggcagattattttatgtaaaataaaataaatcaatcgacaaaaacattttattatcagtttgaaaatttaaaattttttgtaatttaatttatcaaaaatgacttcagttgatgccatgaaggcaactctgaagcgccttgagaaggagcgtgttacgctactcggtcaaatggaagacgtttcgcaagattcctcagaacacaggtaatttagataaatatttattagttttcttaatttcactttataattattttgtacaattacaaataatacacatttaactaccacattttgtacaaattcattaatttcattgttcaggcttgttcttaagaacttatcaaaactaccttccgatagaaagtgttatcgcattattggaggtgtcgctgttgagagaacagtcgaggaagttatgccatcactggccactcacgctgatatggtatttcttacttctaattaccaatatttatcatttaaactttgttttatttcctaattttttcattaaaaacttatttatttcatttagcttgaccagcttcgcgagaaactgaagggccacttggacactttgaacagtgaaattaacaaactaggcgagtctcttcagaatacagtcaaggaactacaaaattcaaattaagcacttaactacattaacactgtcccgtttgtaatattttaaataatcattatattctgtatataaattatggcaataaattattttatagcctctttaaactagttagaggttgtatttccttgatgtttttggctttagtaatgtacatgattagtctatccacaccaattccaagtccagccatgggctccattccacaaaatgctgcgttcaagaattctttatcaacttcctttccctttagattattgtctttcacttcagaaatctctgaatccagtaccgattttgataatttaagtggattacactgctcagtggaactatttgctatttccataccacctagataactctcaaacctgttactgaacagtttctcattagaaccatcattatttgcggatttctcatcaaaatatgttaatggtgatacttgagttggaaaatgagttacgtgaacgggatatgttaagtttggaacaacaaatttctcgaaaatttcattcgctattgacccccaattaaccctccccattgaagactcaatttgttccgatcttgcagagtcagttttagatatcatttccatgaatttatccaaaagttcatcttcgttgtaagatgttatgtctactccagtgtattccttaatcaagtcagagaatttagctcttctccacttaacctcaaatacattatcacacacagcatcgtcattgaatccatatgataacaaagagttaatcagatcctccaagagcttaatcatggtgttgtagtccgccattttctggtatatttcaatcattgtgaattctggagagtgcctcaaactagaaccctcgttcctaaaacacttaccgatctcaaacacctaagtatacatgttaatcatttgtatgaataaatacaacatattgtacatattgtaaataatacctttgtaagtggtaaacccatgaatattttcttaatactgaattcgggtgcaattctcagcttaaccttctcgtttagccttttgtagtaagtctcaaaaggttctgccaagtctccagatgtgtaatggtttaaaataggagtatcgacttccacaaagcccctttcacataaaaacctccttatctttgcaattatttggaatctcttgaggacttgatacctgctaagttcatttgttagaagatccaagtgcctcagtctgtaccttgtttctatatcctttaaaccatgctgtttactgggaggcggtattaaacactttgaaaggaactttattcttttcggaattattgaaatttcacctagattagtcttcttcacattaccgtacaactcaacaacatctccaatatcgattaattcaacaaaatccttacaagaatattggtaatttttgttttcacttatattattgtttgtatcattttcttgattatctccactattattacccggataaacaagtattggttcctctagtctaaacattacttgtaatttgttatcttttctaagccctttcaaagttatatctgaagttgcgtaatcaccgaaatccttagtactgttgacaatgtcaatgaaatgaccatcgaatctaacgctttcaactctgccatacactttgtagaacctatcagcttcctcaccgtttgttaaactctcattttcactgattacctttgaaaaactggaataatcagatgatggtttaacctcagggtatggattaactttgaacttctttgtcaagacttcacaatggtctagcctacttttgatttgtttcaataagtgagggctttcgtcgtatgaacatagtgaggatatcaaagatgtgtcagcagtttcatcagttgagcttaacacatcattaggggagttagtaatgtaagaatctgttaaatattgagggtgttcattgttataagaatgattattggttgttaattgattttcagttgtttcagaattattaaacagacttaacctcaatattttactatttttagatgttgaaaggttgaaaatatcattattatttatattaaaactgtttttatataataaagtttgttttggaagtataaagagggatcttttaaaaaaatattttacacatgaagcttctattatattaaatattacgaacaaaggaaacaattttttaatgagaaaatgacaaaataacattataaaatatatacatttctaaatttaacggtttaaaagtataaaattacatttttgaatattataagatggaatcttccttcaaagttaaggtatagggattccatgaaatctcagtttaaatcatttaaatatatcaaatttcattaacatattttgttagttataaaattttaataattaatatactttaatattcgtttgaatgattaaatggataaagttgatcacaaatcgcctaatattacgttttgtatagagaatgaagatcataccctagggaacactttgagggcattattggttgagagagatgatgtagtttttgctggatactctgttcctcatccaatggaaccagaaatgaacgtaagaatacagacaacaggtatagcaatagagaatactttttaataacaaaaatgatttacttttttgataaattattctaataatgattttaggccaaccggctgtagaagttttcctggattgccttgacgacatggtcaagatatgtgacatattaacagagaaatttgaaaaggcaatgaaggaacaaacatgacgactataaataaaaaaatattcttaatattaaattgtaatataaataatggaatgtttgtaaattatccctaaatattttaaaacacaaacagttttaattgttttaatttaataaatttatgttcaataattattataaaaaatttttattattaaatattttttattttgctttgaaagtttaataaattaattttaaaaacaattttttgtttacacatttctctttacacactacattttggaattttcctttgttttctttattaatttattattcagttctttcatttgtaaattatttttttattattttgtcatattaatgtaaattttaatttgtttgtttccatgaatattatcatgctccgtcctaggcttccataaatgtatttctaaaacacaaaaaacaataaatggagaaatctttaccatttgttcttaatcctttaacggatgatgatgaaatttcacttttggagtatttcctacaactttcattttacacaactgacttacacattacaaattgctggaccctttgtacaaaagatgaattcaattcatttaagaacaataacgctaaggtattataatattaaacaagttctaattaatattaaactactttctaattaatttcaaagatgtgttcaaatttattataattttttaggaatttggtggctctctagtttcattcttgtttgatatgaacaatctcgagcctcctcagtcatttgagaactctaccagctctggattattaaacattgactataaaaaacaactttttgagtatggaactatttctcctccctctggttttcaaggtaatctaacaaatactttttcttaacccctctttcacttacttatccaatataatcaatattgttttaaattttaatacagctaaccctactggaacattcagaatgttgctgctcaaagcttctctaggccgagtttatagctactcaccagagtcaaagactcctcaacgtatttttatcataattataatcatgtttagaggaatttgtaaaaatggacttccccagcggtttcaacacacttgaacttgtggttaacagtgatcctaaacgatttaacagcttatatcgagtttccgatgcttctcaagtcttgctttatgctgcagttgaatttgagtttacacctctaaaggtccaggttcctgatccagtttgtgaaatgtgtgattcatcaatggcaaagtggtactgccattctgacaggtatttttagactttttaattagtttagggctcatttctgtgatggatgtgatatgaaacagcatggcagcacaaggatattctctaggcacgtcagaattccttgctcaaaatcacctaatcaatttggcctttgtgaacagcatcccactgatgttgttgatatggtctgcttaaaggtataccagtatttttacctatatatttgattgattcatcatattttagtgctgtaccctactttgtaacaactgcattctatttggaaaacatagtgaaccatcattttttgaccatcctttaatgtcaactctcgatacttacgagttatctttagagaagaattcagactccgacgagaatctgaagtttcgaaaaggacaaatttctgaaaagattaaaaccagacacaattcgacatcgcagatctatgccaactctaaaggtgttgaagataaaatcgactattgcaaaaaaatgatacttaatcagctagacgaaatgaagtctaaaaaaatgaactacttaaattcaatacagcgtgaggttaacactcagctaaaactaatcgactggatgcaggtttgttttatccatcatacaataattttattagagctttttgcatcacttgctactatctcttgatccctgccagtttataatgtttaagaagcgatatgacttacttgttaagaagtactttactaaggatttgaccaactatcttgagttccccatttggatgaacaaggaactcactctggttggtgacgccaccataacttcaagctctgtaaggacgctttcacgtacattttcaaatccttctaatcagcctcttgattccactcctacagactccaatgttcatctcgaaaacaagagttctgataaattacttgactggacccctctaaacatgtacgaagatttcaatgaaactgtgggtagagtaaccaaacctacctctgttaaatcagatccagacgttacaaatacccaaaacaacgttgtttcaaccaaattggtcaataaatctccacatgaactcgacgttctcgatactgcaactaagctctggcattatttatctgattttaaaatgggtactttaattcaacttttaaaggtattttaataaatagtattttacatatttataaactgatttgtataacaattatttattcttttaggttgttgaactacctgatcgaagcttgttggttcgtcatctagtgaacctggccaaccatttcgaacaactcggacctctttttacacacctctcaaacgtaatacatacttttactataacaaacaattactattactataattaaccataacaatggccacctctataactattattaatatgttgttaattaatttttagtatgaaatgaataattcattgaatgattttggttattgcgtcctgttaagaagtagtggtgttttgggcgatgttttatcgtttctattctgctcagactattccacgagggataattcggattttctaaatcaaattacacaccctctagatcatcattttaacctatatttaaattctaaatcagacaatgaggatgttttgaatgaaatggttgacaattgcatggttgagattgttttcaaactcatcagtttggatgtggctgcacttcccacaagctttcactttgttctttatacactttccgaccttttcctaaagctcaaagttgagtacaggtcctacgttgtagtggatttcttctgctcagttttatccagttatctgctccgatacttaaaccactacaatttaagtgatcttttcaccaatttcaacacgaaatctgacaatgaccctgatttggacgagaaatacaacaaattaaagctatttgtgagggagcttagctataaattcggtaggtctgccattgttatctgggagcttgactcagttactcacaccgagtcttatgaactaaagcaatctcaaaaggtattttcacaaattattaaaccatttagttagttttattatatttaacttactaaattttatagatttatgagtggtcccaaaacatccttgccaagcctaggctgaaatcaaagttacttctgaagcctgtttcttctcaggaacttgatgagatttgcacctttgttctttctcaggtttctaaatttgaaaagaaattaaactctggaagcgatttcattcccatcagagactctaaagaactcactaaaaaatacaacttcttgcacctgtttaagatggctcatcaaatacctatttaatataatcccatacttataccttttattaacatgattaattttatcacattgttcattaacaagattaatttaattacatttattgcacattgagcactactttatggtttagaaatgtaaaaagaaggttagcacgttattaatcaccagaatataatactctggtgtacatgttatgtggatcaattccgaacccttgtgaggtcattagaagtgtgaaatcttcaggagttatttcgtccagcaccttctcatattcagttattgaaagtatattctttgttaaggcctgttccaattgtattccagacatattgcctgcatagtacccttgcttcttctccttaattttggcctttattaatttcttacagttgtccaaataagttttaccgaagtctaattcctggtttgacagtctcttcaggtaattaattatttctgacaaaatcactggatagtttcttttattgctgaacgctgaaatcacaaaaaagctatcactaatgtcgtttgtcacgacttctaacctcgtgtcatatgtcaaattcttcatagtcctcaactaaacattaattttatttaggtattaaaaataatttaatattttttatataattatttaattactttcatgaataaatcggagtttagggcctctgaaaacaaatcagaagccgcttttgggaacgctgggtgcatccacaactctctcctcattattgccagtttatctgaaaatcatttatccattatcatttaattataaatttatagtatacctatatcttcttttgtttcagaggaatctctaaaaatattttagaaatgagtggaaatacctgaatgtgttttccaacagttttgaaatgtgtgtcccatcagttataaatccgctggcatttggggcgtgtcctcccaccagcacaattgctttgtctgtgacatcatcaaagaacttaaccatgttctttctgtagtatagctgagactcaaaattgtctaaaaaatgagaagtagacgatgttttactaaattccaattggttcaattcactttttgcctcatctgtgattgtattcttcgatactattaatgagctactcaaatactgagtaacgtatttcctcagcttcttcaggtcaaagttgctcactacattgacttccttagcggtgctattaaccaattttttagtctcctttactacagtttcatatttaatttcgtctaatttatcaatttccagtccttcaaatccaagaatgcctccactcatgttatgcaagagctcaccaatcccataattctaaacataaattaaaccaaaaaattgttgtgatagtaatctattataacaatatataccataccttaatatctttgatgtatttcttatgatctgacgtgattttctgcttagctctgtcaaattcgtcttgcgttatgcgataattctctagtatgttatttaaaatctgcagtgaatattccaacggtttaacattattttctccattattactcgtgaacggtacatttattgagatgttaagatagtcatagttgagtgagatgttaacattaattgagttgagttcacaaaataattccacctgctttctatccaacgaacccattgaaccgctttccatcaggctagttgatattaaaaggagcatcagcttattcgttttaattattgattccctgtccgaattatttcccagttctggtatcctgttatttaatatatattcatatattggtatatttgctgataggtacaccgaattatcgtctgtacgtctggtgttaactctaacattattgttcaaagtgtacatgtcgtataaatcagataatgattcagtttttttgttattaggatcagattttgataattcagtttgatttctattcagatcactcgtatttatatcggtagttttttcattttcaagtgtttttttataaagttcacagggttgtgttcttactaatggtttctgtgcttgtaataaattgtaaattatatgtgaattttcttgttgattcaagtcacagtcaaattgtttagccaaaatagactcaatctctgggcactctcttcttggggttggaacacacagctcaacatgtttcgacaagttcaaatattccttaaagtccatgtaatatcgtttaaacaagttcttgttcggttcactcaagtttgaaaggtatccttcataatcgaatgactccttatgaaagtttttatccagttgtgggaatatgttatcgctagaccttgcttttatttcttcaacgtgtttcttgtccaatagggagtcgggtagctgaattcattatttataaaacaatataaactcacgtttacttgcaaactactaaatttaatttttgtagtaatcgcatgattgaaaagttccctcagttcttccaatgtaacatctaaattagtgaattttgttaatataattgaaaacatactttgtactggggttgtagcaagaacttttaaacccctcaaatcacctttataccagctgaacatatcatttaatctttgtaaaacattattagggtcaatatcgtcgtagcttctcttaattaactttattgtttgattcttatctaggtttgctctatcacatatatgattctctataaagtctgctgtattgttttctttgtaattcttagtctcgaaatcatacagcagtgcatcctttgcgtaatccaaaaacttgttactcacacactcccctagaaaacgcccaatttcagaaatgacgtaaaatactgaattcttccagtcaccagtatcacactttatatccagcgaccgtagtctacatccttcattcacacagtcatagtcgtttgcctcaacgttattgtaaagttgggtgtccctcttaaatatcatgaaattgatactcagaatcttatatactaatttgcttagtatgaagttgtagtagtctgagaatgttcttattggtgggattggcaacttctttaatatttcaaatgaaaagcacggaagcttatcacacaaccaaacatcaaacacgggttctaaataaaatttgtgatcaccaattaacctacccttctggttatatatgtgcgttactggtggcattcctttcctcctaataatcaataaaaaagttattcaattaccttgccttttccgtattcttataaagtagccttatttctttaagattaggtgggttttccaattttgaaaacacatcatttatcgtttccgaaacatctgtctcatccaggtttcctacaaataatattatatacaattattaccttgtataaacaattgtatattatctggtatatagtgttgagaatggtatgctttcagatcttcaactttataattcataatcatatccaggtctccaattggaaatctcacgggcaatctaaaaaacgattaaaattattataaatttataatttgttacatgttttctttatgaattgtctttactgtgttacaatttttgtagtactctgccgttgtgattatttttgcttctgataaaactgcctttctttccttatccaactcatattgactaaattgtgaaggagcctatattatttcatttaatagaaacaataaacctctacaacatccaacagtgtgtcaagaaccttgtgtaatttttccttttttgtgttacaacccaactcgctatcagttttaacaaagaaaactgtctgattgtagtcagtgaaggcgtttgttttaactgaataattacaaagtctagttcttttcctaaatttttataaattagttgaaatatatgtatttaaacatacttgctacccatatatgtcacgtgttcacataaatgggctattcctctttgattatccttttcatctgcgcttcccgagcatacttgtaaataagcttccaaagtaggtgtatcttttttgtaaaatgagtattttagtccattttccagtgaacctctgtacacatcattctcagtcagtagttcttcacgtccaaaaagctattaattttaatgatttagataataattaccttcttataagaaaaaacttgtttattcaaagttccagactaaatattaatgataggaaggtcaatggtttattaaaaatacgtttgacgattgcgatggaggcctaataaatgagaacaaatgtattctaggatttaactcatgtaaaaattgataattcttatttaaattaatgctaagagcttgcgatatgtttattataatgaacaaaaatgacaaacattgtaggattatactgcgattattaaaaaatgtaaataaaactggcattttaaatacaaataaagacctattaggctgtttttacaaataatgtacataaattaaagtgatttgacatttaaataaaattataacatgaaatctattttttatacatatgtattttacacatttgttgcttaattaatcatatatggggaaatatactaatattttaataaataaacatttatatgttatattaatcaaaattctatcaaatgtgtaacatattctcacatttttaaataaattttactttttctatcacccgatattatcagcaaccatttcatttatttgttatattttttataattttagttgattaatttatatacataaaatggtatggattcgattcctactcaatgcggtcctcataaaacttattctataaactcactagaaccaacttcctcaatacaatcggaatcttacttatatgacaaaaaattcgtcgattttatagagaaagatgaatatatcaaacttttcaatcactatattcatttaggaggtgatccagcaagatatgccctcaaaagagtccatttattatcacatcacttgggatccgacctaacacatgaatgtttggtcccctttttatcaagtacttttcttacttaaaacaaataattatcataactcaatatagactaattatttttaaacaataattaataatttaacgatatttttatttgtaggcttacaaaaaactgttgatatttcacttttacccgcattttgtgattcctggctccttctttacaaaaacatagatgaaatcgaaactttacttttaatttttaagagttttgagttttttctatcccacgaaaacccacaaataagagtcaaggtatttttcaagttgatatcatccgtaggcaacgaaaaatgttatgctgatagtcgagagctcaataaagccgagtaaaaatggaaagagttcaagcctagaggttgttaactcgatactgtgcccgatgataggaacgttcgttgaaagtaagtttaacaagaataaatttattcaggtgattggttcccatgtgcaaaatcagcgtgttatctaataccgaaaatatattcatacgcatcggaaaaatcgcaaaatgaacttagacagtaagtggaacataaatgataaatatttctagagcatttcaaagactatgcgactcagaaacgctgacggttaaaatagcagcagcaaagaacctgaagcaggtgatatcaatcattgaaccggaacacgctatttcaatgttttggcttgttctcaagaacatgtcaatagacaatgaagaagaaataagaatgttagctgtggattgttccctagtttttgcaaagcagtgcacaccggaacagaacctgaacctgaatataccgctgttaaaggcagcatcagaggatacgtcatggaaagttcgagagtttgttggtctcaattttataaaggtaagctgaatacgaataaatattaatgtagatatatgaaacctttgatgagttggttgttaaggataatctgtttgactcccatgtaaatttactatgcgacaacaatgatagagttaaatcgtcctcaattcgatcattttcaaactggtcaggaattctttcacaggaacttatcgaggcgtacgtacctatactcgataatttggcaaagaagtcaaataaagatataagacaaagcgtgtgtaaaacactcgcgttgtttgcaatgaagcttaagaagaaggatgcgttgtcaattctaaggccaaccatccaactacttttgacagatgagtcaatggaagtaagattacggtatgtgattgaataaatataaataattattagagtggttgagaacatacatttgatatgtgatcgtgaagagttctacggattaataggagagaagctcattgaaaccatcgacacatcaattgaaaacccaatttggaggaacagacttgttatagcagagcaacttacgagtttctttagccactttggagccacaatatttgagcaaagttttctaaacgtacttttcagattattactcgacgatgtctggaaagttcgaaatgcagttttagtcagtttggagaaaatctgtaatgaatgcggaagcatatgggcagtaaagttcattttatcagagttaaaaaccatttatttaactcccaggcagtcaagtttcacaaaaaacaagaaaactaaaagttccattagaatagtcattatacaagcgcttgtcgtaagtttaaaataatatttataatacagatttaatgaataatttaggccgtagctaaatcaatagatgttgaaaacctaattgaacacattatgccattgcttctcaactcattaacggtatgttagaattgaattatgacttttaggattctattccaaatatacgttttgtatctgtaaattcactcgcaaatatatttataatatataaaaatgaaaagccggagctattccttcaagcaaaatggtatcaattatgtagattgtttagctgcacatttaaatacaaattctaaattataataaatgtttagcgcactgattaagttgtgccaagattcagatgaagatgtaaaatatttcgccaaaagagcactggatacctatgagagatcatttagtgatcacctagtaatgtaattatatggcctgacggtcgttgaaattaaaataaatttatttcatatttcatacatttttaaatggaactaataatttgtattataaatgctatttttgtcaaatttcatacttaaaaataactcgaccttccatatcatggcaacaagaagaactaaaaccaaattgagagcagaaccttatcgcacctgccctctgggtattttattcgtaatttagaatattttcaatacatatttttaaaaataaaaactgaaaaattaattgtttaggcccaaggaatcttaaagtccatccagcgtcatctggaccaccttcaacccataatattgaaactaagtcatattcctcaggatctggaatgatatttgtaaagaaatatggccagcatatgttaaaaaacccaggagttttggataaaatcataaaagctgcggagattcgtccaacagataccgttttggagattggtccaggtactataatattataactttaaatatcattcactaaattgtgattaggaactggaaattggactgttaggttggttactttagctaagaaggttgttgcaattgacgttgacgccaggatgatttctgaagttaaaaacaggtgttttcaactagggtacacaaacttggaagttattgaagctgacgcacttagaacaactttcccaaagtttgatatctgtatggccaatcttccatttcaaatatccagtccattcatattcaagcttttatcgcacaggccattgttcaggtaccttttccattattattactttgctttggagtttatcacatttacattttcatatttacatttattttattttaattatcattttcataaaaaattttaggtctgcaatattagtctttcagaaagaatttgcagaacgacttcttgcatcaactaatgatgacaaatatgggagacttgcaataaacactagacttttctgtacagtaaccagaatttgcaaggtttcagcaggtaacaaaatgatatatatatatatacttttatatctataataactttaaatttattttctcactaatctgtattttaggcagttttaatcctccaccaaaagttgagagtatggtagtgaagatagttcccagagaacaaccacttgtggtatgttaatttatcaaattactccttttcaggtagattttggggaatgggacggtatgataaggatttgtttctcaagaaagaggaggaccctgagaagtttgtttaagaaacagtcggtgttatcaattttggagtcaaattacaagtcatggtgtacaataaataacaaagttccggtagttaaaccttttaaggtatgattaatttttttaaaattggttttaggaattcgtcattgaaatccttgaaggttctggactagcagagagaagaagtataactgtcagcattgctgagtttctaaaactactactcgcattcaatgaagttggaattcacttttgcaatatcgcaaatccttccaagaaaggtattttaatacaatactatttacataacatatacgtatatacataattttttaaagaattaaaataataaattagatttgatgccgaacttcctatttgaggatgatgttgaaatggaggttgacgattagttaccactgagccaggtgtacagccttaccacagttggtctcgttgtgcacttcgaggcatcttaagctgcagtaataactgtttatggcctcaattcgcctgcttgcacagtttttacacttgtagtttgcaaagaacccgcaaatcacgcagaggtgtctttgaggccgagcagggccagaggcgtaagcagctctccagcaccgcaaattattcctaaaaataatgttaatttgatatattaccataaatactgtataaatataagttatgcggagtgaatatatgataaaatttatgtatatgaatgagttttacttctcagcctcgacctcgtcgtggtcaacaatcaaattaatatccatgggttccctatgcttgtaaatgctatgagatgacttcgacacagccttgccaacatattcgtcgtcggaatccctgtttttatttccctttttagccataattaagatttctgataaatttggtcatataaaagcggcatttgagctgtctttatatttttaaattttatcgagggaaaccccccaaaagaatagttttaagtatagagtttcatcttatattgagattcattttataataaattatgaggtcggtaaacaaatatattctataatatgttatttaacctgacataaacaaagttcatctattaataaaagtaaacaccaaaattttagttttaacacgtaaaatgtaataaaattaatctttaaaatcatgtagcaggtcgttgcttaaaactgctggatttgctggcaatcatgtgtaaggtccttacaaaccaagctaatagtgctgtaaatagactcaaaaccttatcccttactggttttacatacctaaaataatatgtgatttggaatctcaaaaatatctatgatgtgtatctcaaaatatacaatcttgtggattctaatcatataaaaactcactgatctgctttcggccctagtaactttgttgctgaatagctgaatgtgaaatagaatactattagcagtggaattactacatagaatcttagaagaactttgaatacgcttcttagttcattccatcccagcaccaataacacaagccagaatattggaggtatattcctccatgaacttatggatgtgcctgcattctgaacaacctgtgcattcttgtacatttccaaaaactttttcgagcatgagtttgtaacttccagtgcaaactgttccgttactggggtactatacttatcactaactggctctcccagtgttgaatagaaatactggttctttttaacatcgttcagatcaaatgagggcatctttttagtttttgtcttcttcaaaactttgagtaatgttagagcgtcttctttggactctttgtatctattattcaactcctgagctgattgcttgtgccactccgtcggtaccaactcgcctttaaactcttggtaattgaagaatttatcgaatctttccaagagcagttgttctagattattctgcaactcgtcaaagttatgcctggctgctttcagaagcaagacaagtgacaattgggcaaattcagctttactcgcacgatttactaatccctggtaacttgtggtcagttgatccatacaatttttatgtgtttcgtcaaacagttcatcaaagtagtcccagaactcatcctcagttaatgaacgatccaacaaattgttttttaccattacgaaagttgagttacacatcgagtctaactgttgtttcagaagccctaagtgccttgatctcagaacttcaaactctgttgatactaacaagttcaggtgatctttcagcggttgggcatcaaattcatattcaaatgaaactgttttattaaatgaaactttgaatcgactcaaatgttcactcaacttttcactctgtttgctttgtaactcttcacacttcttactaaaactcggccacactgtgtatggccttgcatttgcaactttaagttcttttccactagaatttactgtaaactccttatctagtagcgatgaagactctactgccagtttcttcacgtaacctgccaaggctgattcaaaacacggttggaactttccacataacctaaaatgaaatgaaaattttcatcataaaacactcactgtgataataattcctttcccactttctctgatacttttggatcatatctcgatgcttgtgagaaatactcactttcaactttgtttaataggctcattaaatattcactaaagtctgtttctgtaagttctggtacggaggttgttgctgattccaaaatcgctgtttttatttctgaacatctataacttgatagcatttccttctgggtgggtatgtccaggtgattctgttctatgattgtcttccatacattttttgagtacacaaagaatccgtctgatggcactcttcttgaatattccttaggtttaaggctctcccatgtttttttaacctctttaacatccttctcgaacaattctggttgcgtgactgcatttgataaaccgaaaactcttatttcaaacagtgattcaactcccatgttttcaaatcgagcaggctaaaaattaattttaatttttatttttttgagtttgttttactttaggtttatatttaaatctacctttgaaatctcgttccaaatacttctcatgtaattgtttagcacataatccttcaccacatctaaacgtaatttaaaaatataaaactcactcaggggagataaactaggtgaccaatctcgaacacagaaaaacaaaaccgttttatagttcctaataaatatttattagagttaacatgaatagttgtttatattacatactcttcattatttgtatcaactagttccaagttagcctcaactaccgtctttaaaagcccgtagttagaaccagtcaggtttcccattgagttgtaccatagatttacaataaccacgtccgataacgccaaacagaacaatgacgatctatgctcaaatgttagcctcccttctcctcgttcccttgagtctgttccttctgaatcaaaaactactgtagcactcacactagtgtcttttggtaacactagtgatccccaaattcccttagttgtttgcgaatgccctcttgaggcatccatagtctgaaaactggcattgaaaaggctgtttagcagatgacctgaattttcattaatttgatatttatacaattataataatgttatatatgtgtataatccttacttttcccgctgctttgggatcccaaaattgtgacaacattgaacctgaatccaacatcttcaaatcctgacttttttaaaaactcgtgaaatccggggctaagaaatatttattaaaatcttggtttaaattaatttttacttactttatctcacattgatagttgctgaactcgacaggtgatagagatacagtatcactgtctttatttgaaaagtcgtttgaagattccatgtttaactgtggtcaatggttagaaatacattaattagagggttttaggataaatttgtcttaatttttaaaaatatcttataatttgagacaccacacttgacacaattttacacatgcaatcttataatgcaaattttgtacaaaaacacacaaaaatatgtagatccgcttccttaacaacgaaattgttggaaatgttcgactaatgtgtatataaaaattgaaatttaaattaagatctatgttacattaaatgacttacttgtaggaagttgctgtagcattgcaactgtaactggttcatatagctgaactggctgcagattattgtacacaaattgatcaggtttctcttgatagttgaaatactctttagcataatttgaatatcttacatttggatgattacccatcgttgggtaataagttgcttgaccataattgttaaaaccatagttctgattcattggtattgaaaaggtgcatcctccataccaattgtggctttgaactgcttctctgattagtttctccggctttgtttcaagccaatttggccctcttggatctccataatttgcacctggtggagagttaacagtggcagttttactccttgcattaattcttccggaaacacttaggtttcttgagaaaactcttgaagttacgttatttgtttggcttcttcctgtcccaggttgattaaccttctggcctgcaggtaaaactggttttatcttaatttcaactaaattattactagttccatttaccataaccttctgactcataactcttgtaatattctcagtattgtttctaacctcgttgtaatttacattgtcctgattagttcttgcggtattcgagttgaaatacttattgttgaggttggttagtgttatcaagtcagttttcatcctctcaaacttcatttgctgttccttggccttttctctgccgtggtttattaaaaccatccaggcatcagcaggtaacagaaatccataaagactgttagcccactttgtgctatacgatttgttggggtatgaagggaagagcaatgcatttttgggcaattttgatgaatggtaaaacagagcttccgatacctgatttaactttggaagcctaagcctctttagttgagaaagttttctattaactccatccacaacctcttcaactccaagtcctcctctcctagtaggcctgtcatataaaagagttagcaagagtgtgtatgtgaaagctccgtgaactacaacttcgtcgtccctcacagcattattattaaccttagattggcgataaaactgttccaagtttaaaggcttgaaaagacactctattgatacatttttcaagctacttgatgaaatgaccacatagttaaccattccatgtgtggcatccaaactcagttgaacatcagataaactgctcagactatcgacctcaattgttggaagatactttactttagtcatttggttcatcatgtttggatctttatacactgaatctgagcattcaaatgaagagagttttcctgtcggttcagaaaatggccagaaacccttcatcatactgccctttactggccctgacctactagatcctccaacaactgtttgtaagtttgaggaatcaaagaaaacgtttaatctgcatgttgaaccaattgattggtaaaggcacttgaggtcactacatgtgactagtccattctgttggaaatctgagggtaccagagcctcatcatacccttctccttcatatcctgacaaatcatcgacctggactgagtggccagagaagaaaaagactgccaaatcgtttggagaactggcgaaatttagccacttaagtgatctgaagatatttcctctagatgggaacatttccactggcgttggaacagccacagaatccagacacatattatcatttagtgtcaagtgttttatgtttctctccactaaatgtcttccaaacattgatgttttctttgttggatatgtgtttctttcctctacactcttatttattctggttagatctaaaccaaacccattttccgagagtaaagaattattatattgcgataggtttcttgtgtatgctgggcttggccttgagtctagcaataaaataacgtttttaggatcaaaattgaaccttctgaccaatacctgtgcaaatacaaatgcgtcattgcagcatcctctcagttgtgcgtctgggtttcctaagtagttggatccaaccaccactgctcttttcacgggcgctgattgaaatctatccattggagcataaacccttgtgacatatgatgggttaaaccccttttgtttattattaccatcaggtacctcagttccattccggccaacctcatcttgaaattcattgaatttccccttctctgaattgtttacaggttcagatcctccggatttgacattatttgagctgttataaaatacataatcgagtttatcacttctatcttctgtatattcagtacttgatgctttaagctgttctggaccagggttaactggtacctcaaacttatttttagaggcaaaatctttataatttacagactcttcttcaggcgaaacaccataatcatcggaaaattcaggttcatcacttcctttacctcccagattactcagattctgagataactgatcttgactgtggtctacatcaaacctgtttgaactattataggttaaattagttgagtcttccggatatgcagtactgagagattgcaatccatttggcctaagtctagactcgaatgcattagtaaaattagatatggtttctacattatcgtcaaatgatgaagtcactatactcaatctccttgaacttgagttcagtttatctttctcattattttctttatctaaataatcagctggactaaattctggagttcggctacgggctgtattattttgaaagtgctttatattgttaaacagcttgtacatttcatacgttaccttatctagcctaaatgttgagagccttgatttaccggtatttagactcaggtcatcaaattctgatccgtttcccgcttgttcttcataatcatcattatttttattctttaataacgttgattttgtattttctttatgtttaggtgttacaactgtgaactgatgtgacacacctcctccaggctttaccatcaaacccttatccaagtatttcagtgtatttttggtcaaaagtcttgctgttgaccttgaaacgctttcatgaattaatttctccaaatttggaggataatcatcatttgagtctaacttgttaccatgagacccgaatgagttatcgtcaaattgaaatttattatcaaaagtcaagcatctatctgctaaatcttgataattaactttatccttgacttggaatgtattaaaatttttttcggtagattcgacattttgagatgcacattgagccaaaccagagtcagtgttcgacacattactcatatacagatccataaggttagacattaatttttgtaatgtcaaaacgatattttttgagtagtaaaaggcttacaaagataacttagcaccatctagttaatgggctacagacaaagtggtataatatgcattttggtgtgacagtttctattctaaatattatggtttatattaaatataaatccaaaaacagtatttcttccttaatatataagagttttaaattgaaaactcaaagtatttatattttacatatatcgacattaatttttaatgaatattgtaagaatcacatacacatctgtttgtgttattttaatttaaaatagaaaaatcatattttacaaaaataataattttttattcttatttttcgtacaatcaaattactctttgcacaacattcttccatttttgtttgttttataaatttctgttttacttaacgtaaatcgactttaacgccttctcgcaatcctctgttcttttttgatagtgtttttttattttttcaatgattttctccattcccttcagcgtttcctcagttttctacacttaattattcgctcatcatttacctttactaattctgaactcttctctataagaatattaccgctcctgtttctttcctctatttttctgttaaatgtgtatttaatttctagtttctcaagctctcccagtattttctgtattagtattaagtttatggcattcacatatatacattatttacatactctagcatttgtttcaagctctttgttctctctgtcaatctcacttgctattcttattagtattgctttatatttctcttcttcctttcttctcctctcatcatgttcctaaaataagtttgttttaattatgtcaattaattattttgtttatttactacctgacagagcttcttaatgagaacttttgcttcttcacattcctttttaaactcctttttgaaattattaagcatttgaatagccttagcctgtctgtacctctttatactctcctgcatatattatctacaaagtaatctaaccattagaggttcattgtatttatcactatacattgaactgttatcaaatctattgatgtattcatctccagaaatctaaatttattaaatccccaggtgatgtatactcttacttcacttgacattgctatacttgacttatcactactgcgtagacttgatggagtactctcatctaaatcggatgtattattagttgaagttatgtgttgtaattatatagtttatgaattatagtagctactacttacaacactcttgtgattcatataaagacttggcactatcattggagtcgttaactgttggaaagatcttactatccctaaaataaatcttaaacatccactgtgtttactttgatatctctattgactttggaattgtacattttattgcactttcctaaatatacattaataagtatgtactaacatgtatatactaatatttaacacatagtatacatgtacacatagtaataacacacaacaataaaagcatgtatagttcgtatatatataaataataaaacaaaccaacgtaattttactgaatggttcaacccagctacccctgatgtccatgttttctacaaatgattcctgtgtaaacaaatcctggtcaaccatgttctcatggtcaccctctactaattcagggtcttgtggtttgtttattttgttatactcatccttagctctattaagcaactcaactatttcaagatcatctgaattactgctaaacagtatctcttcagtttcatcaggtatttctattatctctagagttttgttctcagctccacatgtcgttggttcgagcctattcttatttttatttaatatttgaatgattttcctaaaattgaattataaacaaaaaccaacgtgattatagcagtaatttctcttgaaatttcagtaaaaatccgtatttttatcaggactttgttgttggcgatgtgcctaaccatattgcctattgcttcactcctaaaaaatgttactgcattatcgaataccatagccaagtcacattgaagttcactgatattatatgaacagccaacgataagtttgatttgtcaccattaaaatcgtttatatgatagtatggaacttcaatcttgttacagctaccatcgttagagtcaatctgtttaaatttattataacactactcacatgtattcttatagatgagtaggaaaaatacaattcctttattttataacttgaaatttgtgtttggtttgtttccagtagttcgattattcctaaaataaaatcacttagcttccgttattaccatcacatgcaaggtatccgttcgtcgtagatataaatttacgcttgatcaaaaggcaatggcattgaaactagaaaatatattatgactaaccactacctcgaagttttttgagtctatagagcgtatttctttaattaaattcttaaatgttctggcgcctttgatatcactaacgtctactctcctaagtcctctccagtacaactcaatcaatgatatcttttcctcataatcaattgaaagctttaatttcccaaatgttgatttaacctcttctatactaaataatcctttttaacttaattcttactatttcgtgaaatacatcctttcaacctctatcctctcaatttttttcaatgagtccaaaaggttaaacatcactgcatatcataagatttcatatttaacaaacgagaaaatatatttctattgagaaatgagtaaccaaattcaaatctatagtcatctgcattctttatattaacgacgtgattattcacaatccactttataaacccctcagtaagtgttaatacattctcgaatttgagtgatggtataacagtttgaatataatctgtaaaatagtccattgtattatgtataaatataactaacacatacaaactatatctcttgtagcgtaaatgagctcctctgaaccgtcaggatgtgtaagattctcgacacaatttacaaataattcaatcgatgttggtgaattagtagacttattggactcatctaagtattatttcaagattttgaatcatttaataagtatgtatgggagaacgaactggatttctttaggaaactctccactttttctagaatattctcggaagaatgaccgaataaatcagtggaataactcatatttaaagatttcaaaaatgtatataatgaatgagtatgggacaatgttaagatatagtagaaaataatattataccgcacagaagaaaaaataagaaattaatatatttaagaatgaattataaatttaaactatataaatttaatgaatgtgtgataatctgataaaatatagaatacaaagataatggtagagtaaaataatgaaaattaaccgaaaagagataaatattaagaggaatttatggattatcaaggatgatttaagttaagagacactttgacccaattaattcatatagtttagaaaacagaaaatagggaccagaaaattatttattaggtacgtgttgtatcgtataattgatataaatgtgctaatctgtttgtgattctaatggggattccacatccaaatatatttacaatttattacttaccttttgtatataacttattattttttatttatatttttttattttttataattaaaggttagcctttatcaattaattcaattgatactttacttttcgtaatccactctaatattattcaggttatcattaaaatggttaatgttccaaagactagaaaaaccctctgcactggaaagtgcaagaaacatcagcttcataaagtctctcaatacaagaagggaaaggacagtgtccatgtccagggtaagagacgttacgatatgaaacaaaagggtttcggaggtcagacaaaaccaattttccgtaaaaaggcaaaaactacaaagaaaattgttctaaaactcgtatgtctattgattaatttattattttaggaatgtactgtgtgtaagaagaagcattttgctaaacttaagaggtgcaagaacttcgagctaggtggtgataagaagaccaagggcgcatcatattaagctaaatcaccttaaaccaaccctttgaagctaatttggttttcaaataaactatttaaataaaaatatatatgtttctatgatacattattataaatcttcatagtgatgactatatgggatagtcattagattagtgcgatatagcatcctcattgtagtatgtctgagaatattagaatttgagttatagagtttgtgtagatttggaataatcttcggatttgctgcaaaagcaacataatagtaccttccataccaaaaaacaccaacccttggtttattaatcctaaatttataaaaacattaaaatgaagtctaacctgtgagtagtatacctaagtcctagatcctgagtgtttaaaacaaggccgtggtacgtatttgctagttttgatatatgataaacaacagttgaaatttcctctcggttagcagcctttgaaaataacaaaaaggattcatacaataccataagaattcaaaattaatcattgaacagtaagatgtgtaaacgtataaattaaaattacggattccaaaaatcacattttataatgaatattgaaatattaaaaaattcaaaaacaaatagaatttaatgataagtaaagttattcttgaaaatagaattccaaccaccattctatagtgccatgatcagaataacattaaatatttaacccttaaacttacttctttaaaacaaatttcatatatctatgttaatatgttttttattatttaatttaaaccttctaaatcacatgtttagtactttaaaattattaaatttcctctcttttgacttcaagtttatagataaacttaattttgtaaaataatgtgttaatatttttgtttttatattatcgcactaaataaatgagcatgataaagacacttcataaaatttcacaaacatgggttacaccttactgttaaaggttttcctggtactaacacatttgattacccttgtgtttggagccctaatcatagagcttattctctatttcagaaaacataatgaaaaacagattcttttatcagccttatcaaccacctcttttttccattcactccaggatgatggcctaatttcatttcggtcacattttttaaactcatggcaaaggttcggaactatagtgttcgcctcaacatgtttctgctcaatcggatttatatccacattatgtacattatattttgtagaaaatccctctgatcaggacttcttgaagtctttttggacctttgatgctcttctatgttcatttatacttttttttgtgattcctctagggttatccaacaaatacgtatcaatgaggaagagccttcaactggtaagttacaccactattaatcatttttagagccagaagatactgagaccagtagggtttatgattatatggatagcaatcggagctattttcggaaacctagtgttacacgatatgtttggttttatggaaaaccggaaagtaggattcaccttcacatgtatctattatatgtgtgggtttggactgtttttcgtggcacttttggtcggcttttcaggaatttatttcccatacctactgtacattataaagagagacgtctcatcagttagacaactggagagactaatctcagactgccttaaggcgaaaagagaccttaagctaaaaatgatagaaaataacatgtatttctcagaagatgactctgaagaagaagacgatttggttaacatagatccagaatcaccatcaagaagtaaagaaaagttagatgccaacagacctgactcatctagggaaggtaaccaacttctaacatcatacctaccagctgaaatgtgtgttaactttgagcctcaagaatttggaaaccggtcaatcccgacatccaaagtggaatcgttctttagtaaactaagagcaatgaaactgagagtatctagcacactttatagaataaagtactctaaatatataggacaaccatcagccggtttacaaatctcactagactcaggttttaacatgtggctaatgatgaaccagcttaaaaacgaccttgactacctaaacatgcttaaaagggaaaagaaagcatcatctaaactttctggcaaaatttttataattctcaaagtcatagtcgcatcgggatgtatgattaactgttttaagatttgtaaacgaggtatattgatgctctttagtgactatagcagtaaactgacgagaattgagaaccagaagataataaccaaagtatattacgtcttcatgagggacgaaattgtttcttcaataataaacgaagttctagaaaacgtacaactacctactgcttttgacttcctcatctctagggctaactccatcttcctcgcatgtgttatgatatcttccgtaggttactttctagatttcgccagagttatgcttaagaccaagtatctccaaaagactaagctactttcagataatacactcggtcttgcatttgcctgtttcatgatactcactttcccatcacagttcttccttgtggtcccattccttcccaagcagcttaaggttaatttacttgattttctgttccaaaatgacatttttgtttggtttgggctcagatataggtttgacattattgtttttgccacaattctagtgacctttgttggtgtgatttgtcttcactactctcgctcctttaacaagctcaactaccaagttgggtgcaatatttaacttgtagtataattaaattaatattctatcttaaatagggatttttgcttgtatatacactttttattttcatataaatggttttgatggataattgtgtgttatattgaactgtatatacagagatgtatatatactagcgtatataggatatatatgtgtaaataattatatagataaatcagtatgatagattactaacaaatttcatgaaacaggtcaagaagcgttttattattatatttgtgtgaattacgctttacagaactaacgattttatcaatgaatgcattcaaatgcttctcgttatggtcactcagattcttgggcctggattgaacgacacaggaaaggacagtcaaaatcctatgaattattgaagggtcctcagttgaatcaagcgtctttaaaacgttttcaaaccttgaaacaaagggcatatactgtgcaatcctaccatctctgacaagtagtgcaagcgccctaaattataataaatatgtgggtcagtaagtaaatattgatatattaaatgcagttgaacctaccctgaggccgctgaaagtgcttttaatgaaataccaggtgaaataaaaagaagcataatgttaatatcatggacattaacgtcataaaccttgtcagctggcgtgttttctatttgagtcttgattttcatgtaaaaatgcccatggacgacatcgtctcctgcacaaagattacaccagccctcaagacctgcagttttcaacatttcgttctctgaaaacagcaggtttgtgaacttgtcccatccattcaaagcgaagactcttttcctaatatcatcatttattgaaagcaggttcgtcagggctagacatgactcgaactggaatagttcattttcatcatctagaagattcattagtggctgaattgagtcatgtgcgtcattaaagctgagattcgcaggatccgttgcaattactaaatgagcaatagactggacgatgagcttgtaacggttcatacttctgaagtttgcagcctgacttccctggttctgttgatatttagtggagtttgccacgtttattaaaatcctcatagctcctaaactctgcaaatgccttctatgattcacatttaaggctaaataatgtagtgattctacaattagagcttttgatgcttcagaagttattttattgaacatcgtacaaagatatttaggaattagtgaatttgaaatagtgaatacaacacttcttgccatattcgctgactcgtcattgccttcaaaataattaccgttcactgtgacctttgcttcttctggcagtttttcttgtagtgttttaagctggtttagctgttccttgtcatattttaataactcaagatcctctgtaaaacaagttctatccttatttcctcttaacaaattacatactgtttgtagaaaatagtgtaacaggtgctctgagttctttaaatgttcaaaaaccattggcagaaatgacaggtctgttttcttaaactcctcgtgtaagcttgcaaatgaggtactgtgtaataatatctcaagatcaaggttatgtttaatgttgtataatacgaattttgacaagagcctaaaaatgttaaacgaacttaaaacttcatctttaacttgatacgagtgtaaactaagtttacaaaacatcaaaactcttgtttgcataaaccaatccaaaccttcgagtttccttttatctaacactgcttccaattttttatcactatttaaatccgaattagtttcactatttacattatttgtgtaatttacaaattctggagagtttaaaagttcaataaatgtctggcaatcctccacatggtctagaatttcttgtctgaattccaccgtgtcacagcagtttattaaaagctcaaacgacaatttcctaattttctgacagctctcattaaaatataaggtaacaacatgctcaaggagcctagttgaaacgagataacttttgaacagggtcttatttgacagaaaaagacagctcaagactatataccagtttacgctaaaagttacagattgtttaccattatctgaaaatttattatgtatgtaaggttcaagtgccatagaaatcatattagaaaaagtgtccattgatacttcgtatggttcaaacttcattgtgaaaactgccatcaaacaagacttaatgtggtgttgatcatcaaatgattcatcatcacacaaggagtagaggttttcaagtaactttagcaacagtgaattaaacttagaactccggtgtttaacttcactctttaatttagattgctttgaaaaatataacagaactgaacttattagaagctctaaatcaacaaactccttctccagaaggattacaaacactccaagtgaatctactcccttaacaagtggacaacacttaacaacatttgagagaactgaggcatatagagagttattatgagggttttgagagttaagcttcatgagtttcactacatatgaagtcaaagaatcttcatcagtgtcaaattgatataaaaactgttctctaagctcaaaaaccttttcctcatcacatttatacaaaatatggtacaggcaggaccagactgaacaaaggtgttcgtcaacattgtcacagctaagtctatttttacaaaaattaactagagatttcactgattctgacaaaaacaacctcctacagggtactagttgaagtctttgaatgttcaagttaatgttattacctgagcagatgtcatcaactaggtgaatcgggtcatttacgttattgcgggagagatcagtttttatcaacgattgcttgatttgatctagaagatccaaatgcggctgacgtgtgttcttgtaatgttttgagttactgttaactattttttggcaattttgaatgtataccaaggcagtgttatagtcattgtgtgtaatgtgatagttagccacatgatagttagatttatagttttgatcatcaaagatcagggaaattttgaaaaatcttacagaatcctgttttttctccatgtagttatgacatattcccaagttacataagatttttgagaggaattttctgatgtcaggaccctggattttatttttttgcttttcaactgcattctctagttcttctacattgatttcgtttgttttcaacgaaaaacagtcaattaatattttatagtacacttctgaggcctttttatagtcagattccgagaatagcttattcccttcccactttatactttcgagccgatcgaggtcaggactcgagatcaggtcggaatccattagaaaagcttatttatgaacacacattacatatacgagtagaatgcaagtgataaaatgtaacccaatagatgtaaaaaaatttaaatattccatatattaatcttgttcattttagatagaaaaatgacagattaatttttaaaaatttttatgaaatgaattttatttttattcttcatcaccaatcacgagtggattttgtgattcaagggcctgtttgagatcttccacaatttgctcctgccgtagctcagcgttttcctcaacggcttccggaattggaataaactgcccgcttcttacagactcagacggtttgagcgtcttcatgtcgtagaccaggtacttcttgagcctgattgcgagctgaatgatgtgacatatggttcccagactcatcccttccaggaatggaaggttatgttcttgcatggtcctgctcataccatagatgcttcccgggaagtattcatttccatgttcgtccttgtagttcttgatgaactggaagaactggtcccacatctccgcagggtaaatgtctctgaggtcgtttctgtccacccacttcacgaaccatgagggttcctccacgaggtaaataaacgtctcgtttagagatccattggagacaacgttgaagatgtcgggtttcctcttgcataggtccattatgtgctctgggggaatctcctcagtgttgaactctatgaaccttcccctcacattgaagtagatgggcatgatttggtccttatagagggacactagcgtctgcttcaagtagttaactgccttctcaaactcagcgtccttgagagaggggagtgggaaaaggtccgccttgttattcctcttcttcctagtaggcctgtttttgaaatactttagaggtttacagaacttgttgtacccgaatgggtggtagtcatacaggttcattgggattctacttgggtcaacgttgaagttattcgtaatgaagtcagatgcgccgagaaaatcacctgacatataatcgctattgtaacccatactcctgaaccctcttcccaagttcgggtttccaaacacattggcatttgccaacatatgtgagtttaatagttggttatttaagattcgcctattaagcaactggttattaataagttggttcctgagcagctgggcattcaagttatttcccaagctgttaacgtttcccaggttaattccgctattcaaaagctgtgagttcagaaggttgttattaagcattccatgttctgacataaggttatatccagaatttccaactagcgagttgttaagatttccatggccttggcacactcctgatggaatgcttgtcctgttcgtagacttttcagatgcacgtgagctactcaaccttgtttcataaccttcttccagaattttcgagagcatagagtttatatttggtgttttagcaccgatgttaagactgttttgcacattttggctattatcaactgggttgtttgaagacggcttcgactcccattccgacttcaactgttgaaagaattcagactgacttgaggttagtcctgtgttggacgactgtttatttagggacttggataagtacccgccaccgaaatctgaccagctaatacctgtgagactcctggtggttgactgattctgaccttccccaacactgtggctgcgacttcctagaggaacttccagagtatttttactgttgaatgattcaattaatgaatggtaatcaaaatcattctcctgcttaaatttagtattcagagatgtactcacctttgaatcttgaccctcaacactgggggtccatgaatttacagaaccagattgattagtaaaataattttggtaaaaagaatcattaacatccatcgaatagatcttatattacagattccaaagggaaagtgagattaaaaattattttggcttacattagagaatggacacacatacagggcaaactcacgagtttgctgtagaacaattaaacaacttaaaaattataaagactacatcaactatttttgaattatttctacattagggtttagttaacatccatcgattttttgatgttacaacatttaaatctaaagatcaaaacgaaagtgtgaaggtatacatttattttgtgattgtacactttttgtaagacaatcaattgaaaacaacaactactgaaacttttagatgttttagggtacttttgtatcacagatggttcactgcattaaaaaattcgggatgctttcgcatacatattgtcgaggaattggctaaaaggaaatattggacggatttatttcaccaaattaaaagatattagagaacacaacaagttatctaatatttttaatgtttagctaattgaatccgctataacataccattaattgcactctgcaaccagttgcttggaatacgatggggtggtgtgttgaaaaaacatcgttgttttctcttttcccttaattctagacctcacccttgcccctaaaactttcattaacaccaattacacaaactaagaatgtttaaattaaaatctatttaaaatttcccttgttttacagagttttttcccaaactattactctacaattttgttcccgtttcccttattttctcacttaatccacctgaaactgttagattcccaatttttatcattttattcacattcttcctcctctgtcgacctcatgtgactaccatctctcgttatattttattcttgattcttgtcttatcatatttatatctcatgtatctacacattttctattttaattttaaaacttaaatagaattttatttattttatatttgtattttatattacctctatttacatccacttaatatgaattcccatacatctttgttgcgcctatctcagctctttctacctctaacaactataaatatcactctatttattatattttgataaaaaattattaaaatttaattttattttgttttttcacagaattttcaaaatgttacgtctcttaaaaatattcctaaaaaccaagctctaaactcaataagatggatacacatttaaaaaataattattacataatatagaatcactttaaattacacaaataatcaaaggaataggcgtttgaagcgaggagtcccaggatgttcgccctagattccctgatttgcctgagtagcaacaacatcatagtccttaaatcggaaagcgactctgtggatgtttgcgagcctgaataattagacagagtattctggtgaattgagaaaatcgtactgagccacacaaggtgaagtcctaaatgcgtagttccgttagtggagtaggtgttaagcacattcctgataaagttaagcagtaccaaaacaagcgtggagtcaagtgaagaaaccacagaggctattttacctgttggaacagcttcataggcctttagcattattttaaagttattcattgcaagtgccaatatgaaggcgcctacaaagtcattcttctcaaggtgtgataggattgacgatttggttacactttttgttataatttgaggctggaagttgtgaaccgacttaagcatttggtttgtgtactcaacattccttgtaacgtccagagagtatataaatacaccttgagaagttgaaactgcaaactgtcttccatctggtgaatagttaacttcccaaacattaaatcgatcctgggtcactttaaactctcccacttctactcctggtagagacttatgggcctggattctactcaacttccttgaatcctcaaagatctcctcgtctgagagatcaagctcgtgtactgaaaacccatactcagtcatatatttagaactcagaaacctctttacacctgatagcgagtcgttccttgtcaaggtgaacacatgcagaagaagatagttttctgtgctataaactgctacatgaggcgagtttttagctgtacagactatcattgttccacatgaagaatatgaaagtgagttgaaatagttatttctgttaatactatgtggatccttctttatgtttattgctgaaaatgcctctgtgtagtgtcttccaggctgtatatcccttaatccgtcaattgacccaatttgctaaattaaaatattggaaattaacaatttacctctacgttatctaaatcccagaaaagaatttgtccgcttagtactgatgctgccaatattgaatttccccttggatcaaacgctgttgatattacacttgaagagttaagtactgactcaaccgatcctgccttatcttttctgccaaaaacattccaaatctaaacacatttatatgaatcatactaattatgaaacataagactggttaaaaagttaccttgattgtgttatcccatgacgatgatactaggaatccgttgtatgaaggatgcggatggaatgaaactgatgttacgggagcagtgtgccctacaagctcatctaaaaccttcccagtttgtatttgccatatgaacactgagtttgtatcacccttagttcctgcggctactattgttcctgatccgtcaactgcaacacttgtatattgagttctggttgcagtcaggactctaaagtttttgaacctaaacaggtcaaaacatctaacggttccatccaaggaagctgatatcagtgcatttccctactcaattattaaataattaacgatttgtttgattattacctgaggtgtgaatgcgatagcttctactgaagcgctgtgttcagtcagtgttacatagcatagacctgtattgttgtcccagagtttaacttttccatcaaaacccccagttgctactaggaatcttgttcccattcccaaatttttactagaaagtgctctatcgaaatcctgcttattttctgccagactgcccaatctgtccagattggaaccatatgaaaatgaacaacatctcactcctcccaggtgagcctgttgtttcattacaaaagtctcacttttccattcccacactactatggtaccggtttgtgaacaagctagtgcaatccactggccgtcacttgttatgtcaactgagtcaatgactggaatttgttctcctattttgagtgtgtaaatggttgtcagttcaggaatattatataggccaaatgttccacctgtgaagccaacaacaaataatccgatattggagttaaaagtaaccactgacacctataatgttgttattaattaaattggttactgtcgaatttgcgggctggttgcaatatcctttagtttctctaatccacgattgttgattttctaaaactaataacaatcaaatcatatacctgagtgtttggaatcatttaacttgtttgatttctttagaaagttatttttactccttgatcctatcagttttgctgcattatcccctaagatttatttattctatctttaaattaccgtttgttaaatctgttcgcttccaaattattataacgccttctttggatacactacaaattctgttcatatcatctgtgaaaaaagctgccttaactgatcttctgtgatctacaaatgccactggcacaaaggtgtcatcaggctctacacaccaaagcctaactgtcaaatcttttgaacttgtacaaatgtacttagaatcttttgaccagtctaaactgttaatattatccatatgccctgtaatttccaggtgcagtgtcatcctccaacttaacttctcatccggagataaccaaacctgagatttattaacacaaattaacttacaagtagtttcttctgaattgaaacggcaaagtatttcccatatgggctaaaacttgcgtggattagtcttttcttttgtgtgctaagaattattatataagagaaaactaactttaaagagttgtatcccttactttcagcagtagaaatgttagttgaagatttaaattgtagtctatggactattttatctctaattaggtttaatatatatccgaatcctaaaaagatttatcaaaatgacgaaaataccattatcatcaacaagaattgacagtggttttgaaggatgatttgctattagtacaatgttagttctagtttcagaactgagtgttgaacttttatttgtttgtaaatcatatatatttatgcgatttcctactggagccaaaacacaggacgctgaaaatcatttatacagtcatttacataatatataatgatatatctaaccatcaggattaaaacagatccttcctcctgaatactgtgagccgcagatgttagctaaatggtacaacgccattataaacaatattttacagattaatcattttaatcaaaatacaattaatttacaaattataaattacaaaaataataaataaaaataattaatataatttaattatgtaaattataagattcaactatggaaggctttttagtatgttatattgctttcaggtttgtattcaaataattgtttatcgcataagatatgttaatacacacagaaaagtgtaattaaaattcattaacaaaaaaccatatttaattaaattccaatttcattgttaaaaatgtggtaatagtaaaattgagagatcgtgtcgagccatcttagcatagtggtagtgcatctgacttgtaatcagaaggtcgggggttcgatccccccaggtggcttttaaaaatgataacgaagattttgcttatttagttacaaatgggataaaaatattaatttgtctaatttgtggaattctgccaataatgtgttgagttttatcggatacacatattatatccgtttgaccgtctgttgtcgtttatatttataattattttcttaaaaaatttttatacaaactctatttcatatattaaatctttgaacaatgtttgacccagatgtgtaatacatacttcattattgtactatcaatacatttacatcttattcattacacatcatcattctctttaaacttcttgagtaacaaatcatcaagaaataatagttatgttgaagatgtagttaaactaccttcatctataaaatataacattcaaaatgttgattcaattccaacgaatgaggataatctgtttgcaaggatacttcagaaaaaacaagatgacatagatactgataaacaaattcaggaaattaacgagtctataaaggatggatcaataataggtataaaataaattttaatttattttcagacccaaaaaccaaggataaattattccaggaagaaagggacgaggatgaacaaaagctagagaaaaaagtattagaaaataaataaatatttattattgttctaataaatatatttaggaggtttctcttgacagttctggcgaaaattataaggaaggtgtcgaatcgacttctgaggagcttggtgatatctctaataagctccagtcggacggtgtagcatcaaagggtaaaattttaaaataaaataatttaaatattttagattccgatgatattcaattaagagataacttattgaacaaagtgatcaagtcacaacagaaaagcgtttttggggcttaatatattttttaaatgcacattttattattttccctttaaattaaaagttaatttatttacttgttttatgaataatataaaaatcttattcaatcaaaatcatattttcttatcgttgttttttctacaaagtttcattagaacatactcaaatacacaactgttaacccactcttcagtaaaaaataaaacatgaatgaagttaatgggattaatgaaactccagatttagaatctaaaaacgtatgtaaatatcaatgaagtcatcatttaatttaggattctaggagggtttctcagaggagaaaaacaaagtcaacgaggtactctggagaagaatataactgtgatagcttcgaatctacaaataacttagccaattctacacacatcgaggttgaagacgaaatcaaaacctgggatttcttctacacttacgacagggcctcagactatccattctctggattcagcactgcagaaacagtcagaataataattcaggctctaaccaaattaatgccgaagaggaagtcttgcctaatctcagataccgattctgttctcgaggttggtcacggtaaatttccactcatttgggacttgagggatcaatttggagactttttatacttcggaatcgagttcagtggtattgcttttgaacaggctgttacgcataagttcaataactcatgttctccctctgaggctttcggcaaaaacgtcgaatttctctccatgaactcactacactatttcgattccgacggaaaaagtactcttaacctgattttcccaactaatggtgagcatacaagacttaaagcaggagttgttaacatctgtttggggaaaagcttcttggattatcttagctgcaggtagtattatactatctactaaagaactcaaactaaattcaggttaacactaagtgtcagtgtctcgaactggaatttagagcctaggattcctcaaggagttgttgacatgttcgactcagtagctcaggctcttagggattataaattgggtgacacatatccttctctattcgtcctcgttgagccatagtatgtcatatacaaaacatctgtttttagtgacattgtgaagttcaaggaccacattggaatagtcacaaaagtaatatacacatcaacgtttgtgaaacaaagcgaatcacggtacttgaggttagtatatgcacaaagggacaagaaaacaaaagcggtttgttatgcactggcgaaggttgattacacttaccaaaattatgacgaacttcgtgaggacatgtacaaaatcaccagtaacatttactcaaagagtcaatcaactgacgaggactggctccttcctcacactgttcctccgaaatggaaaagcaatgacactaaggattttgataacctaacgctactttaataatttatgtttcacctacacattccccaccgttacaagggtgtgtataatcttttggttcacactgttcacgttaaattatgttttaataatgttcataatttattttatttttagaatttataaatttaaaaatcgcaatgttaacgtaacgttattttccgaaggattctataatggttgagcttccttctgtaataataaatttattatttttgacaaaaatgtcactggtaaaatctatcacgtgtaattataaattgtgttatctttcatacaatatgaaagaattgaaacccacacccaggtgtaagttcgtattatacaacgacttgctttatcatcctgcaatggatctcccagtttattcagaagaatatccaaaataccctctgtgagttaaaacattcaattcataatcgtttgcacagatatccatactatgatgctcctaaaaacttattttttgacacatcaaagttaaataaattcaacgaaaatccacatgatgacatacaagaatcccatatacagacagaatatatggaaaacgccagacttaaacggtatttatacaatttaattgttatttttagaaaaggaatgtctgtagagcatgttgacaaaagtccactttcaggtatactttcactgtcaacggaattttagagttaaatcgcactattggacgtgattttaaagattatgtttactcagaacgaaaaccacacaaggaaaagattaaagtattatcagtacacatcaatcaaatttaggttgatttatcggagtacgataaaataaacccaggacttggtccctggccaagttatgaagaattaaagaaaaacaacatggatgttgacacatcaatgtctctggaacttgaccctgatgatgatttccagaaaacattaatggacaatcctcccaaaagaactgaaattaaggtaaaatttactattttcataccattttagaccatagctgaagccagggatgctcaacagaggtggctagaaagaagtcaaaatgaaggtgatgttaacaaatgacaatatttaatattaatgtagaatggccattgacatatgatgagtttgctgaactacccctggacatgagagaagcttactataaaaacagatataaagtcaggtactcaattcactaaattatgattcattagtgacattgatgagcaatttctgatggttttaaattatagaagagctcttgaaaataagaaggttagttaactttattataaattgtttagagcaaattattgaatcctatggagtttgactttattgaatctgactacaaatacactcctaaatacacaccggttctagaggacctgaagaatgttagtttcttgaattaaaaaaatttttagtgggatgatcctctcgaatgtccgtggagacttagagccaacgaggccataaggtatttatattttttaatagtgtgttagagactgtgtatcgtacggatggccagctaaggatttgagatttcactcgggaattgatgtttatgatattacctggctgccaggagttgtaaaaatactagttgagagaaccaggaacgagtgtggtaccattaaaccaaaggagctcaagcttatgttaatgaaattaggtttataatctatagttaatacgaattttagagaaaagactattacaattggatgaagaggagtatactgaagtgatgaataaccacatgatagtactatgttctaagcctgaacatggtaaagtactacactcgagaagagaatggaatgaaaatattggaaataaagttacaataaagatgaacgatgaagaaaaaactgaatacactggagaactggtgggatctgatagtgttttcggaatacaaattaaagttggcgataacaaaataacattaccgctcccatttgtttatgaggtttcaacagttaataacaatgtattttcaggttgttttaaagtaagaaattatatttcgtttttaaatttaaagtgttttttaattttagaatgttgttttacacataaatcaatatccggtagatataataaaatgatcaaatcttgtataaataatctttgatttttaacataattttaagttaaattttattttaaaaagtttttaaacactaatgatcagttttttaattatttttaatggcagacgatgtgattgatgtggattccagtgaatctgactgttccttcgaggaatttaacatttacgaatggtttatgtactataataacctttgtttcgacgggtctcttgacagagtccagttatcctggagtaagaggatgactagatgtgcaggaatttgtcaatacaaggtataaatattattttatatatgtttagcccataggattttgccatattaggcttagcgaatctctacttagatacagatcagctacagaatgcaaggtatgtattattttcttattttatctagtttccatttttaaaattttagaataatttacatttattaggagactttattacatgagatgatccacgcgtatatctttttgaacaaattagactttctatttggacacggacctgtatattccagttatttttattattttcagaaatttatttggcatatgaagagagttaatgagattacgggtctcaacgtaactgtgtcccaccaatttcacgatgaagttaactactaccgtaaacacatttggagatgtgacgtattttacatattcaaattaaattttattagggtatttgcagattcaaaccgccttattttggatatgttaaacgttccactaataggaatccaggtccaaatgacttttggtgtatgagttatcaaatacatagttatttagggaaaaaacacgaaactgaatgcggtggcaaatttattaaaatttctaatgatttgaatgtgtcaactaaaaaacgagtcaacagaggtaattctaaacaggataattttgattagataaaaaaattcacacaaacactattgagcaatattttaataaaagaaaacgaagtttggcggatttaggctcagtaagctctccaattattattgacgaagattaataatttaattaatgaagtaaaattttaaaattaataaccctgtatacatatttgaatagattaatttatttccagaccttacaatcagctattggtactccatcaatgtcatcacaggcgcagaagtagtcctcaaccagtttcttgtcttcaggctttgttacgtcaagttttctgaatgtttggaactcatatgaagggtgttctgtcactagtgctggaagctctttccccctaactagccatactcctttgatgtcaaagtttccagtagagcccatgacattaagcacgccaaatgagtagtgtctgaactcgttctcaaacctttgcaaaaatccactcaacatgtttgacgtgaagacttcagatttgcactcatcttccagcttattgtaaaccatgtagtaaaggctccatccctcagggtcgaatttctcccaaagccacggcatcacctccttgtacaagtcgcccttgcagttgctgtatgtctttttccactggtcaagactgaatgatgtcggcggaagtaagtccatggggttcttaggcttcttagctggttcagctggtttctcttggacattgttcattttaggcttgccgtctagggttccgttagacttgtagttctcgaccattttcaagaacttttggtaagcttcactggccttaacagttctcaagaaccttgctaggtgaagtagttccttttccaggtattcagggtcaagtctcttttgatgaaccaggtggtccagtgaaactgcacatactaaatctgccgggctgagcttttctgctacaaggaacgtctttgttgcaaggtaattgttaagtgagttcacaacttttgaaaggtctgaatttgaccccttggtgaccactgatgacttgtcaagtttagtttcgaagtcaagtcttgaatagaagaactctacccagctgctcgtgtcactcctttcaaaggctgatttttcatctgttcccttggaaacctggtccagtaagtgcctaaccacagttacgtgaccacagaatgttcctaaatccttatctaacaccagagttactgcgtgtttgagttctgagaatgcgtttttctttgcctgggatgcacaacatgtccccttagccacttcgaaatcaaagtttaagttcgcccatgccgccgtgactagaacgctctttgttccgtaatcgtcaacatcaactccaacaactttctaaagcaaaatgaaatgaaaaacgttaccattttctagatgtttaaaaaatatttaacagaagtcaagactaaatgatataataatattttatctctaaatcgaccacaataaaatagaactgaattcgtaatgaatttaagttatagaatcttcctgcctcacaaatgaaatactaaattaataaatgttaaaacttataaatcttcaaattatgaaataacgaagacctcttgataataaattatataattatgaataataaaatggtacggtttaaattaataaattaatttatatattcgttgattctatacacatcatgtacttcaagtatctacaccatatatccatcctgtgtgttgaaataagatcaaaattaaatagaagatagataaattgatgtaaaaatgctatgttaatttataaaatatcataataattattatcattgaaaaataaaattaatcatccattcattgacacattatttatattattgtaacacaggtttatttaaatgttacaattattatacaatggtatttagttaataaataaaaccagatgattatattatatacctttgttgtatgatatctttagcccatggggctactcctaaatcaaacaactcttatatatattatctttatcgattatttaacagacttattatagttgttggaattttttgtagatcgttgtatgataatatcatcttacattttggttttattatatccacaagaaagattctacactacttactataataatcatttattaaattgaaaactgcaattatttgtttatacaatattattaaatttatattttttctaattccgacgacaaaattttaatttgttttataagtaaaatttgcaatgactgctgttccaaagactcttaaacccaaggtcaaattaaatagaagaaagaccgttgtaactagactcggtaagacgaaagttgttggtcggaaatatgccagtgttcccaaagtacgtgaaagtcttaagccaggcgctgttttaattttgctgactggaagctacaaaggcaaacgcgttgtgttgcttaaggtcttgaaaagcggacttctattagtcactggacccttctcatttaatggcgttcctcttaggagagtaaattctagatatgtcattgcgacctcaactaacgtgtatgagtttcccgagtatgatggttcctcactgaagtcctcagttgaaagagcagtttcagaccttactgacgaaagtttcggaaagacaaaggagactaagcttgccgagttcaaggaccgcaagaagaaaaacaagaacaaggactccatgttcgttgacgagccatctgtttcagagaagtccccggaacttatggccaagcttaaggctctccagagtaaggttgacgatgtcctagttccttctcttaagaagtcacagcacttgactaaatacctcaagtcaagatttacactaaggaacaacatgtatccacacctactcaagttttaatttattttgagtacacatgtatatatacaagaatatcagtatgtacatggaagtttgtgtaatatgtatatacggtttagtatatgtaagcatattgtggtatagtacatttaatagtataacatgaaagattgtagattagttagatttaaatgagtgttgcgtttgagtttcagttatcaagtcgccagttgacttgatcttaatgttggaaaccttgtttttctgttcacgaggattaatccttagtacacccatctccagttttccctctatggctttcaatatctcatcgtagcttagagtttcatactccactaaagcttctgaaagcctatggagttggttaacattgttctttatgattgtaacagctctagcatatgattcctacgaataattgaaattacaattgaatactgaaaaatgtaaataaaaagatgtaaatgataaaacaatagtaatagcataaaatacatcgagaattgattggactgttgagtctattttcttccttaagtcttcacttaattctttatagctctgggtgtcgacaaacatgggacccacaacgtccttgagtccaactccaaactgcataacctaagaaattaaaattaaaaatataaaaataccaaagtctttgcaatttcagtagcccgctttaagtcactctgacaaccagttgtgacattttctttcccgtaaataacctcctcggctgccattccacccattaggacatcaatttcagccttgagttcgttcattctagtatctttcttttcttccggtattttccacgtgactcctagagtgttacctcttggaagaatagtcgctttatggactttagtagcggagtttgtgtggagactcactagagtgtggcctccctcatggtatgccgttgacttcctttcccgctcattaatcagaggtttaccctttaaacccacgacaactctatcaaaggcctcctcaagtgcagaggctgttattgcggacaaaccttggacagagcacttgagagcagctgtgtttagtatgttgaaaaggtcagctccggtcatgccaactgtgcgtttggccatggtagtaagatcaatgtcactagataaaatcatcttactggcatagtgtttcagtatttcaagtcttcccttcatgtcaggtagtggtatgtatactgttttatctaatcttcctggtcttacaagagctgggtcaaggctttctgggaagttagttgcacagagaactactattccctcgtgtttagcaaacccatccaactcaaccaaaagttggtttagggtcatcctaacactgttgtggtccatggatgatcttctacttcccacagcgtctagttcatctatgaacacaatgcaaggagaaattgattttgcagttttaaacaaatccctgattctccttgcaccaactcctacaaacatctcttcaaattcagagcctgaggcgtgaatgaaagggactccagcttcacttgcaagtgctcttgcaatgagggtttttcctgtgcctggactacctgccaacagtatccctttaggcagtttagctccaagtttggcgaatttcgacggttcttttaagtattctatcatctcctccagctcttctcgaacctcatcacagccctaataattataaacattatctaaaatacctttacatcgtcgaatgttgtgtcggactcgtcaggcgttatcaccttaaatgagtgtttcatacttctatgtaaattctggttaaacatgagtacaaagcttccgaagaacaggaccaaggttgaaaaggacacaaatttcctcaagaatttccatctatacatcatttataatggtggaaacttacaggttattccctgaagagggattaactactacatggatcgggttcttctcatcaactttcaggtatatctcattgcgatctaacaagtttaaaattttatcctaaaataaagcataaacttgttaatttggttaaacttacgttaattttattatcagtgaagtttgtgtttggtggttcaactaaaggcctaagggatctactgtaaagtgtatttgataaaaccagagcccttaaatactcctttaaaactccttcatccttgggaaatgtgttgttatggcaggattcaactgctcttattacgatccttggatcataattgtttgcttctctcaaattcaattcgtttaactttcctcgtaggatatcctcatctattgatctttttaaactatatattctagttgatgagtgagttattgagcgttttggcaggtaaaatgagtaactgcttcctctgattcttcccttatgggataagttattaatcagagccacagtatactttcttatcatttaattattaaagtaaaatttaaattaaatataaattaatataaatttataatataaaaatataatctagtaaattttcattacaatatatattgtgagtaacacaacatgtaataatatacagaaaattaatttacaatttataaatctagtcaatttcagtttgtattttagcaaggtttgtatacgttatatcagtttcgttatcttggctatatcggaacaacggtaaatcaatgtactcccctaattatttttgttacaacatttacacataccgttgtggaacactgatctctttgtatcaaatgacacgaagcttctaggctcacttgatatttgctccactaatttttgtctcgcgtaatatgcatttttgaagttattaaaccttagaactatccactgagggtccaaactaaaaaattttgggtctgatttttctcactctgttaatgaatcttttttgatatcttccatcattgatgggtctatatggttatctttaatttgtttattttcctctggtgtgtttgactctttgatattcttttcagctgtaactaccattgaactactatttttcttcttcctccttgccaacggtgttattttacacgtgctaaactctacaaactattaaaaggatataaaataccatgggtttgattatcataatctgaatcatcatatatatccaccaatgtgtttgctataaactgcagtgctcctaaacacattgaacctctggtcggttacctgacatcttcttaaatgggggataaatagctgttattaagctatgcttgtattccgcaaattctggatatatcatcctcccaaagaacaggattccaaacactctaatgttaggagaacaaagtgagtttctatcctcactattttcaaactctaaaaactctgtcaaaataagaacataccaactatagcgtataatggtgaatacttatcctttggatcataactgtgatttttactcatattgtttgggtttgcaagtcttgccagtggcggcactctatcatcaattatctctatattcttcaaacgaccaaacttcgataacacctcagttaacttttctttcaagacgtcaaactcaataaatggtaagttatatatgaatgcatatctcgactcttccattttcttattatttatactctggtcattccactctatgcttgcctcatacacggctttctaaaccataattatatcatttactcataccgttatgttctgatccctaaggaactttattttgttaatcttcaggtatctcatcagcaaatttcttttcgcagttttatttttcgacgccttctcttccaacaccttttcgcgaatctcctttgctctctgcacatttgaaaacttctctagtgtgtcaattccatacgatgatctcagagtttcaaatgaattatcctaaaaattttacaatagataaacttacatagtttagtatatatcgaactcttaacattgagtacatatcatgcgatgttaacaaatcaatacaccttattaaccatctactgaccatctcatggtctgacgttggcttatgcttggatatacattttaagaactttgataaatactgtttcctatgaacttcagttttccttttaggcgatgtttgataaggtgccagaacctggttattgatcttaattattgtatcaaagtcaaagttgttatatgagtataataggaaattcttgtgagagcttctacacaactgcttttgatttaagtttaaagtcgcggaatcatgagctaatattatggaatcctcgacattatgagagtgttctacatgattagtatttaaagtaggagttgagtgttgtaaattttgatttttataaatattgtttgggtatgtattaagtgttgaataaaaacagttgaatttgcgatataaaggaaaaaatttaaaaatgtgggaaacattagaatatcctcttgatatatttgagataagataagattgtgtatgaattaaatgtgaaataatcatatttgtgtaatctgatataatatttcattttattataaaatcaaataataaataataaaaatacaaaacaaaaatataatactttaataatagaaaacaacgataattaaaaaatatattatttaaattattattatataatatacactatactcaacaaattattagttaaaacattccttttatattatatatttataatttaaaattttatattatttaaactaattaattcttttaataaaaaatttttaagattttaaaaaattactataattttcaaatttaatcacattcaaagataaatgtaacataaattaataacctaaatgcccagaaaaactaaaaagaaatcattagataaatctaatgatacgaaacatccaaattctaataaattaaccaatggaactgatgatatcgcagacgatggtacactttttaaactaacattgttaatttagattatgattctagtgacgaatctgaagatttctcagctgaactacttacggataaagttgaagataacatatacaagaccttgatgaaaattaggcatgaagatcctgaaatctacaattacgaccacaaattcttcagtgattctgactttgaagatgacgaagatgagaagacaaataaacaagtaattatacttatatataaatttattataggagaaacccttcacatactctgatttcgttcgtgaaacacttttgaaagagggctcagaagcatttgagaattaccttaacgctacttccgacggtatttatttactaacatgacatttactaggaatttcatacactgaagaacaaaataacctcaaaaaggcctttcttgaggcctccgaggctctagacgattccgatttattaactaaaagcgatgcgattgatgttgttcccaatttcattgcatctcgacccattcgtgtaaattattaagtacataataaacatttagatcaagccttcgagagaaactgaactaatttctagttattggggtatgtaaatttaaattaataaaaacatttagcttcacaagaaaaacttgacgagaatgaggagtttttaaaggactacataattaaccagaggtggagagaagataaacttgagaattttaaagtcgaccacagattaaaaaaactgtatgtttcaaaactaatctaattattttagtgatgagtatgatgaagaacacttggaaaaggctgacgagtttgaacataaatacaactacaggtatttttaacacattattattatgcactctataatatattatatattcaacacattttaatatactaattgataaatatagatacgaggaagaagacggggcaaaaatcattggatatcctagaaacatagaagattcagctaggaaaaaggatgaaagaagaaggcttaaaagacttgaaaagaagaaaaggaagatggaagagaaggttagaagagacgagaacataaaaagactcaagaatctgagaagatcaaagtttgaaatggttaaggaaatagaatcaacagccggagtatcgtcaattaaacaggatgctattgattttgacgctccatatgatccagaacagcatgaacgagatatgaagaagatcataggtcttgggtatgataaacaagatgacgacaatttcgacgcggatttgaaccctgaaatgtggtggatgtgtgatgaatgtaagaaagggatattttcaggtcaaacacactatgattgcaaagaatgtgacgactttacgttatgtgagaaatgcctaacagttacaggtcacgagcataaagactttgacgggaaggaagtcccaataatttgtgctccgcctgaggaaatagagaattacgacctcgactatgaagactacattggcgacatgccagtcaagtacaagtatcgcaacgttgagccttatccatgcggcgacataaagacacttttcgaaaagactgatcaggagttgaacgaaacaatgccactaaagtatttgatcgggtatgatttgccagatccgaaggatataaagatcaaaaaacggcgtaaaaataagcgccaacaggatcaaacacaaaagaagagattccacaagtcgaaaactccacataatgttaatcatgataagcctagagccttaggacttaacaagaagaaatccaaaagtaaaaaggtgtaaaatataatttattaaataaaattactctgtatttgttatcttggtgattataattatcctgagtagggatttccagtggtacggaatttagcatttaacaaatttctcctgcattgagcgagtgcttttttaagctgaatacactcttgtccaacatcctccggtctcaagttgttaagacagtcttcaaatgttctgttaagttccttgaaacaccgtgaagacttgtagcactcaaccatatctgtatggagcttctcacaagaatttgacgcatatctatgcggcttgtccgggcttggtctcagaaacatctgcgttcacctcttctccattaaaaaatatctaaaaataaataaattagtttttttattgatttttacctgaggcttgccagactgtatgttcttaatgtcaatgtttgttgtactattttcgtgttcttctattccaacgtcgtctgaatcccctttgagcaggttttccagtcgtttctgtttattagaaaattgaggtaatttcccctcttttttaccaaatttagaagtgttatgcgaaggacttaaggctgtgtgagcaacataacaaaacttagatttaaggagagaaaccataaaagcgctatgaaaatgtcgaaaataaaaaacttactccctacttttagtgtctgatccacaaaaaattatcggagatttattatagaacagtcgaaagcctaaaaatattatataataatattaattttgaaacaaacattctctagacgaagcgatggtctcaaatggagttacaattgtgttgaatgaaaaccttgcgaacagtttaccctttttaggagggttagtgtgttccttctttgaattgcgatctaaataattatcaatgtatgtatgtgtatataaatgaggaacctttgaaatataaacgaagttctgatggagtaatggagtatattaattcttgagtttttaaaatgtcatgagggtcaagggcgacttcaatatagtcatcctaataataattatatactagtaaaaaatacctttagaacattacatccaccagaattatgattaaatgaaatgtcgttcttttcaccggtatctagaatttgtttatttctaatttcatcgtcaatattatggaaattattcgactgaactgaaaaaataaaatgaaaattatgtttaccaatgtcggtatcaagttgttgttgtgtaactggaaggtcagttgtggatttaacgtttgtatctgtacacatattaatcaatgtatttaaaataaaacaaacctagtggtggatttaaaatattagatgtgagagaatatgagggatatattatagttaagactaatttaatgattatataggattttaaaatagtatgagatttcatttacaaaatttctataatacacgaagaatactaaaagaaccatttatatattttatttatatagtaaaaataagaataatttatttaattattgataatattagttacacatggggagtgtgtactaagatattaattattattttatttacacatttatttaaaattacactatataaataattttataaatttcatactatttcaatatgataatatatattaataatattgttataaacttgttttccaaacaacatcactagtttcttcaaataaatttgtttttatctcaaatgtaaaatataaaatacactcactacaaaaaatgaaatatattacaactgtattctatgggtttttattatttctaattatcgcaattgatgttaaggtaattctatatatttaatttattattatccaggcaaaaccatacgattcaattttaagatttatacaaagtcattctgaagaagatgaaaatgatgaagaacgcgataatgaccaggataatgaaggtgaagagaatgaagaaggggaagaacgtgaagaccacgaagaacctgttaaagaagaggaagatgaatctcatgaaaacgaaaatgatgagaaaccatctactatgattgaggaggataaaaataaactggaagtagctgataaacctctggtggaggaacctaaaaagaatccttcatgggttgacgaagaggatttaatttctgaattcgaggtatttgtaaaatactcatcaatttctatagtcttcacaatctgaacgggctaaagacttaacaattaaagcacttcagaaacggagggctgcaaattcacttagagtttactgtgaaggaatagaacaagagctcgaaaaggctaagaaaaggaccaacggaatgaaaaggcttgataaatacaagctaacatcacagttagagtccaaccttgcacgagcttacttattatataaacaggcagatttgcttgatgaaaaagctcaagaagctaacaaatccctggagatattacattcaaatgataaagataaagtcatattgagaggtataataatataattttaactatgttcagattgcaatatgttaaaaatcggtccattatcgtattcaaataggggagataatgtaattcacaaaacaaaagaacctttgatggctaaattaactgggaattctctagttctgtaccataacaaacttccccaattgtaatacatttattaaattattgttatttcaggacctattacatggttgacgttgaaatgccaactaaacctgtagaatccgcctccaggtgcctaaccttcacatacaggggagcagatcaagtgttttgttcagccactgagcaatctgcacacggatggatgaacggtttgaatacacttttaatatgtttatcttagcaataacagaagcctggttttgcaagaatctaggcataaaaggaacactcattaatttgaaaaaaattgaatcaaagaaggatgaaccaatatcattattaaaacatgctgttaaagaggataaaaacaaggcatgttttataaaataacctttcttcagggcttaatcaatatggaagtctacgttgatgataataaaaaaacacacctattggttgaagggaaggaaaagcctttatcatcaatctctgatatcatcgatgtcaatcaaatagttaaaggtaattaaaaaaatcatttatatattaaaataatctaattttacagagaaaaaagaaagtaaaaacaaaaaggattgatttaatcgatttttgtaattttaaattctaatatataataacatcactatattatacacatctgtatttattatttgtttttgtattatatttttaaatttttgtaatttgtatttataaaatttatttttaatattttaaaatttaaaatattaattctgtaatatttatatatacacattgtaattttaaagatataatatgaatatttttaaatgtaatttatttttttcagaatcaaattttaacatattgaaattatgagaaatgggtccattcgttacatttcaatggaaaattggatggcctatacaggccctgtggttgttcattcgagtccaggagttaacatcatcgccgcatctaacggatctggaaaaagcgctatagtctgtgcaatagcactttcattaggctttgatttatcaattttgtcaagagctgatagtataacttcattcgtcaaaagagggtgcctgaacgccatactcaaggtcggattagcagatgatgaatctaatgaagagacgcttcacattgaaagaaggatatttttaacaccactttcactaaatgaaacttcaaaatctgccaaaactaactcatctaatcaggataaagaaaagaaacaaaaatttagtgttaaaaatgaatggtacctgaacggagaatctagcacattaatcaatataaaatcacatcataagagattgaacatacagttggacaatttacttacatttctagcacaggcaaatgtcggcaaatttgcagcaatgacgcaacaacagctgttcagatcaacattagaagctattaattttaagttggtagatgagctagattacttggttgatttatctcaaaagttaaagtcaaaggcgtttgagtctaaactattgcaggaacaacttaatgcatctaaccagaagttatcggagcttaagataatgagcgatacactgatgaagattaaagatgcaactctgtatatgaacattgtaaagttgaagcttaatcaagtgagtttttactatttatattgaatttttagtctaaactgagtaacataaaaaaggcaaatgaaacgaccagacgaagaataggagatactaacaacgacatatactcacgtgaaattaagtataagaaacttcaagctaagtacgaaaagatacagagttcaacaagaagtctgctagaactagctaagaataatattgagaaggtcaatcaaatattccaagctgacaattgcagtatgactgctaacaatatgaatgatagtggactaaatgagccagtgcaaaaggcattttacgactcgctgacaatgattaattcattctcaaatgaagttcaaagatttgaatctacacggcaaatttctgaagacagtgaacaaagcctacgagagaaaatagaatcgttggacgaagaaatcaattcactgaaatctaaactgtccaatgatgatgaattagtgagttcaatagcggcgaacaaaatcaaggaagactcaattaggtataacttaaggaaatttcaatcgaaaagagactatgacccaagggcattacagtatgaagcactcttgaagaatttgtcatatactaagagggatatgattattaggtacaacaggttttgcgaagccaaatcaatagagccaaaaaagttcatagttaacgacataaaggtctcaggaaaactaaactgtgcaatagtggagaatctcatttggagttacctagactgcgtcctattacacagttctgaagtcgatgataaccttaagttaatcaaggattttaaactaccaacagtgactgcaccagagaagaataatgttatgtgtcaagtaacggagaaaatgaagtcatatggagtagtaaggtttgttcacgagctaatcaatgcatctgagccaaccattcaagtcttatcaagtctgtgtgacatcaacgaagcgttcataattgatgaaaagttgtataatagggtgtttttagcagataaaaataaggcaaattcagaaaatcttttctcggagttttacaaaacaatgttagaggagattagtcgtcagacaggtgcgagagtaagtgaaatcaagtattttgttgggaataagaaacacattcacaaacatttctacaagtccaattactttatggatacggaaatggaaatttctaaggatcctagggtgatagtagatttcggaaactacggaaatgactctagaaatgaagaaatggtgagacttgaaaatgaactagatgaggtaagaagtattctgtatgacctgaataagaaacttaaggaacaaaacgagcttaatggtaatgttaccagaaagatttatggttttaccagacaaaaaatatcattagaaagatcattgaaagccataattacaagtgataaccagagtctgtcaggaaggaattggaagcaagatttgcagaagttgaaaaagaaaaggttaaatcaaattaccaaatctattatcagcacagcaaacacattgaagataagaatacaaaatgctggtgaagtgaggaatattctgatagaggcaggtgaatcatatgacgaatactgttcaaaagtggttaacaacgatgaaatgaacaaaaacctagaaaattcaaggaaggaactagatgatcttaagtcaaccctaagtcttttacaaaacacgtttgaagaacagaaagaaatgattgaacgttataagagtaccataaatgaagtaaaagaatccataaagaatgcagaacagttatttgactctgatttgtttgaagagtccactaataacttcaatgacgtgaagaaacagtttgagaacaagttgaccaacttaacagattctgaactagagaaggaactaattaaggcagaagagcaggttaaaaaattggaaactgatgattttgaggagattcagcttgttaagatgatccaagacgaaagaactcagaaggataagattaaacagagcctgtacgaaaacagaattgaagtctcaaactcgaatgtgcaaatgaatgaaagatatgcattatgggagtcgagtgtaaaacaattagttgaagaaatcgattataagtttggacagtatatgatgtatataggagatggatcgggaggtcaagtcagactagatgtagatatggataatatcaaagaagctaagatgagaattttagtaaaatttgatagagaaaaggatcttctacctctcacaacatcatatcagtcaggaggagaaagaggagtaacgacaatggtatacattctttcagtgcagaacctaaccaataacccgttcttcgttattgatgaaatcaaccaaggacttgactcacattatgaaagaaatttaatgaaattattattggcatcgtcagaaaataacacagaattttcacaagggaaatctacacctcaatacttcatattaacaccccaactgatttcaggatatgacctatccaaggcaacgcttcattttccactaaatggcccaggaatcgaacaaaacattgaattatcaaattaattttaaataatgtgtaacatattccatacgatttatatgttttaattaacaccatcacaactcgacatcagccgtgtaaatagttagttatagaacacatttcatttattattctacttttagtagatttgtatgtttaggaaaaattttaaattgtaattttaatttaaaaattttgtttttgatattaaattcacattcgtttaagaaggtttgatctagatattaaacgatcacacattttaatacaaataatggtttcagcaattaaaatttaattttatttttttaaaagggttttgatttgttatgatttcctctaattcaatctaaatttcaataatatacaatcacctccaaatatttcaatttcaaacgaatttctgtaatgactaatattaacaatgctgttgttatgtaatgaaataaaacataaaaaaatttcgttacgatggatagttctaaaatcttatgtgaatctacttcattcttcgcactcaagaaaactatcgaccacattaatttaattacaaagtattactgtaatgacaaatcagttcattgggaccaggtagtcaaatctgcaaaagaaacgcaagagtttattaacgcggctgttagttcatctttccctaacgatagcctgcatcactactcactatcattacctccgcaaactccaactaacattcaaatcagtaaccaacaatcgttcaacttaaatattattcagaacaatcagaataacttttatccgttttttcctccgtatgagaatgatgtagaagaaccacacgatccgaatttttatgacccacctcttgatcaagatgaatataaagaagataaaggttccgatttttatgatgaggctgaaggccccaattattatgatgaacctgaagatccaaatatattttcgccatgtaaatgccctaataataccttagggaattcttcgagaagaccgtcagactcttctaatgtatcaactgaagaagggtcaagtgactttggaactgagttggactctggtttaccggaaattgaaagagaaaaacaaaaaacaataatagtcgatatggagccagaggaaaatgacaagtccgcactacctccactcgatgaccacttggctaaatataggactaactatatgaatattataaactctaaatcacttgatgaattatacagaccagaggaaccggaggttttaaacagtaaatttacgcatctctttaacagcaacttcccatttagcaaagcagtccatgacataaataaaagagttttcaaacataatacgtttagaggagttcagttgccggcaattaacgctgtacttcaaggaaatgattgtttcgtaatgatggcgacaggtttcggtaaaagccactgctaccaactcccagcgcttctacttaatggcacagttgttgtgttctcaccactactctctctcgtcgaagaccaaatgaagtcactaaaagcgaaaaacattaatgcagaaactttaaactctaaaaccacgataactgagtatagacgaatttcaaggtattttatggataatgacagcgatttctcaaacggaagtattctttttatcacgcccgaaaagttggataagtctaagaaggtgctggacatgctggagaggatgtatagtatgaacaggctaaagttatttgtaattgacgaggcgcactgtgtttcacagtggggacattcatttagaaaggattacaggaaactttgcaacttgaagcccatcttccctaatgttccaatactcgcaatgactgcaacggcaacgccagaagttgttgaagacataacagcggttctaggatttgaagatcatgtactgctcaaaacaacaattaaccgaccgaatctttggatagaagttagggaaaagtatacgggatatctcgaagaaatcatcaagattctgagactgacatctggttgtgtcatcatttactgcttaacaactcgagattgtgataggttaggtgagaagcttgaacataacggattatataacgcagtttaccatgctaaaatgaatatgaaagacagacttgaatcgcaacgtctatggaatgaaggcgaagtaaggattatggtagccaccgttgcttttgggatgggaattgacaaacctaatgttcgtctgataatgcacacgtcagctcctttttcattactttcatattatcaagagattggtagggcaggtcgtgacggaaagttctccctaactatactttggtataaccgtggcgatttcgagaggcacaagaatatgaatgacactaaccacaacaacaaaaaaaggtactccgtgtattcagctgagatgatggaattttgtaaaaacaagactaaatgcagaagagtaatgattctcgaggcatttggtgaggagcctaccttcggatcatgttttggttgtgataattgttgtctcaacttatctgcaaagatcgtagatgttacagaagaggctcaattgattttaaaattcgtccaggctgcaatggaatttcaagcaaagcctttccttactgctataatgatttctgacgctatgcgtggttctaggcgacaacttctttcaaaatataaactggtagataatccatatcatggaacacttaatttccgtaaccagaaatatattctggaagtaatattactaatggttaaacaacaagctttaaaagaatgcagaagaaagtctaaaagcttcggaagaactgttttaataggtggcccaaactcttcaaaattactaaggggcgaccttaaggttgagatgacattctacggtgatcctttgcctattgttgaaattgctgaaacagttaatacgaaagcaaattttaaagtacctatagaatcattaaatcatagtacgtcaatcaattctgaacctaaacctccaagttccggaagaaaatcaaaaagaactttaaaaaagccaactacttctgtagaaaaacctaacacttccggactgaaaactatcaaatctgtagccaaaccaattaattctgcagcaaatccaactacctctgggagaacattaatagaaactataccaaatccgacaacttctgtaccaaattcaattaattcggtaccaaattcaaccaattcggtacaaaattcaagtaatagtccaccccaattttcatcaccagtctcttattctgcaatccagatgaatcccttatcaaattggaatgtttcatctcctagtgttatcaacgttgatgagaacgtgagtaacttttcaaggtctcaggtaactgaggtgattgacgactgttttattcaggataacattcaagttgggaatgttattgatcttactttagataataacaaacctcctgacatgttctatttacctaatgactatacacatgaacatggaggcgagccaattatcaatttatgtgatgaaaatattattaatgggatgacccagattacacaatcggatattataactgttgagaccaacaatattaggaggaagatcccggatgtgataatggatcctagttaatcataaccttcgcccttgatggaggaaatactgtagcaagcacataacccttaattaacccaagtggaatctgtaatatatttaatataaaatttaaaaagatgtaataataatgggtgattatgtatgtgaatatatatcataatatatgaatatatatatatctgtataagtactcacaggcccaaactgattactatcacctgaatcagatcttggattatcattttcgatcctaaaatactgttaattataaaaagttaatattattagtgtcgattaccagcaatgtcctgatggaatcttattttgcatcgatgcaatttgttgcgatgtgttgaatgacgtcagtcttccaaatgactccttccccgtgttcgggttattatacattattacatcatttttgtgatatttggtagctctgagtaccacgacgatatctattttaaacatttggatgatgtgtgtatcatacctctaaaattaggcgaaggacacagtattggagccatggaatcttcatctacctaaaactcattggatttaataaatttaaacccatctcaaagtgataatattatttgatataaaggttccgagtattattaatccggtgttcttgtacagcagtctcttaaataatttactatcatacatttaattaatcatgtattaaagatttaaaaccattaaaaaactattatccttcagtctgggttctcaaacgacagctaaaaataatttataattaataaaaaactatcatacaattagttccggataattgacccttcctttgtacgtgaatggaatctggctaactctaatctcatcaggctcaatatagtttttgaaaagccctaaagactctaaaacatatttagctaaaacttaacatactccatgttttcaagaatccggatcttatatcctgtgcgatatcagatttttgcgctgttagaagctcaaccaccgttatcacttttgaatatttcttcaaaacattaaccctgactgtttcaacttttacaactgagcttgttagaccaaatctacggcatatcgaactttgaaccagtttactggttcccattaggagcatctgcggatgtattggatctttctccattgaactattaattgtgtatgaccaatagaagtgttcttgttcatcatcatgagacttaaaatagaaaccaatatcatctaagcccagataagtttggttatagaacaggtcttttatgtctctatcataaaacattgtttgcttttcaaatacatcacacaccaaatatcctggctcaccctcgtcacatttgacctagaaatcattaaaatcaatttagttaccaagaactgatcatcgtctctcgagatggatctcacaactcgaaggttaagtggtttatatttacagtttccgatatagtagccgtatgtatgcgtatcattgtaaaagtttttaatgccgaggttagcaaacctatgaaaggtttccgtgtcatcagtgtgcgatgtgatggaaatctaacacgtattaaatctctgaaacttacaaatggactcagttctgaagttccatacacaattattggaacctttcctctgaacagcattgaaaacgatttcgctaaagcatattgagattgtttaacttacttagattatagtctgtatgtgatcctgagaggaagaaatgcactctatgatccgacaacacattgtacagctcagaatacttcaaatgtaatttttgtatataaacatctctattatcactttcgttattcgtttgtggaaccatataatttggtttatctacactttcttttgatgcgctctttgaaacaggatgaaaatcctttgatttgtatgatcttatgttatttaataggccctttttaccaaacaggtaatttgatattttgctcgttgtcttgggtaacttaaaaatagttcccgtatcggtagaatcaaacgcttctttatcatctgatgatggctcaacattagtattgtttggcacatattccactttgttattttcgttatcattatccacatcgtcgtcatttactgtaaactgctttataatctcttcaagtgtaaaaagtgcttccagttgtctcggatatacaaaatttacaatctaaaatccaatatctgtttaactaaattaccttatatggttttcctagtggaagatacacattttttgcatgttcgttcgactcccataatatcttccagtatgttgacgtatatctttgcataaagtacacatacacgtttggtctgtagaaacagtagtacagtccaatacagttgatccaatcgtatgttggatttgttatgaagaggacaagaatatcgtttttgttccactaaaaaagattttattattaaattgttaccatgttaagtgactctaggcgtttgaattgctcatacatgtctctaaatgttatttttctggcttttggtttattctttgtgcttccttctgtaaatgatatcatcaagacgtcatccattttaatccccgatacactactcgtttgggatgctagcatattttgtatcctaacatctgattttactttccctaaaatattgtgttttagttattattttacccattgaatccactaatgtcaagtattttgaaagtgttctgctcttgttatatatgctttgggtgtatacatctgatattttgaggaacttaacgtgaggaatcttaaagttaggctccaattcatcatccagtattactaggctacaatttgtgatttccaatttgtaagccaatgtatcttctctaaacatattaatgtttttggtaattaaatacctttcattatgccaattcgtatgaaacaacgtgtaaccgtatattaaacaagctgcgataataaaaaagtcgtgcaatttagaatgttttaaatgggcgcataacacaattcctattatgttttattataactgataaaattattgtttaataccttttggaacatgattgttaaatattgattgaattcttctatgaagtgtgtatgctccgtgcaaaattgtcattttgcttagcttaatttggtcaatccgcaatttctaaataaaaattaaaagattcaaataatttacgtttgtggattggtagtaattgatgaaatcatcttgaaggttatgaaaatggaagaacataacatcttcatccattttttattactattacacaaaattgctagttttacatattttaacaaattaattaaatctatataaaaattacacgatgtattatatttaatctgttcaccacattacaataaacaatagataaattattataaattattttaaaaatggacactatattaataatattaaaaaaattaatttaaatccttttagttgcaaagttaaacaatcttttgctttgaacaatcgacttcttcgacatcttcgacatcttcgacctgactttaactcttttagattccttttcattctttgatctaatcgcttcttcaatttgatccatttgatccttcattcctgataagtttccaagtgcttttccatattttttctccttctggaattgctctacaatcctcctcgcctccttcttgaactcgttctttttcctccaagcttcctttttcaattctctctttcttttacctcttgacattaccgtattatttatatttaaaacaggtgttacatcattatcatctgatttagtattatcagttttagttagttttgtatcatcattgaggtgcgatttaatattattatttaatttattaaaattatttatattttcatatccccttttaagtattttacttttatttaatttgcgatttaatttagtgtgagttttcttgaaatctttcgatttggtcaccttcaacagtttcctcttattcttggatgatacaattttctcgaattcttcttttttacttcttacatcttcaaatgtcggtagattactaaaatcaattgtaggctgtaccttccctctagaagcgtaggattcatcttttgtactatctgttgttgaatcctttttatttatttgatttaacacacttttctttacaattcttgttaatttcgccattcttttataatgtaatacattaatggataatttgcataaaatcaattatttacaaaaaatatataatgaacgatgatattaactacttgttatgcagccatctccatcttgattaccgggtgtgaacggtaattttccaccttaatgtcatcgattgtgaagtcttcaatccttgttatatctttgtttagtcttagggttgggaatggataaggaactctactaatctgttccttgattgcgtcaatatggttattgtatatgtgggcatctccaaggttgtgtacaaattctcccggttttagtccacatatctaaaaattttcaatattttacaataaatatcaattacttgggctatcatgtaggtcagtaatgagtatgatgcaatgttaaatggtactcctagtcccatatcacatgacctttggtgcatcatacacgacaatgttccatctgctacaaaaaattggaatagcagatgacatggaggcaatgccatctttgacaggtctatataataatgaatttaaattcttattacctgctacgttccacgaacacacaatcaatcttctgttatctgggttattcttgatcctatcaatgaccagtgatagctggtcaattccttggttactatatatttttttattcttaattttgtttacctgtagtctgtgtgcatatctacgtatttggcaccgaaatgacgccattggaatccgtaaacaggtcctaaaaacaatatttatatattctaatacctaggtcatgttcttcgcgatcaaaaaatcccaggttatccagaaaacttcttgctccattcagctcccagattcttacattctttttcagcaattcattgccgtttgtgctacctttaataaaccaaataagctcctcaatgattctatattttatttatatcaactaatcttttaccctcttaagaagactttctttgttgttaataacggaaatgattctgaaaggtcaaacctcatttggtaaccgaattttgcaatacaatccacgcctaaaacgaataaaaataatgttaaatacctgttctattctttttgtgatatccagtgtttaagatgtcagctagaatttcaagatactgaagttcctggctgtatctaaccttcagtgatgggcaagctttcaccaattgatccttagttgcaaatttctctccagtcaacaacatctcttcaaatgtttttttaacgcgatcatcaacaattaaatcttttctttcgtacgtcacaaagtcatatgttgtgtcttcacttgagaacgttttactaattccagttataacgaagtcatcagggatctttgggaagaacacttcacacttgtaattcttgtttacccttgtaacgtacattttatcaacaattcttgcatcaagagcatccctatagacgtagcttcctcctaaatgttttatatttagatgaaaaatacccattatgaagatcttatagtagttgagatgttcagtaacgtgacgaatcgcagctggcattgaaggaaatactaatccacctggaacctcagtactaaaatcaaattatttctagtataaattacagatttcttgatataacaacgttgattctgttcttcagtggaaaagttccttctggaaggctatcgtatgtctttctaccaatgattattacattttgagctcctgggtgcttttctttgaattctggatcaacataagtcgttgccctgaacataaaaagaaagtcccttttgatgtgtggccatggtagtccattactgattccaattccattttctggcgttatcgctactaacaatttaacgaaaggtaatccagagtaatcttccgccatgttcttataataatgtgtaataaaacaattttattatagaaaaatctatttacaacaaatacagaaaatatatcatgtgatgttgattaattaaatagtgtcaaaattattatttaaatccattataatagtttatactctttcttttattaaatatatttttatttataaaatgtgtacaatataaacaatatattagtaaatcaatttatcttgttattccagtttcaatatattcttgtttatctaattcgtattgttttaaagcttcttcaactaatttgttctccttatatatttttctaaataacaattaaataattaaattttacattttccgaataattgtgtagatgcaaatatacacaaatcccaggattaataatgccacaattgtattctttctatcatcagttgtaaattttatgtatttttgtttattttctgttacattttcactcatgtaactgtgagagttagaatctaagtcattaaagcttttaaatgcattatcgatgtattctgaaattttgctttttaattttattttttccttaaatcttgtattatttaaatttagattaataaatccctgaaaaataaatattaaaatagttttcaataataaatactgatatgtgtaatatgtgtatataaacattattgttttaataagcaaaccaaccttcttattgttatacaacattaaataattattaaaattaatttgaatatttttaattatcttaaaattattaaaaatttctttaatatttagtaaagaattacatatattgttaaaaatgtaattatgaataaattatagaaattaatactttaattaatacaaaataaattttatataacacaaaatatttataataattgattggaagataaatggaatcttttattaatacttacaaccccaaatacactaatgtgcatatagaattaaaggtgtgtatgaatatgtgtaaagatattcttttaaattaacattatattttttatatacatatgttttatttatatttcaaatttttaatatttcagaactttctatctagatttatcatgatttttataaaaatttattaagacatttcttaatataaaaccatttaatactcttattcaaacgattttaataaaatgaagacaaaatcatcgaattcggacaaactaaacactttgaataaccttcctaatgaattcactcttctatctaaccataaaacaaatcttctaacgttgcttaatgaagagttaaaatatgcaaatttcgagttcaaccttattaactatctgttttcgttaaattcatctctaggtattccctattacttattttattatttatttttttaacatttatttagttgaaaatgatgaaacacaatcagataattcatcggatctcaataataaattcaatttattgaagtttggatcacaagatttctttgaaaccaaatataatttgaaaactgaacttgaagaatctctaaattcaattaataaatcgctcaggaaaagaaatgactacgctaaatattcatctgaatttaaacaacttcaagatacaatgaccaaacttcaaaatacatattttaattctcttcaacaaagagaatcaaatatgaaattgcttcttagattaaaaatgttcagttccaaccgattgaaaattttggaagaatcattaaaagattatgagacattgaaagaatttaaaccactatataatcaacctaataccaaattagtatctcatccaaattttaaccataatcttaattctaaacataaatctacccctaatcttcccaattcaaatgaaaatgaatataaagagtttattaaagaatgcatgaactatgatttttcacttagtaaattcaacaactctcatccacataaatatgactgctctataaccttacttccagaatttagatctccatactcgtcacatttgttaaacgtcttctcatggacatcgtcgttagatcaatttaaagaatccgctaaaaatctatacaaggttttatttaatatttaaatttgactttagaaatatggtaaaagttatatgccactaaatatctttaacaatctggtattacatctgattcaatcattacatcttccgagtcttagcagtatctttttaaaataacaatttgttatagaaatcccaattgaacatatttatgctgtttataatgtcaattctaacacactcttggatttcagaacattttcattacttgtaatcgcttttcatattattaattctttagtactgggagattcttcattcattaagacgtgctatagaattgtattatcaacctcaatatcgtatttcccataataaaatgtatttaaacaattatgatgatcaatctcaccagtttataaacatttcaggtatatacacttattataaacagattcagattactactcgttcattaagcgactctcacctggaaggtcatgtaacaaatacgttgcaaaggaattggaatctgacgaattgagagttgttgaaatatattctaaaacgccagacttccctccttttcatgaaatttactccgaaattgataaccttaaaagactggatcataaaaacctcgttaaatatctatccgtctaccaggactataatactgtctacattgttacagagtacgtttaattttattaataattcataggttctgttctgagctatcattgctgaataagttgaattcacttgaaaatactgattttgtttattcattagcctttgttcacaatgtgtttacgcaagttgttgaggccctcgtttatttgcactgcaacaatgtagtccacaaaactttggcgattgataaagtcatgattgatgattcaagtgaatttcccagaataaagattcgagactacggtactatgatacatttatattgcttttaggtctgactgattcgcttgataaatacaaacacaggtcatttttatctaaattacaccaagctcccgaggttgttgccgataattttacaccaaaaagtaatgtttggtctgcgggaataattttattatttctaacaacgggtaatcattatttaaacattattcttaggtcaaatccccttaaataatgttaaaaaggaagttttcctaaacaatttggcagaatatctaaaaaattctaaacttttcaaaatttactgtgatttaaaagatttaataaattatatcttgacatacgatgctaatttgagaccatcgtccttcgacgttttatcacaccactggtttaactgtacaaacatcaccagtaaacatgcgaacactacacatttaaccagaaacctcaaagtacgttatataatgaatttataaaaactttaggcgctaatgaatataaattcatatctcaaaatatctagtttgcttgaatcgagcaagattttttatataaaaaaattaaataaactaatgaacacattgttattatcagctgatcctactgacaataatttattaacatatggttatttcgtaaaggcactaaaaatggaaaatgtgccaaacaccatcatatccgaactagttcatctaacatctatcaacgcatcagataaatgccaattaaatggtaaattatttaataaaacaattttccagatctttttgattcatttaaaacctggaggttcggagaattgaacatattctggtcaatttgcaagaagtttataaacgtttgttaaaataaatatattcaattttaggaaaatgattggtcatttgattctaaacaatttatagaactgttacaagatcataattcatcattattaatgaatgaagaaatcaatcgattctgtagatctatttctgttgatggaaaggtaacatataaattttaataattttatttaaacatttagtaactaatttttagattttttggaaccactttgttcttttcttctattaatttaattttaaatttcgccttgtttattatagtgtataacttttaggaaatatctttattcttcgtatttatttatttttattttatttttctatatgttttatttattatttttcgattatttcaatttttgtaagatcaatttaacttttcattttataaatcgactaatgttaatgttctcgattaatcttcgtaataaactaaatgctgataaagtaatataatctaataattatctatgaatgaacaagattctgatcagtctaataaggataattttattacaccttattactctgattcaaactacaatacagtagatgatgaagaatcaaattttaataccacctcctcttcatttgaaagcaataaaactgattttaatgatattataaatccagaaaactatcctctatatcactcaacttctctcaatcgtcaaattgatggaatcaaccaatttgcacttcaatcctccaaattatcaagttttagcgatgaattatcatacaaaataaataaagaatcgttgttaactaaagcagtgagctatgaagataatgttgactataacacaactactccaaataatagattatctgactcatcagactatgaaaataaatcatatagtaataatttggaagtaacaaaattatcatcgaatcacgtttgtgctacacctgttactaaaaagactagtgcttcacttcttgatcagtcttcactatcttcactaaggtttaactcagcatcattaatttcactcccatacgggtataacaacaacacgttcacgaagataaaatcatatgatattaactacccaaaccagttcaggaagaggattaagtacggagatgttaaaaatgaaatcaaaaacgtccggaaccactttcaaactaatgattatagttcagactatgacatgacctgtgactctccgtatccctcacccatcaactctaaatacataaataatgtaaaaaacggtgtgaaaaagtcattatacaatttgatggttcataatgaatactcgtcaaacccatataaaagaagataccaaagtgtggttaacgaacggagaagactattcccaataaatgagacactatccgacgtgtttgaacacatctcattaccagaaaggttatataaaagacaaagaagagggaaggttaaaagagaagaaatcgaatcagagcctaaagaaacatccaccacagacgaagattcaacagaagagagccaacttataaaacaggataatgaactgcaatgttacacactcccccaattacatgtcgagtacatgaattatctcaatgagctgaccaactctaatttgaacattgaaacaaatatgctaaacgaattgaagaatatattgaattatgtaataaccacaagacaacgtatgtatgactcattttacaatcaaagacaattacctgattttgatcatgataaattaaatattgataacttaaagaagattaagttatcaatacaaaatattctaacaactctaaataatgacctgatttcactaaattattcaaaaggattgttaaaaacagattatgcatccgcaaactctaatgaaagttataatcaacatatagacttcagttacggagtcaagagactgaaaagactatttaagaacgatttatataatgttcttaaatattcaagtgatgaatatagtgaagattctagtcccaccaacgattcatatgttctctgcacaagcccagcactaactttctataatggatttaagtgcattcacggtcaatgttcaacgtcgaattacttaaatgatataggtgtaattactgaatgcgattcatcatcaggatgctatgtatggaatgaaaagaatcagtatttagatccatttagaattgctaagatagggacttggacgagtaacagtgccctcccatacgaacttatacaacaaaataaaagaaggcagttggattcaacgatttcatttattaaagatgtttgtaaggtagcaatcgcagaaataagaataccgaagccggaatggagtgagtttacagaatacacatgccttaatggatattgctgtaagaagtgctgcacctgtttgaaatcaacagaccagaacttgatgtacacgagtcatgtccaacataaacctctagaggataagaatatcaatttctcagttgaaactaaactggcaacagttgaccttctcaaaaatgtcctaggaagctgttcatgttactgtaaatgtagtagtgacgcatcacatgtaatggatagagcaataaatgaagttaatacacacgactgtttgtgtaacgagtcgatatcatggtatgaagttgagacgaacaacttaaactttgatcctgtagagaataagtacactaatgaaaacattgtacaagaaagattcattctaagaattaaactagattcattgcctctgagcatgaaaactaaggttccatttacatgtaaacttgatattaattataaaaaagaaaaagaaaatcataatgttaacgataatgagaatgataatgataatgaatatgatgaggttagttgtaagaagagaaaattaagcagtgaagatgaagtacatggaaactctaccaaacttagcgatttcaagtttataaatgatttcacattctgggacgctattgaaataataaaaaacgaacagaatgaattgcaccataatttaaagaataatgaaaaattattgaaatccaatatgtgctttgacgctatggagattgatacatcacatgtacagacagaaacgattgaattgaatgcagaatcattctcatttgatggaaaacgtgattcatacgtagaaatagcattatatttgccatacgtgccatcaacgatattaccatgggagttcgagtgccttaacccaatggagattttaaatttacaacaatccgatgaacactctattaaaaatgaatatcaaaaggaaagaatatcaagagaatacaacgtagttccaagatcactgaagaatgtgtttaactttatgaggtcatggatcctaagaagaaattatcttatcgcaaatgaaagagatttgtacgaacagtttaaagtgtactggaatgaaaaaattaagaagttcgataaaaataaaattgatattttttcatggggagtactgccggtgagagcaattgaccttccagatgtgtttataccgttgccggcaggatataaccgtaacgacataagttatccgtacacaaaccagggaacaacatcgccatttaatgttaaagggtatggaattggagacattaactttaaaaagattaaattcagccaactggaccataaaacagaagaagaagtaaatgagtcaatgaatattgggtcgagacaaaggtcaactcaaggaacaagaagaaaacaaacagaagaattgaatgttaataagcctgcagaagctgatattggaataaggtcaagtgcatatctggtacaattctttagtaatttgacaggaccgagtgtgagatggactcattcattgatggattcaatgaaggaaccgctagaatatatacctgatttcaagtcactcccaatatacaaatcaatgaaatgtccagaactcagtttctacaagttggataatttgataatttatgacaggaagaataaactatcaaaccaacaacatgacgaagacgagctgaactacagagtatcgcaagtgtggacaaaggcggaagtaaagatattcacagaaaagtacctgatgcacccgaagaatttctctaaaatcgcccaatttctggaaaacaagaaggtctcggattgtatagacttttactacagattcaagtaccggctgaagctgaagagcaagttgcatgagttgagagtcaggaataaagggaagtttgacatgacgaagaacctaagaagagaagcatgcatactagactcgctcgaaaatatgttggaagactgcaatacggacttcgttaaggatttcaatgccagaaataagttgccgttcaactcagtttcagattacatgttaaggtcaggatgtgtagactcaggaaatgaatatgacattcagtacacccaacattttgatcctactaaagagttagaacaggagtatcagtacacactagataacattgcagaagggtactttttaccgaagaagtacttatcaatgacaaccagaaagtatgttcagttcccagcatatgacgcgtcagatgatcaatcatccgagacaagaaaaggctgttttgtgtttgactataacttcagaaatgacaggaacgatggaaaagatgaaaaggaagagtttgatattgaaactgatattgcaaagtcaatgatagtatccattaactcagagtcgttcttcaataacagatatagaggccaaaagaaggtaacattatcaaatgtagataagattctgtatcaatttgacgatcaaaatcaattaattcaagaacctttgtcgcctgacttattagaattaaattccaaatataatgagaatataatgcagattaacggcatgaaggatgaccatcaattacatgatatggaattacgtagcaaggccagtgacaatacacctagataccagggcatggtgacaaggaaaaaggtgctgaacagttataaatacgcatatgactccccaaggacattcaggtatacacacaagagtaaaatgaagagaaagcaaggaaagtggacctcagaggagaagcaaaaatataacgaaacgtttagaacatatggaaaggactggagtaagctatatcatgcgatggcgccttatgggaagtccatggaccaagtgaaaaacttctaccacaagaacaatttcaaacgaagattctaacatttccacacattattttcaccgaagtataaatcagacattttaattttaatataataagtataaaaaatacacatttaggcagatgtgttcatacttaaatatattggaaaattcaccgatggtgtttaccgacacacgcatctaaagtgtttaatcaataatcagataccatttttatggtttatataaatacaataaattaattaaatttttattaatccactaaatgctgaaatctatgatgtatttagtgctaaacaatggagaagtttactgtgatgttccacccatgtgaaaacctcgacaattaccttaaaaacacatactccttctctccatactacactcatcactttttccacaatgatttaaatgtaagtcgtgtcatagaaatatataagtaattttagtaaacacaacatttcataaataatcgataaatttctaattaattaatttagacctccgcaatacaatgggtaagatacgacgtgtactatattgtcgacacatacgagttgttcataaaggtttcgggtcagctgtacatgtcaaaggaagattctgaaatcaggaagtcactgtacacgatatataactcgattttttcaaaaattccagaatacacactcatattagatgaatccacttttaaacacttattatatatgcgttcagtaggaacacaaaaatttatgcctccaggccgtatcattgttgagattcctctagataactcgttaattttccaactgagatactgtgtatttcaagaagaatcaaacacacctaataattcacctaacggatcagcaaatttgaaaggtttttacaagagaacgtctagtgaagactcctacttcccagaactgacagataagtcaatatattttaaaaacacacttgagaaagaccatttcgacattgagttatacgacgagtgttatataaacatctcacataagggcaattttgacaattgcctgatttatgatataatcaaatacataaacagatcgaatggcgataggcaaaaaatccctaggaaatcgacctatgatcgtcttaattttgcagttcaggagaattttaacatactccataggagattagagtggttttatcactggtttatagaaggagcctctaatattaaggccgattcgaggtggtctgtttttataccaatgcttatattcacgtatgacgcatttgatgatgagtacaagaatacaacaaactccatatcaaatttactaacatgtaaggaagagttccagaaaactattttaaatagatcgaccgagatgaattcgcaaagcattaggttaaaaatcatgcaacagccagtgggaacgatatcagatatggtacattgtaagaacaaaaggacccacttatcgaaaaaattaaaccagtcaggaaaccaatataacgtgtcaataattggaatggttactgcatattatttttttacattgaaccacgacagactaagaatatcacagttcttgatatttcctaattactggggaaaggggttcggtttgtgggtattggagtttatatatcggatggcaataatggattcaaatgtgagagaaataaccgttgaggatcccacttcagcttttctggttttgagatatgtggtggctcttaagatatgtttcgagtcaaaactattggaccccaatatcctgtatgcaaacaacaaaaacggacttggaatatttaaaatatttacaaaagaatccacaatcccatcaaaagataaaatatgctcagtatgtaaggagagcaaggcttgttcatcaaagtaagcttgttacacacaattttttatcaggctggtcgagattctacaactcgcatcaattctgccatatcctatttcaactcaaaattttgtaaatagatatacaaacaaaaggcagaaaactaacgatataggtagcacacatgataataattgatttttagacgtcaagctcagcctcttcattcaatctgatacatacatagattactgcgataaattgaaaaataaaataaaattcgaagaaataaaggggaatgggaacggaaagaatataaaaaagatttcaccagataaatatttaaattcagtatgtctataatgtatttagcatttttgtagatcgacccatcattggaaaatatgtgcaatgagaccatatccagttacattcgagtaattaataaactaagaaaaatatttcctaaaaattaatgtgatatttttcatgttatttgttattttctgtattgttgggattccactcaaagtcgaagttaatcagagaattttttaaaaattttttatcgcattatccttaagaaattttcagatgtacttatacaattatttataaaatgtgtgaataaatatagttgtgatgaaatgcaactatgtcgagataccgccgaaagggtaattcatacaaaaaccacaacacatccaatgataaccataattctaatgatatttttatcctcgataaaaaattccagccttttgggaaaccggaggagaacttggaatataaatcgaagcttatttgtaacatactgagcactccactaaccgaatatatggatacctttctggattatttcaccaatgactatgattcatttaagcaatgtgttaattatttgtcagttaagccatcaaatgaaaagtttttaataaaatcgagtacaagtcaaatatcctcaagctacacttacaagcccaaatatccaaacgagaatgaggaaaattttttatttaattcacccttgaatggtaaacttgattgtatcaagttgaaataccaatctagcaacaacatctacgatccttgtgataatcaatctgcattggatgacctaggtatatatgagaccatgatcggctcttcagagctaactgatataaccaaaatgatggatgatgaattcaactcacactatgttaaggcaaacaatttccagagtttcttcatcgatgtcacaaaattactaataaaacttcccgatttaggctcagatttgctcttagcacctcaattgatacttatacttctcgactacattatcattccatacttcttcacctatattgaaacgatgtatgaacgccataatgtaaaggaggttgaaaaattaatggaagtctgcaaatcactgcctaatgacgtgtgcattacgatttcaaacgacgtcaaaactcacatttaccattccttcatctgtaggagcgggtatatttacgacaagttgaccaaaaataaggagaatgagttccgattccacatttcatcgaggcttaaaaacatacctccaacgccggatatttttagaaattcagtcagtgagatcaaggatgaggatgttggaagcctggtcgtattaacgtgtacagtagttctttcaggtacttcaaacagattgatttagtaattaggtgtaatgagtatcatcgaagacgaacgtgagtatgtttgtaaaacctgtttcaagtcttttgtatccaaagcctcatgtgaatcttatttatatacaagccaattcaggtgcccgctttttcaagaaggtattttaattactaaaatttattattaggaacatatccaaagcaaaggtgtccaggatcaacatttgataagggagcatacttttcaagatcagactaccaagaaattaggtaatcgcctatattaacactatatcaccatccacgataccacaacatcatcaaattaattaggtgccaatcaatctttaactctgattgtaatataagctcaatatcagctattccagtggttcttagaaaagaaatttgcggaacatgtttcccaggcgatactgtccatgtctcagggtttgtcagaagaaggtggtctagagtaaagaatggggaaaggtatccttattaattacttaatttctgttaaggtgcgagtctgaattattcattgatgctaataatatcgagtgcgttaattggaaggcaataagtggaatcaacaatgtgatataccaacaaggtatggtcaaactatgattatattaatccacagcaaactcatacgaggacttttggaactatcacagaaacgatgaaatatcttcaagaaatattatcatcaattctatttgcactgatcttctaaatgttgataatgccaagctagggctaatcctaacgctaataggtacactaatggtttaattaaactttttaggtggattctcgactgacgataaactcgatgagaacaataacagatgggcaaaatacttcaacgatcaatcgaaaaataacaaattcaaccgagatgaggtttttgagggtgtgaagaagaaggggaatagtaaggaacatttatggcgcatatatgaatataggaactagaactcaatgccatatcctatttgttggggatccggctacagggaaatcacatttgttagaatacgcaactgaaatttcataccggcatgtctctgtaataggttcgtttagaaccataatattcgtgattaggcaccaactgcacatccgttggattaacctgtacaatagtcagggatggaggagatagtatgctagcagcaggcgccctagtattagcatcgggaggaatttgctgtattgacgagttttcggagataagaaatgatgataaatcctgtttacatgaggccatggaacaacaagtgatttcagtagcaaaggtattttgtattcgttcaatatccttttagtcagggttaaagtgtacccttaactgtcagtgtactataattgcctcatcaaattataaattcggtaagcaaattagtaaaaagaagcaggaagatcaaacagtcaatgaacacagaatcatcaatattaacacccccttaccgcttctaacaagattcgacttaatcattgtgatgactgataactcaacagaagagttggatatagtcgaatttctgctcgatgatgataatgagaggttgaatagcatgaccagtgatgagaaatctaatttagactggtcctctgtgaatacaatgaaaaactatatacaatttgttagggaaaacttaatgccttcaatgcccccttcttgccaactgataattgatagatattacgctgagattcgaacaatatcgttcaatttggaatatggtggtggaccaacagtaagaaccgtagaaagcatcgtaagattatcccaggcacatgccagattaatgttcagaaacataatcaaggtctttgacgttggtaagtatccttattaatatccgttaatttagtttctgtaatattaatcatggagtttgggctacaagggtatacaattgggtgtataaatgcgaaagaccaagtggtggatagaacagggcttttttgtaatataaaaggaatctttaaccaatatgtaaagaataatgcctataagtttaaaggtgtggatacgaatgaagtaaaatttccgaatggaatcacgacgcagccaatgtatgattatttcgaaggacttctctttgagagattgaaattggcaaggtctgagaataacccggaagacattttaagtctgtaaaatatgtttgataatttattctttttattcataatacattccaacattccaaccttacacatttttatcaaaatttcgattttataaagaattttgtaaattaaaataaaaatgtgattgttttaaaattttgtagaataaaatggtttagaatcagacaaaacgatgttaattagagtttcattctcatttatagaattttgtaattttaacgcaaaatgtataaacaaaagagctttttataaatgttttagaagtttttctaggtattctatcattaatttactaattttatttcagtgaaccaaataattgtgtaaaaaatgatgaaataacaacatcagagtcgtttgtaacagtcgaaaattatcctaaaccgtttttatacaatgaaaccaatgttgttgatattatggacgattcttctgtctccaggatgggtattctatcaagagaacagtttctatcaacgaaaagaacaaatttaattgataaaacacagtatgaaaagttgaagccgcacgaggttagatgtttatttaaattcaaaccaattaggctaacaaatatgtcacatcaaaaaaagatggattttatttatatgataaaactaagatatcagttactgatgaacaaacaaagctaccaaactacaagaaaatgatagaaaaatcaaaaatattatcatattccaatgatacatcaatacaaaggttattttagataatttataaattaatttagaaaacaaaaaaaggataaattgacatttcaggacaaagtaacaaaataattcaatattaatattcagaatatatacgacaagtcaaacgaagattatttcaaatcgtactttaaagatagagaaagaatctttgacggtaaaaaataaattttaatttggttctaaaggcttgagtgataaaataaaatcatttgaggatgaaattatgaagaacacagtgagtccagtaggaaatagaaccagaatatcacctaacaaatactggtaagatatggaaaataaaatattcttaggattaaagaggggtataaatccccgacaaccgaagagattaagtccctgagcccatttgacttaaagtttgtaatgatgaacgaggcgaagttgaacacaagaggtaaaatcgaacgtaattataattcattagtaaaatcaattaatcctgagatttgggattcatttattgaaagaattatttcttacaataaaaaagtaaacttaaacacattgttaagatatttacacgccatttcaataacaaaaataaattcgtcaaaagttaagaatcttattgagtgtgttaaagttatattaattttaatgtagtatgatttattcaagaaagtatgaaatgaagccaaagcattttgtgttcatgttccaagtgacattatataattttaaattgaaataggcacagtcgaggataaatataagagatcagagattgtatgatgacatgtatgatatgatactttgttggcccatattgaggaataacttcattattaaggtaaaattaatgaggctaatttatttaaggctgcgaattcaatttctaagctgggaatatcagaaagtatactaatgaaaccacttcaagaagttataagaaatagaatatcagactttacaggtatgttagatgtgtggtatgtttattagggagtgaatgtaaaagattcaagccgattacagttatggaaatgtttacagacgagatgatagttgagtttattgagaaatgcgaatatcacaagtgttatttcacgtgttatagtagaaacttggatataattcaactgtatctaagactgctaaagccagatgtgtattcaaatttgaaagaatctacaattgattttctaaacaaatcaagggaaaataacaaagaaaaaagaggtatttgttaaaatcaaaattttttttagatttatcaaataaaaaagagagaagaatgagttcaagtgagcatgaagatataagtagagtccttaatttaatgggaattaaacatcagaactgcttagaagcaggtaaatacacaaataaagcaaattaattaacaggcccatttgtatttgacatatatgagccaaaatcaaaaacagttattgaggtgaacaacaagtaccagtattatgttggaagtaatcaattgacatcatcagccaaaaggtatcataattcattgtaaattataataatatgttctaatattgaatcaaggcgtcatgaaatgatatccgcgatgggatttaagttgttacacatcccatatagatggtggaacaggttggaatctgacgaaaataaaatagaatcacttaaaactcttttcattaacatttaatatatttatgatttttaatatatcgttattatgcaacacattgagattaaacaagcacgaaatatcaaattttaataaaattttgtattccaccaaaataaagggtggtaaaaaacaacaaaaagaagttaaaactgaagttccagtagaaggagaagacggagaacatttgtttaatatatatgcttcaattccagaagatcataaaattcttccagacgaagcttatccaaagtggctttgggatctcgacacacctgataaaacatacggagaattggtgcagatgtttgttcacggaaaggtattcccttaaaaacatgtatttctttaggatatagaaaactctaaaatggcagactataacaggttttgtagattacataacagatacttgattaagctcaacaacatcagacttcaaaaaagaaggaaaattacatttgattctcacctctgggatgtttaattttattaattcgttcaatagttgcactttattaatcattaattgttttgctactaaattgtaataatgaatattatggtttattagattattctgtttttaaaatttctaaaacttttccgattcctattgtcttgtcctcatctcgaagagtgaatcttcccagttgaggacagtctgcgaacttctctaagcatgccgctggagtcaccagcagatgtgcagttacgattgaattgtttgacacgaaaactgggtttggtttcttcttcttggttgctttgtctacagtttccaataacttgaggaacttgacttctgctgcaacacaatgagcgtgaaacatacaatagtatccagatgatactaatggtctgtgttcaagtaagtcaataattgatatcaaggccgtgaactctaacacgactgggcacggtgattccaaattacaaatcacagatccctttgatacgttttcttcatcagttgttgatagtcttatctaagaaataatatgaataatttattcttaccctaatgttttcaccaactttggcatatgaatactcatcactttcaaagtaaatattcgtaaccttcgaccttgatttattaggtacaacaacacagttttgtccagttttgacaactccagactctactttccccaaacaaactagtccgttctctctgtaagtgtcaataactgggatccttaatggtgcattttcatcagattccagagttgggacgttatcgagaagttggaaaagtgttggcattgaagtatcataccatgctgcatttttatcgtaatgtttgtaatttacatcggaaatgtggtcaatgagattctgacccagaagtcccgatattggaacaaagctcaggtccttcccttcagtgaagccacacgtcttaaggaaaggcttcagcttctttataattccctcatatctttcttttgaccagttacaagttgaatcgtccatcttgtttattgctactattagataactaacacctaaaatacaagtttttgagcatttgaattacctagagttttcgctaacagggcatgttctctagtctggccacctcgttcgaaccctgtttcaaactctccttttcttgcggagataatcaaaactccacaatcagcttgagttgctccatcgatcatgtttggaacgtaatttctatgtcctggagcgtcaaggattgtgaatctgcggttctttgtttctatcttcgctctacccacttctattgttttaccctatatactaatttcaaatattgttaaataccctttctctttcttcctcattagtgtccataatgaaggctaggaaccagctctctctatttttttctttagcctctttgccgtacttttcaattgtacgatcatctacgtacccagaaaggtacctaagaattattgaaattaaatatgcatacagaatatttccacatgtggttgatttcccagcatctatgtgtccgataaaaacaatgttaaggtgcggtcttgaatctggcggagataaagcagattcctttccttccttcttcttaaccagcgattctaaaataaatttggtaaaaaatttaaaaacctttttgtgagtcactaagctcattatcccatgaatcctcctcttcagcgctagaatcttcacgtatttttagtgactctacacctagagtgggagaatcgtaggttgtgttgtttacgggttcatcgagccaggaatctctgggcttaaactcttgcgcatctgggttgaacttaaacgactgttcatattcataattttctgcgtcattttcaaagtctgagaacttttctgaatccattttatacaaaaagttactatagaatgtattgtttatttaacaagattgaatttggtaaattataaaagaaatattaataataatatacagaagttccacaataaattttattttatgcagagaatataaacaatatgttttataaagtgtcacatggttgggtgttcgttatacttgatcagattattatttttttaaattcaattttaattttatttttgaaatattatttttgttttaaattagtggttaaatttcgtcgattatataaattcaacaatgactgttccaaaggattttgaatgccctgtatttttacacagttataattatcgtttagatttgtttcaatatactttataaacctgttaccacctcttgcggtcataatttctgcaagttctgtattgatcaggtattcgttcattaataattaaacctacacatttaggctattcattcttcaccaaactgtcctctatgtcgaattcccttatcatctcagtactctcccaaccttcttttaactcaattaatcaatgagagattcaaagacgagattcaatctaggcacccctcaaagatatcgtttaatgaaggttttatatcatttgatattgttcttttagttcaaaattcaatgcaaaattcacctgattataacccagatttgagttacttgccattgtattacaggaacttctaccaacctccggtatgttctcacttcacaattaattttcagatttttgttcaagaaaatgccaccattaagattagtaatatcagcatgtaccgtatgttacagtacgcctatgtaagtttattgatgtttaatttttgtacagtccaacaattctttgtttattactactcgtcgctatttcaagaaacgtccagagtatgggacaatcgtaagggtattcaactaataaatcaaatagttgtagatcaaatccaacaatatctatgaaggcgtttcacaaattccaatctttcctatatttgtcgacgttgttggcctgcacagggttagactcaatcccaccctgtgtaaaactgaaatgaactttgaaattgcatcttacgagattttcaatgatatttcttatcttcctaaaaaatctgaaactgagccttctctcgatgagaatttagaaactgagtctgagccactaaaaataataacagatattaaagaggctgttaaaacgaagtctaggagttatgagctattattggaagatttccaaaaggttaagaacctcgacaatctgaatcatcatgaaaagttgagattctgttatatgttactattaatttccatgaagattgttaaaaggttggtttggtttggtaaactatagataacaaaaaaattaaaaattatttataacaatttacaggcaaatgaaaaacattccacgttctcttcagataaattcaagggatgagttcggaatcgataatatagtaatggatgatcgcaattatgaatctatggagttccgatcattattgatttcaaaagtgcttctggcttcaaataggaagaagtgggaatggttttcaacggatggtaatttttaaatttaactataattcttgaatttaaatattttttcagacacgcttgaacgtctaatgagtattactgagttcatactatattcaagggataagaacatcattgacccagagttagcttccaccttcacacaaacatttaggcaatcacaatcatcgtttagcttcatctactcaatggaccctcttatctctggacttattttcctggtcatcctcatccttgcaggatggttgtacaggagtatttcacacaggaggtgatcacggtttattgtcgatttgcagttccgcgtgtactaccgtaattacatccctggctcccgcacaattaaatttgtacaccagctttacgctgtctatacagcacatgtaaatcccaattttagataacttgtcccctaatctcgtttatttaattattcattacctgctgcgattttacgaaccgagtcgaacattgagtttgttagtctccaacaatgcgatacgtcaataagtgaaagatgagataaagttgtcaaaatcatggaaaaaaactcattcgtgattgtactgaagtccgtttgcacaagattttagtaaagatacctgcacttagtcatcttaagccttgaaagctttgtaagtttagagcacatggcctcgacaacttcaaatgaaacttgagattcagaaatatctagcacggaaatattattacaagagttaattatctccaaaagtatatcattttcaacatgcctccctatcaacgattttacagtttaataatgatgtgggtaaaaatgtctatatattggtacctatgtgaagttcctctagtttagttagccttgaaagatgcttgaattcactgggatcaattgatgtgcagcctcgaatgtcgagaaatttctgaaattgatatttaaaatgaacataccagagttttagaaatatttacaaggggagaaagggatttaattccagagtagttaaacagctgtaatctttcgagttttggaaacagaattatgggttttttgcttagaaccgtattgaaaaaaaattctagaacttgggagttctcggaaggcacatgtgtagtttttgaatatccaagatataaagactaaagaactcattaaaaattaaaaatacttgtaaattctcatttgacattccaaaagccttatgagttatatttttacagttaaaaagatccaaaacccggagattctttccgatatttggtaggaaaatgtgtaaggatttgtttgatacgttgttgcaatttctcatgtggagctctcttaaatttttaaaatatccagactttatcattcgtgagaaatattgcagggaactatcattccatttggtccatccattaacatttagtgtaatgatgttatgagagctaaagaaagtgaaaatacttaaataaacctgaatatcgcattaaggattgatttcgatgatatattatattttttgcagtctgctactttaatctgagttcttaaacttctaacaattctgcaaaagaattttgagacttgcaagcattctcttggagaatatgaaactattaactttatcacatcatttggaagatcaactatatgtgtcgagtttagctttcttttcttcttcattatacatataaatagaataattattgtgtaaattataattcgtaaatgtcaagcacaacatgtttatatatataaagtaagaagtgtaaatatattaaacaatttatataaaaattgtatattaattatatataaatttgtattaaattaaaatttttatgtttaaaactttaaattctcaccttttttggtgaatttctttcattactacttgagtttctcaaatctcttggagaattcgtactttgtgaaataattgaatagtttggcgagttcatgacattttgcaaaacatcaagtttcttgaggttattgttgcaggtttcagagtaggggagaacaaacgtattgtcattatccttagtcaaactttgataaaattcatcattgtatacctggttactcaggttgctgattttgggtgagtcgtgatccacagctacaaagttcttcacccaaatgtgatccagagcttcaaacactgatattctcctaattggatcaatttcaagcaatttctttattaaatctctggctgaagatgatgtggatttccaaattggtccatcaaatgttagtttatagtggtctgatatattaactgtgtttgctctcttgattgggaatggaagtcttcctcttatcaacagatacattatcacgcctattgaccacacatcagacttttggttatatccctgcatcgtcagcacctctggagctacgtatgcaagtgttccgcagggctgaattagtatatcatttggtccacaaagagttgatagaccaaagtctgttaacttaattgaggccagctcagttttatctgtcaataacagattctctggtttaaggtctctgtggacaattccgcagttatgcagatatgccacagtttgcaacagctgtgagataattctgtgagtatgagattctgacaacctatgctccgaatgtattaaatcatacaattctcctcctctcaccagttccattattatatacagagtatccttcatatctattatttccttcaagtatataacattgttatgctttagaagcttgaggattgagatttcgctcctgagcaattctcgttcctggtgtgttattttattcttgtcaatgattttaaccgcatattccactcccgttttcctcgaaacgcctctgtaaacaacactaaactttccttgtcctagtgcttcgcatatttcatacttgtttgcaatcgtttgctgtttcattgcatgagtcaacacttcaacccaatctagaaagtctgacattgtatcgacataaaaatctcttttcgatatcttagttcccttgtggaatattgaaaacccatatttgtttccaattcttctctttcttaacgaatgcaggtaacaaccttctaggaatatacaacctctcggtcttgtgcttgatttatccttgtagtagtataaaatattacctatcagaacataatatcttgacttccactggtgtagtgtcttcccaatcttaaacattactcctgcctttgtagttatattaaagtttaggttatcattatcatcatcgaactttgaactgctcttctcaaaacaggaacttgaacttatcttcagttcactactatctttactgcttcttcctaccgactggcttgaggacattgtttcaatgctgtcagatctctgcttccaggactgcgaggtgaaaatgtcgttaaatgaccagcagcaaatccaacatgaagtaaacactccaatccccttttcatttgacgaacagcactctgagcaagttatgtacacgttgtttaattcaatgtggagtgaaagggcgttatgcttcttgtaacagactgggcacatcaggaacggcgtcttgcagttgggacatgcaaaaatttcatgaaagaatctgtctcccgtttccacagattcatctcttgtatgattcctgtgattcattcccagcggcggcaccatgaaattattcatagtcttcatgtgttctacgagctcttcgctaactagcgagtttgggttattttccagcgtatatgcaaacgggtgcttgcccttaactaggaaaatctgatatattgtcctgattgtgttttcgtcaaactccatatccttctttatcaagccgttttcatggtcattcttttcttcgtgtgagttcataagtgcatggctgatcttatcaaatgcgtctcctgagaagctcttctctcggtgaaatgcattcccgtcaagtccccaaacctcctcatgtagacattctgagaacatcgtcagtatggaatcgtttttttcaagccatgctttaaacttttgaaagttcagcgaccctgtttcgttgaattcgcattcctcaaatatgtggtcaaccaacatctccaggtccatcgtcgctctttccaagtcttcattctcttcatattcattaatgattgactttattaaaaacattgagtcctcttcgtttgttgcatagctattgacgtctgggaactcctcgtcgttccatgtatctatcatagagtttgagtcgtcacacttgctaaaatcgtcatccggctctgacgcctcaaacgatgacgagtcaaagttctccagatacaaatcatacttgttcggctggtactctgagacgttgttttgtttatctaaattcgtcagtgagtatgatcgttttgtcagtttggcattactcttcctatgatttggagttatgtagttaaaattctcgtagttatcactgcagtccttatagtaattatttatatacagggtcagtgattttgaatctaaattttattatttattatatttaaagtaccgaatgaaaagtctgtcagcgatctcgcgttgaaatcattcttgcgagttgtgtttctatgcactttagtagtcgaactcgtcgatgatgatgcggaaacgtcggtctcgacaggcttcttcagttctcctaaaacagatgaaattttcaaaaattactttcattgatgtgatataatttattagttggcgtatcgcggttggaattttctccatggttatcatttgatgagaaggaattgaggattctagaatttagcgtaaagttcctgtcaagtatctttaaatttcgattcctcgtgttaaatattgagtcagctaaagatattacatgaaatatgaacatacatttgtcaattgacgtgtacaaatattttgatatctgcggaaagtttgagagcatggtcatcagctcaaacttgtgaattaaattatcgttgttcaagtcaaataacttgaacagaacaaaaatcttctcggacctcgttcctctacatgaaacagatattccgagcaagaactcttccagttcaacggctccggagtctacagcttaataattgtaaataagacttacagttgcaatcgaactttctgaacaattgttctccccaaagccctggaaggttaaaatactgcaaaaaggtttctttatctataccatttgatgatgatctactggagagttctttataaattttataaagcatttcgatctcatttggatcgaattttttcagcctctcctttacgtatttattttttaaaccgtagtgggaggaaagtccagcacccatattacaacaattaaaaaactaaattaaaaataacatgataaaatacagtgtttaaattaaaacttttaaatccggttgaaatgaaacaatttgtgtttgtatgatatattacaattcaatagatttaatctatttattatataataaaatattgcgatatttcattataaatgaattataataaatcaaatgtattttgtaattatgattctcgtgttacactaataagttatagtgatattaattttttaattttaatttttcattttcaacacctaaaataatcataaatttttatttaattattattaattgtaatcaactaatttcattcgaatttatttctatttgtacatttcctaatatttttctattccttcacctcttttctttttttattttaatatataaaatattttaatttttgttatctaaattataaatttccactttatataatacctatcaaaactgttttcctaatgcatatgccgcacttgtccactttccttcatcttcacctttacttattatataatgaattttaatatatagtattttttatatttatatatattttatttaaattattatgaattatatcggagatgatcagacgcagtttataattacgaatatcctgaactcaagcaaggatgtcacgaaggatcacatattcgaccaattatacacgtatttatacggaatctccgataaaaactattttacgaggcttataaataatcaaaatggtatgaaatatataattaatacttaattgatctaataacgcctttagccaatttgggtttctgtacaaacaaatggttacaagattctgttgcaataaaatgctacgattgcgaatacgatagtacttgtgcagtttgctgtaagtttttttggtttataattttcttcagtggaatgcttctttaactcggaccatacctcccatgaatacagattaacgaggacttctggaggatgttgtggtatgtttttaaatattaaatattttatagactgtggagatgcaagttcatggaattttaaaggttcttgtaagaaccatacgcatttcgtcgacaacgacgaaagaactacactagcgtgttttacaaactcctttctggtcaaacttgagagcttgctgacccaaattatatactatataactgaatatttgaagaatattcacatcattgatgaatactcgcttcaaatactaatactatttttaaacgacttagtcaaggtcagctcatcatacaggtaatttgtttaacggttaaactttattagatttgcactgaacctgtgtctttccaaagaagttctcaaggattggattctgaagcatcaaattctgagtaatgacattcagaaggtgtgttagtttgcgtgataatgatggtttagtcattcaactctctgtacttgacacttttgacatcaatggcatttaagatgaagtttgcaacactatttgtaagtttaaaaataaataaaattatccataggcttctttgtatattgacatcgtccaaccattgaaggagatccccgacggtatgttaattatattcgtaacaattttatagaatggcatctgagtaatttatcggtccagctctttacatactcatcaatagcacatgagttatttaaaaactcgttcctgaactattgtattgagcccataatggacaaaaatctgctcgataagagattaaataagatacagttcactcggtttgataggaaaaaattcaggtaagaaaccatttaataaaattctttagtttgtacataaggattttgagtgatatcacatacctgtttaaccataactcagtatgtgatatagttctgtcggacacaaatatacaaagaaccatcctgagtctactggcgacccataaccaaatgaacctcattgaaagggaagagtatgaacacgtgtcttatgaaaattcaggtattgtatacactagcttaataaaattttagggtattctatagcattcacaattgaacacacaatacactcagcattaaagccactagcggattactgtaagaacttgccggaagagagaactgatcaaatacttaagttctacttggtcatgaatgattttatcgccagccaccttttaaacgagaaaaagcacactgataaattaactaggtcgtttcacatcccttttgtcaggttcttcacatacttggttgatttcaattttgtgaggaggtgtttgagatcgcacttgaacagatttgagaagaaagatgaatttttatcagaatacctagatatgcatttcccagaccttacggcagatgttactggggattgtggacttttgaacatgtttgacaacgacgtcctgatttacattttaaagagtgcaattgatgtgcttaagttctcaatggaaattaagcagaacctgtgggtctataacggagagtcaatgcacgaacagagaacaaattactatgaacttctatttgattcgtatgatatcagtgcaatccacatctgcgtgtgtctcttggccatgaaaaatatagggacggattttgacctgctatcaaaggtatttaacatttgcctgggaataaatgagaatttatacggaaataatccaatgaatgagggagatagcgacgaagaattaggtaaaggtgatagaaaatttttggaaaagggggtaactgaagttgacacctcaagatcaacaataatcccagaagatttagcagatggtgatatatcagaatcaacaagatcagaagaggatgaatcaaccacaagtgatgagccaggagatatgcagttcaagttatcgttcttcttcatgatcatgaacacgctaataaacgacataaagcatacagagatattatctgttccaaaaaagactatgaaggaagggtttgttaaaagaggactgcctttactgaaaatggatgtggtttatgcactagtttcgggaaatgcagagttcggaaaggttgtaaatgagactaagaaacattggaaacaccacccaatgcttattgaaacaattgagaatttggcatccctaaactactcaaaggtgtcagataagacatatgtgagattaaagccagagtcatataagatgattgatattctgtggaatccacagtatccaataacacactcggtatgtaaaaattcattaaaggaaaacataagcttacttggctcatgcagtgaagtcatgtcgagagagtataatgagactcaaaactttattttaaattcgatatcctgcactagcctcttccattacatttttgcattcatttcaaacatttgtaaaatagattttaatctgaaggaccagccgttttattcactcccagatttgtacactaaacattacacacatttaaatgaacacggaataaaaataataacctcaaatgacatgaaggagtatagcgagtgtatactatactccctaaagattttaaatttatttctcacaaaactaccccttccaacggttgaagttgggaaaatgatggtaaactcactagaactggtactcaagaatatggacgacgagatttataaaaagtgcctgtcatacacaatcctaaacttgaagaggatttacatgatagataacagcatttctgatttgttgtcagatggaattaggaaggatgttaagctgatacagaggcagatgctccagagacttagtagccaaaacacaatgttttcaaatgagattgatgaggatgaggaattgacaactgaaacaaatgaagatgacttaacatgtatactgtgtaagcaggttatggactctatgtcgaatatgtcgtacatgacattcgtctcaacaaacaatgttctgagaaggtgttgtacatcagttcagagtggtaagaactacaacgtatacgcaatgtcttcaatgccccttaaatcttcaataatgacaacctgcggtcacatagctcacacaaagtgtattaacgagcacaggaagatacagacggataaccacatcttctcaatgtatggaatacaaaagtccaaaaacgagtttttctgtccagtctgcaaatcactatgcaattatactcttaacataacaacaatagacagtgtgcggaaaagaagaggattatttagcaatgatactctgcaagtagttgacaagacattaagtccacactatcaaaatttcagcacaggatacctatcatcgatagacagatcggagccagaaaccccagagtacaccccgtatatgctaatatgtaagcagaatccagatataacatataattggtcgtggagatatccttacacaacaaattggataccctcgccagtgtacgcaagctacgaagaatatccactgtatgtgtatggacttacgacatttatggatagccttgacctcaactattacctttgctcagataacatgaacgtgcaagatgaacatgcactttcatataacatctcactgccaaatattgattgtgacacgtgttcagcccacgatttgacaacaattgataaaaacttgtgtggaggatttaaaaagagtgaaaatcagcttctaccaaaacttatattccacaaccttaataggctaaacaagattgacatgatctttgagtactttatgacgaacttggattgttatagagattgcagcattcacaaatacattacgatgaacggatccgggatgatttgtacagagttttttcccagagtcttgacttcatcctatgcaatatcactgttctcaaagaatagattatattttggaattcagaactggaaacacgtaaattcaacggttaagctggatcccaagttctgggtattttacaatgagattttgaatgtggcaactctgagaaagaataccctgaatatccaaaatccgttatactcacagcttattagaagttattactttaaagggctcaagagttcaacacactacgccttattatcggagagaaacatcctggagcataacatagtgctagatgaaacgtaccatgatgtgaagagtgagttcatatcaatcccacagtcatcgctgtattatgaaaagtcgttgtctgaccaaatcaacatgattagaatcttcatagaatcgctgagtgactcacacatgtatgagctttacgaaagtttgaacatgttcagctcaatgagcctgaatgagattaagcactacaatttcgaaagtgaaaagttctcatttttcgataaagttctgaacacaaaccatgacactagctggatcaagtcactgaaaccattgaagaaatactttgaacaggagaaggaaaactcgaatatttacaaacagatggacgggtcgccagttaaggacaagataaacatttataaaatgttcggaaatgaccttttggttaatccgtggtcctgtgacttcatgagagatttcctgttattcttcttttcaacgaagtattgcggaaaggaaactgtaatggaacatttgtactactatttgatggtgggaactgtccaggttatggatcggtttttgattgagattgttgagcaaaattacgttgaattcattgacaaaagcgcagaaactgataaaatctgtctagaaacgagaaataagagagatttcctgaaactgttcagccagaggttttttagagagttttatgaaaatgcagaattcccagtagatgttattagtaggctagatatcatagactttaatgagcatgttgataagttcagggcctataacggttacgtcagtagtgaatataaggaaccggattacaattatccaaacaaggagttcagagtatttaatgagatgctagaagagctgatttcatactcttcaatgttaaggacgattcactattctcacgtggagggatttacagagacgattccaaaactttcagaacagtcaccggagtatgattataaggatttcgacgattaccttgtaaatcaagtaactaagcttgtaaaggtaagagatatccagaataacctgaacaactactatgatatggacgcaataatagagactttgaaggagtatgtgcctcaaaaatcatgctccaagaggacacgaataggtagttttgaagatagagtgagcagtttagttgatgatatctttgttgacccagtaactccagaggagtcacatacgaactcagagtacctgtacagaggtgtagatttaccaagaagaattaacaagttattgtacaaaaatcacactaatacagcgtttttcgagacgctcaaacatcatattcccgactccatccacattttggacttttttgaaaatgacttttttaatgaggtttcaactttagagtttggtagctcattttttaacaccgttgaaacacttttcaaattagtcgtcgaataccttaaatctaaaggatacttaaagactacagagcatgatttatttcctaagtttaagcagacgttaatggagtctgtgaatctattcttggatgtttcattctggaccataaacagtatattcgcctacgaaaacgacttgaggaacaagctggtgtactctaacatgtataacgagtctactaggttcgcagcgacctttgaagcgttgggtttgcaggaattttgcacgccagaactcactaacaaagttgtgagaatgctgtttacagtcacttacaagaaccagatgagactgaacaggagctgtaacatggaagtaacacctccaatagttacaaactacacactgattaagatcgacaagtacctggatgagttgaattgggatataataaagtcaacatcctttagaaactgtgcaaactgtggtttaaaacctgcaaatccgctcatttgccttctttgtgggtcagttttatgttcaaattctgagtgctgccagaaggttaaaatctcagacctcaccagattcatctcagaccttgacaagaagagctcagagttcaagaagagtgacgtctcaaaggtttatcacgaggagattctagcgcactcaaatttatgtggaggtggccagtgcgtctacttctcaccctactactgcttcgttctttacgtagatgagagacgcaggtgtgtagtacaatcactttactctgataagtacggtaatagtgaccttcacggcaaagtttacggaaccgttcgactttcacaaaccagaattgagaatattgtcaacaccttgtgttctggacgcctttctaatgaaattgttgctcaaagaaaactcatgctaaactccttcaactaattttttcaacactatacttaatagtatggagtattatttgtgtgttatttattatcacaatgtgcttattaaatacaaatcatttataatatatttactgtgataattttattaaaatgttgttgattaggtatagattttatctattagtgaataaaaggtttgtattgactgaaaagcctcccaaggagcttaggctgtcattccagcaaccagcacctaagcactgtataggattccgaggtactttcccctaaaataatcaagttcaggcaaccatcaacatggaaaaaaattatatgaccaggtgtatcctacatccaaggtatttttagtaataacctaataattcttaagattccttcggttatggtcccaaggtatcctcttgactggagaaatgctggaagatttattttaacctgcggtttagctagaattgaaggtaaaagactctatcgtcatccacattcgctaaattaccaagattcctctcactgtggtccgaggtgtgcaaacgtctgctcatcttcacactataaatgcctttgttctatgagatctgatgagtcgcatcttcacatctcacacattgactccatgttaatgtcttacaagggtcctgttactacaaataaacctattttctccgttatgaatcaagttgccaagaaaaacgaaactcaatctcacaaattaagcatcgatgactcttctaaatcttataggattattaaacgcacttatagatactccgcttttcaagatcgtgataataaacccacttctattcatcataatttggtttcccatatgaaccgctttaacattttcaatgttatgtctccgtaacaccaattatttaaatatattttaatgtttttaagaatttatgtagtttttgtacttttttatatatctttttcattatacaattatttaacgtttgttataatatctaatatacttattatacagtatgtatatttcctaatgtatactaaaatgtttatacactcaacgtatataactcatattatacattatataatatagtttatggtagtatattaacaatttccttcaatttgttttagaatttaatattctttttaaaaatagttcaattttgatataatacttccttaaccttagcgtctacagatgcggctattctcctcacaacatcaaattcatcatccacaagttcaccaagtaccggcattacattcttaatcgtaggcgttaaatgaacgcctaattcctcccaaatgtgatccatcaacgccaaacacccaatctttgtgttaagtgacttagtggccaattgttcagacaaacatgattcaatctttattatctacacagttattagtgttgtatgtagtagtagggtgatgatagtgtgtgtagcaaaatgaataacgattatttaataaactaagcaattggaatacagtaaattaccttttcgtcttgagttatgaaaccgttaattaggtgtgtgattgctctttgtatcgagtctagtaattcagacgtaacgttatgaacctccacatccccattaattggcaagcaattcagaattgaaatgtgatttttaacaattttacaccacgaattcaagagcacatctggaactgagcctaaaaactttaatgaataaaagaaatacctcgattaatgttccatgtgtctattgatttctcaactacttccaataacagtttggagttaataaaccatgttaagcagttttcaaaggttatttcgtagaaattcttgcttttcttcaggtcaattacctggtctaaatttctacggtttattattgcttcatttaaaagacactctgacaactgctcaaagtgttgtgagagtcttgttgatatcaggttggttgcaccgtatttaccatactcagttattgctgttagtgtgactagcaagaagttcctgtttccaacatctttttgcattattaacgactcctcaacttcatccccaatatcgtcttcaaaatcattatgacatattttactgtgtttttccaacaggtcaactagttcgtttgaggatgtcaggctaaagtagtttagagcaaatgacagaaacgagtcttcaaacgtccaaaccaactcagattcacggttgtcgtagaataatcctgacgagagtttacctgaatttgccaggttgtcacttattgatttattctgagacgtgttatacacgcataaatcggcgttaaatccaaatataacctcgtatgtcagcttattataataccttacgcagataaagtaaatgtttttgaggtcatcattgtagtctttcttaggcttaacataccttatattcagcgataacacttttaacaaccttgaaactctaatcatcagttctctaatatcatcttgcttttccctaatactggaaaataactttatcagcatctttacgttaatcgactgacttgtatagtgtgttatttgtgccattagaacttccttcttcagcaacttcaggcttactttatctgtgttttccaatgctttcaaacagtcatctatgtgtagtcccacgaattcgttctccacgtcactcttactcacggtgctatcatctatcatctctaccactcccgtgttttctttagatctatattccaacactaactccatgcagaactcgtaaaattctctcttcaacgacactttgaaatactttagcaatagataacacagcagcaaaatcattatttggacaaagtcagaatccacaactgagtcgaaaattagtgccctgcttatcttcgttatcttttcacatattctgataactttatcatggtcatagttatcactgattccttttcccaacccactcttgctagcaattgctattatcaacttcaacgcgtatgctgtatcgaggcacgcccaatttaacggtatatcctccagatgatctaactccagtgtatctaaagactctccgagaacatctatgaaatggtccactgaactgggcgtgttgtttatgaagtaaatccaaacttcgtttctgaagtacgtgatatccttgaacaaatcctcatcttcattcaattcgtaaacctcagtagatactctgaacagttcaaacaaaactttgcatgtcattgtgttaacctgttccaactccttctcatacttaaatctcagcgaatttccctataaaaattatgaattcacatgaacttaccttttcattcacttgatcatgtttcttatttgttagccacaacatgtttgtgataacataaatgtcccacttaaacatgaatacattatcagaatatctctcattcatcattgttgatagtggttcatctgacacaatagttttttctaatccattcccatatatacactttaatatttcatatacatgtaaattgtaccctcccacagagttaatcctaaaacatcattaaaattatctcaaattacctgaaaatgtgaagtatcaaattagttatcatttcatacgattcactaatgttatttataggggtttcggtgttgttgtttctgacagtttcactaatcttatgttttggattatcttgtatctcataatagtgcttgtagtataccattgttgataacagtgagtacaaaaagtggttaattttcataaataattgagccttagatgattgtttggtaaacaatgaaaggtctacctcaattttaaacatgtccgggtaaaacaaatctgaaattattaatctaaacagttctgtagaaacttgttctgacaattggcttgatttgtttttacctttaaagtccaaaatctggtaccctctaactttatctaacttaacctcgtttttgtgtgtcgaatcgagcatcttcaagttaataaaaatcagatttgataatatgctaaaatactggtcagatttattaaccattttcaatattttatcatattttgatgaagtattggattcttctctttttaatgtggatgtatatacatatgtgtatatcaggtatgatgtatatactgttgaaaccaatttatcatacattcctttatctagactcagcaattcctctattaaacttagtgtattatctccaaaaataagaatattattaactgctgatgtaactgtatttctcactgcttcttccaaatcgccgttattttttaccgtcagtctgacatcacacacaataagggtgtgaaagagtttatttataaatttcacagaatcaactcccaaaagtgttattgatttattaataaatgagcaaactgaatggtaaaaactcatgtaatccttcttaacctcatctgaacccgtttcaacaattttatgcatcctatcaagaagttgcttaaggaacctcacaatgttattaaacagtacattcacttcatttacatctgactcagttttatcatttaaatattcatcctcacagtcatctaaatccatgtgctcagtattaatactatctggtgattttgagaatccacaatctttagttatctcattatcttcgcatgtgataataccaagtattccatctacaaaaatatcttttcctaacttatttggacgtgagttatcaaattgcttatccaaacttttgtttacataattcttaaatacatcgtcgtgacaagaggaatcgtgggttaagttagagtagtgttccaataatgtgtttgtatgtgtaaatacaaatgcctgtgaatttttatctgtaaaatccattgaaattatgaattggttaacgatcttgcaaagcaatgtcaacttcatatttgatcccaagattgatgacagtagaatgtgtatcataatctcgtaagactttaatgtttttaaattcccagccaaatatgtaaccacactgtctctaaatcttagttcaagtaagtgtttaaagaactcgaaaatgcaaagatcatctgactctttaaatgtaaaaagccactcataggcgtggtttatgtactttgcctttgaatatgtgctcagttgaacaaatgaactgtatatagaatctctaagttcttctgaaagcttccagaatatacctgttttaaactcattcaatactactaagcacgtgtcatctgcttgatttcccaaatatttaactatattgtgggaattgccagagtgttttgttgggagttcgcctaatttcaactccatcttcttatatcttgttaccattctcattgagaaattataaaaagctcccagctcaacttcaccctcactaattccctttgtctgtagaaacactgttgaaaatgataaaaattctgataatttatacaataacgtgtttaatgataaatgttttccaagtataaagcccactagtaaagattctactattgatccaaattggcacaagatcggtgttagaaaagatattggtattccagattcatctatcagccttatcaccttatctacatacacagtgttaaacatacactttgaccctgatgtgaaaaagttagtcatgaacagcttgaataacttctcatccatcactatatcactctcaatctctgcaatcaagttaacttcatatccatttgcactcacatcctggtttctcacatcagttactaattttgcaaggtcatattttaaatcaacttctatactgtattttttctcatcacccaatccaaacccatttacagaacacattgtctttctcaatttatcttgctcgatctttttaaccttacactttttactcaattcgtaaatgagtttagaaaattggacggcgtgctcggttgatggtgtatatatgaaatccagcgaatttattagcaaatccaaaaacagctctcctgaacttgactctttggaaacttgatcaaacagtttaagcacaaaattgcatccgtttcccaacactaatccattattatcatcaaataattctactctgaattgttcattatctgggtactgattttcatactcgacacaattctttgagagaaactgcagaacaacactatccttcaacaatttattgtattctaaattagtgaaataatattcaaatcttgcaggggacaatattctcaccttcacctcaccactttctttataaaataccactttaaaatcgttgtgtttagagaattttgtgcatattctgaacaattcaaacacatacggataatagtattcatacaaactacttaaacccgttttttcctttttattcctatcgaacatcgattttttaaactccttatacaatttttgatcagttagtataatctgaagtcgtttagctgttacaattggactcaatttactgtgcaattgacataatctagattcatatttatgaaaaattagtctataaacttcataaatgaagcctttaatactctcacatacatctgcattttttgcatattttagtaataaatccatcatcaacaccatttgtgtgtattcaacttcagatccttcctttatcacctgttctatagttttaattagataaaatactgcacaaaacgggctaaataggccattgacttgttcgactcccacatcaatactgtatgatgcatcaatattcttagcaatattcttcatcattctcataagcttattgtttatagttaccaaatcttcatctatcatatgaaaattagtgccattatcaaagccaaaatcaactttgaaaatgttgttgtaattttgtgaatttttaatgcgttgagatgtagacttaataaaagtaatgaatggactaattttttcacttacaatactctttgaagattcatcagcctttgaatatatttttaaaaacagctcaaggtttttaaataaatcctcaagtagcttcttattttccatcaaatgctgagcatattcttcaaagattaaggaatcgatatcgccagattctgcttcatttccacacaaaatgacatgatgtttgtaattattatccatatcatctataatggttttgatattgtggagaattgagttgagtgaaaatattgatggtactgagccgagaaacctttcattggagtaaagttttgaaaagaggtcggggtgtttggttattcgctgcaaaaagcttgagaggtagtaattaaattctggcagtgatttcctaatttcatatgtgtatactaggaaatctatgaacgaatttagttttgactcttgatctaacctctttaaattcatttcctcaaacattgcaagatacaaatgcatactgttcaacttggaggctttgattggcgtgaaattttccattttattggcatgtctgttgtacagtattatgagtattgagtagagatcgttcgattttctatgataaatgtagagtaccacttctatatttttccttaggtcatcatattccaatcccatcaagtattccaacaatgttgcctcaagtgtgtttggtgataaactccttagtatctctattgaatggccaagtaatagaatggctgccttgtgcttaatttcagggtttaatgagaactcgagcccatctatcctaaaatttatcattgactggttgcgggatttaatcatcgaattgactttattcaactcataaactatttttaacactatctgcttaatgcaattttggtcaaatgtttctttaacaaactgaaggaaatttttaatatcacatattattatattattataatctgttgtctgtaggttttgttcaatttcttctgacttcttgttcaaataatgtgtaattagtgagtggaagagtaagtttgtgaaaatgctgaaatccaacgctttctgtgattccttaatatccacaaaaacctctctaactgacttcttatacacactttgcaacagaggaattgttatttcacttggaagtttctccagcggttgagtctggttatgcaacataaacacgatcaccagtataaagctcttgaatgtcaaaatataatcttcaggaatagtatccattgagttaattttattaagtattagcctgcaggcatttatcatttccttctgaactgagatgtgtaactgcactgcggagaatatcgatatcatagaacacatttgacagtttaaatattctacgttttcaactatttgtagtcctcccatggtcatgttaatgatgtacctcaattcattatcttgaagtgatggtccattcgtgattatatattgagcattcacaaagttataaaatgaaaccgtgttaatattagcatttgataatctcgatagtttattataaactgaggatatctctttatacaaagtatatgattttgcaatctctgaaataaccagatttaacgttacatatttactctcagtgaaatccagtgttacatcctttattctttggtatagagaataaaacccgcttttattctcaattgttaatagtgaaaataatttacagaaataaggtgagttgtaatattgtatatatgctgcgattaattgctctgtgaatgttgaatcaatctcatacctgaaaatgagataatctattaaaatctgcgtgttttcattcaagaagtattgtacagtgtgctcaataaatgatgctatcaacttattcagctctgataactcttcagatgtcatgaactcaacatctttagattctctgaatatatcaatattattatttgggttcttatcagaaatggataaagataaagatgacaatccatacaaggaatctgagaacaaagattcatattgttcaaaatcttcatcaagagataggagacaataatatgactttgatacgttgcacgtgttccatggtaattttgatctgtattcagatcggaatcttctgagtgttttgttcttaacatctctataagatgcgagttgttcagaaagtgacggcatttaaatctttaatgtagtaataaattcatattataagctgaattaacagtagttttattttataataatattatagtttagatccttgttaataaatttacaaatcttatgtataattggaagataacacattattgaggttattacaaataatatacaagattctttatttaaataatttacaaatcaattttaagtgttaaaaatagaaaaataataaataaatattttcttccataagtgaaattattacccacatcatatacattttcgcattaattattttgtatattttttcattcttttgatatgattcatatcaatgaatgatgttgatattaactttttagaaaaattacataaatcatacaattctgctgaatctaaacagaaatctgattatctctcaaattcctatttttcaacatcaatttttaaacactttgattactgcccaaattatctacttatcgtatcaccaaataaattttttaaggggtgtttaaactctccggcactctttactcttgtaaatcagcagtttacttcacataatttgggcataacgttaaaatataaactacttgttaccataaaatgtgagtatattgatactagtggcactctatcatgttattatttcaatgtgtcacttgatacacctaactccaccttccattatgtcaaccatttatcagtaaaccttaatggatctgttttactcctttactctgacacatattgtttcatagctaacactccttatgaattatctgaatataacgttgttaatgatggtaattctagaaaggtttactttaaaaatgttatacagggtcaacagatactttaccaacaatctgtttctgattctctcctaaaagtagttaaagctatttggaaccctttacattcaaacagttttgtaatcgcaacaaatgaattagtatccgaagatgctgaaaatagtgacgaaaatgatgctgaaagtgatacagaaaataatagtagtgaacctaaagaaagaaagttttactcttttttaagagtttttaacctggatcacagtattgataggcctgaatataatattaaggtttctgaacaaatgtgcagactcggatatgatggcgaaactgatatatcagagaagtttcaaactaaatttggagtttttgtagacttattttggaactgtaatgacacttcaacttttggatcgtatactatatttgttctctcaaactacgggtatgtgttctgttactgtcccatttcaataaaccagatttgcgatatgactaaaaacataccaattgtaagaaaaacacttaaacttatcgaggagggatttacatataaatttgataatttaacaaactccatctcagatgacggtgattcttcaaattttgagaagaattttgaacttgttagaaaaattaatgactctctgttctcaaacatttctgatttaacattttatccaattattataagattggtatcaactgaatatatacctgattgcaaattcgcatactcatatcctacataccagtcactattagtcctttccactgacccgtttgtaattttagcatcgcattcaaattcaaagctgttggtatttgagccaaacatccaacttcatccctcaaattcaattttctataataaaaacactctattcaatgtaaataactgtaaagtatcacactcactgagtttcgactctgaagaccccttttactttcaatacatttcaaagtctgatttcatatattactctagaaaagagtcctatcacatcaattttacagataaacttagttttaagacttttatacatacaatcaatgccgatcaaaatgtgtcattttcaccaccggttcttgttaaatccaccgtagacgattttgagcttcttgaaacaaacaacccatttcacatcattgtcgcacataaatactgttgtgatgagtcttcaaactctccagtatttgacttatttctcgtttacaaactatgtcagttttctaaacccaatgggccaactaagttgaaagaaacatcactttgctcattatcacttggttctgccagtaaaactcctctaactattgtaaaaccaaacacggatttatttgataaaatcaggaacactaggaatatggttaacaggtacaagtcaatatttgagtctttgagaaggtctaacgaatccacagacttaaacgaggtatgttaatattcattagttaatatttttagaaggcaattgatatcatgaagaacatttcaaggcttcattcggaggttgttgcaaatctagattcagctcacatttacgaacaagcagttgaggagtatgtaaagaggaacgaacaggcctcgttgcttatagagaatcacttcagggaaaccatagaactctatcacacaatcttcaatgatgttaatgacagaatagagaatataatcaagactagagagtacatagcaaccagaagggcggagttgaaaaagatgcttgatttgtatgatagcgtcaagggcatggacaactctctggactacttctcaaacatgattactgagctttaccttaggttctcaaggataattctcactaaacttgacgaaaatttggctaaatctgattactcatcaacttttgagatgaagaagcagttcatgataggttagttaaatcctaataactttcctcagacgagtggttccgaaacaccttcaaggagaacgttgacctcatgcaccgtatatttaacagaatcaagactattagagccgtgattgattcaataaattagatttttaaaacacaactattaactctatactatatactatatacactatgtaccatatgtgtataatgtatattatggatagtatacatacaaaggtatatagaatgtgtataagtatagtataaaaaagcataacttatgcaagagaacaattataacattcaattattgtttagaaaacacaattttaaggttttattcagacttttgtattccttttttagagtagcaattgtacaaaagagtccatgcaacaagcatgtgagagatcacgagaaaggttgacgaaaacagcatctgaagaatatattaaattgaaccaaacctcgttgaatgatgaatatcccaggaactcctgcctgtatccactaaaaagccagaaaaacttgaacacaaacagtgaagcaacggacaaaagaaagtaccgcatgttattgaaggttaggttaattttactcaggactagtgggattaggcaaatccaccagaggaagtgctgcgatgttaggactttgttgagtgagacgaaggaaatcgtctgaaaaatgataaaacataaaacataccatcataaatagtgaaagtgtcagatcaacgaatgccagaagagagaagagtaaaaagcaaaaaacttgaggcacaaacgatacaaacagattcaactaaaaatatttacagttaaccaatataatttaatttatataattaatcaatcttacattcatgtttgtgtcaacaatatagtacatgagattgaaatatatggaaaagttatgcctgtggtctttcctcaggtagtggtaaaggtaagactcgtatatggattcaaatccataactgaaattacattaatgttatgttagtgatggacttacaagtagtatgttaagtatgtgaaaaacgcaaatgatagaaagcttaaaatggcaaatttaatttgtttcatgtttatgttagtgattaggagtaaggggagtcttcttagaaatttacccttgtttgagtattccgattttaacctaatgagctacgagattagaaggtaacaaaccaatttatcggaatataaatgaaaaacaaatggtacagcgtaaattacagggtacagtttaaagtgaaccgacaacccaaacctaaaatttaataataaaatcatcaaacaatataataattaaactaaacatatttgtgtttaaacttacaggagagctgatgtagagatatgcccctttttaagaaagtaaactgatgaaagaataatcagacagataatggtatcagcattgcctctggaagatatgacgattacaaaagggttaagaagccagagtgccgaaagtagataacgcttaaggtcagatgttgcactgagagttttctcaattacaagtccgacaagcaaatctgatgctgaaaacaacaatttaccaaaatcgttaaaaaggaaatggttaaaaaccatcaaataagatctaaacattgatataatagatatggatttggtattataaggagatgtggaactaacagaatgggagtgtagcgatatgtgtgtctatcataaggtgattttccacccaaaacaagcctagaggcatcagaaaagaccaaatagtcaatgtcagtatactttacatcaactaaattcaaaattatcaaaacgacaatgtgtaataataatttactaattaagtaaaataaataagaatttaaattaaaaaataaaaaaattataaatcataaatagagtaaatataaaaatacagttaaggttatggaagctcgaatatgcgatcaaagctaaacgaatcaagatagaagaatagtaaataaaggacctaaggctcttagggttattagaaattttgcgataataacgaacaaatatagtttcgttcatttatagagaaaaattaagaaaaattatgaaaatgcatgaatattttaatgtgtaaaacgacacaaaatataaagttaggaatcaaactaaaataacaattatcagtaatttaaaacaaatgaaatttagaataggaatcaattaatagaaataaaatttagaatagatttaaatgactaaagtggataaatagtggattaataaactcgaaggtgtacttcgagaagaatgataatggaataaaaagttaacaaaatattatgagaaattaaaatgaatatattttaaactaattaaatggaaaattgaataataaaataataataaacaatggttggtgattaacgacacattttattcaaaattgatagcagacaatataataagtcggtgtttgaatatatgccaagaatacttttaaaaaatacgtttatgaccttttgttgacttgaaaacgtatttatgaggaaataatacatggtttgtttgttatggggaagaatgaataaaattattcatctttttttatcacctgtgttttaatttcattcatacacgattcaatcatgactatgaatgtgtgtttcataaatggttgtatatccattattattaatataatattaaaattttaggattatagtgttctatctacacaatgtccatcgaaacaactgtctaaccttgacaaagaacctattggtctttttatttaagattaatattgatatttgtcaaaaatatcacaccatattaatattaatctacaccactccaagtttcctgactttatatttaaactattatggaacattctttttccaacggaaacagaagtgtttacgcaggagacctcatatcatcagaacctcagataaattttaacattaacagactctatgaagaagaaggatacacagccgcaacgctgaacctaaattgcgatgtccctgaactcaactgtgttgacagattctctacaattttactctcaaaatctgagcttgaccaacagtatgaaagaccatccaaactgaaggaattcaatgggtgtctgtctcgtacctcgtcgtttgaaccactggaacgcgttgatgacatgtccaatgttacgtttttcagggacttaaaacactattttacgaattctctaattgccaaattgaagaaattagtaaatcacctctacaaaaacgacgttgctcattacactgtccacaacgactacatcgttctcacaacaaatgagtttagggacagagccctattcattttaaagtacctttcctcatcagaaaccaacattgttcatttgttaggggagcttagaaactgttacaaggtcatagaaacaagcgcaatcccaagtattggctcaattttgcactcaaatggttactgtaagccctgcgtgtttgcgaacaagaagacgaactactgcaaaacagggtttggctgtaacttctgtcattacaaccacaaactctcaaagtccaagggcacaacaaaaacctatgcaaaactgtccacagatagtgactttttcaagaagttaatcagaagtccaaggagccccgagtcatccaccttaatctcaactacccctgaagattcgttttcagtagtaagctcaatagggtcactgagcataagtgaccacaagtccaggaatgattttagctctcaacttttaacatactcacactccgactcattaactcacgaaaacggcaaggcaaatggttttttagaaacccgctccttaatatgatcaacactcattttaaaaaattttaatcgaattttacgatgatatttgaaaaaacatgatttaatttttaaaaaagaattaagaaacgcataaatgatgatttgaaattgcaaatgtgttatgagaacattgtttcatgattcatagactaatcttctctctgatatgcgtttctacagtccaaaatagtttaatataaagaaaagaaatttaaagtcacatgaaaatcataaatttgaaggccaaaaccataatttcttaatctcataacattttatataaaacacattatctacaattttattatttttcactatttcaatgctattaaccatatcaatgttattttataaataaatattttaaatttagcctttaaagtattttcttgatttttgtaaaattgtaagtataatatataatttatcgccttataactatatacacattgagtattataataaataatcttaattttaaatttcaaaataataaatatgtaaaataaaaataaatatgaatttttaaaaaaatttaatgccatgtttcgtcgtggtagaagcaatgatcgcaacgaggaagaagaacccagtaaccgactaagccacctcctactattcctaattctatgcataacgttcctcctatacttcggatacaacgatttgccgtcgaagcaggaacccccagtggtaaaacaaatattaataattttacacatttagataaacaagattcgtgccaatgccgacgactcatcgatttcctatcataataaaacatacctgcattcttcctttacactcccacagatatcgctcagactactaaatgaaataaccattcacgtggagtcatcaacactggaaaatgtgtttgaagaccatgtgttatcctggaagtacatggaaaactcaagaatacactttagagtctttgaaaacacatacgggttaatatcaatttcagcccatagagactcctcagttccaaatgactccgcaggtaagtttatatacttcggactagtcagagctaatcgcaacatatgtgagtccatcccttcaaattcctggacttgccagaaagatcatgaccagtttaacaactcttttgattcaaaatattgcttactcgtgcttaagtctaacagacttaatgatatactacagtatacacatgactttctctcagactacaaattacacaaatcaggtactaaaatttacgtctataacaactgcatagtaataaatatttacaaagttataactattctatacagttataactattctatacagttataaatattctctacagttacaagtatataatttgtgttgtagatatgatggtgggaatgttttgcgggaatgctgtgatttcaaggactgcaaactcggaaaatgaactctatttcataaatttcaatagagaaagtgattatagatcgtcgccatttttcgtgtgtaaattctcaacgctgttaactgatgtaattgagtgctttaatactgaagtcacgtctgctaatctgagcctgccactaacacttatacatgaccctactacagatgttctcgtaacagcaaattataaccctgagaataaaaacctcaatattcttacgtttaactctagcagattgtcatttaaagctgcatatagatcgatacctgctccaagtggtaagtttaaacatgattacagttgtttaggatggcttataagcatcggtaaaagctctaaaggaagggtgtttttcgcaggtatggataagcatggaaatatttaatgttttaggcgatgcggcaccgtacgaaatactaggaatttacgacgttggaaactcgaggcatgaatatcataatttatacttgtaaaaccaacataaattgtacaaatatgtcaaaactaaacccacaactaatgtttttaaaaattatttttgtaaaattattattttgttttatttttaacactatatattgtgtttttataagatttacagctatattactgatatcttattgaagtggtagattccagaatttttggtgtatttttagtgatttttcataattttaatcaaatatgattatctttagtattttttctgttttaaatagatgaatttaaattccggtgtttttggtcacacaatctctccatttgtaatatacaaatacggatttaacgaagattccaactcttctgaacaaagtaactaatatattttatctttatattcattttttgtttagattgtgaacactcctctagttctgatgataaaactgaagaaaaggatattttaaacgaagatagttcaaatatcaatgaatccaacccctctaataatgaaaataatacttcttataatgaaaataataattcagttgataatattaactcagaagattctattagtcttgataaggtgtctctcggtgactatgaatcttcgcctgagaatgctgagaaatccttatcatcttcagactttggtccagagcctgataatcccaacttatcaagttctacaacgtcaaatgatacaaatacgaatgctgaagaggaagaaaacgagcctaaaattgacctgagctactacaaagaatacgcgaggaagatgaatatgatgcgcaaagacgatgttgcatacactagattcctcaatgaagttaatatgaatgaggtaaagagccttttatacggaacctggcgtccggaagatagcgagaagatgtggttagagattacaggcccagagcgtgatacgaatataatattccacgacaaccaggttatcacagaagaggaattaatacagtcgaaagacgagccgtgggtgattttatcctgtgatcacatgtacgaatttgtaatgtatgacgtggataatcgcaatttaaatgataaattcaaatataatactaaatatgtactcttatttggaggagcaagtattaaagaaaatggatttagtcagtactatgttaatatgtacgcatttctccatggtaccattaactataattacataaaattattatttccttaacatatcattttaggtttaaagaatgttgttgtcagtgatgacctgtattacttagacgcccagagttttacaggaaattgggagttattaaaaactaataatacgccagaaccacgtgcttttcatgcctcatgtgttatgtatgtagcacttgatacccctattcttcttgtttgcggtggttttacacacaataaactacttctggacacacacttgcatgttttaaacttaaccacagaacctcttacttggactatttttcagacttcaggacccagtccacctaaaagatttggacactcgatggctcaagttggcaactatgttgtaatttttggaggctgtaacggatcatttttacttaacgacttgtgggctttgaatgttaactgtggcacattcttagttcctgggaaaataagctcaaactcctggatggaaataccgtttagaggccttacaccctcaccaagagcattccactcgacgtgtaaaacagggatttcatccacggcaccgatggtattatttatatttatgttataaaaattttagattatctttggagggttaactaaacaaatatcgccaagaactaggctttatgcacttcactctgtcctagacgattaccttacatgggtaataatcatgaatgcttatgatttttcagagtattttaccagtctacgttagatgcccctacgaattcagaacatttcactgtaacatttacacattattacagttaaattagtttatagatagttaaataagttatcaagtaacataattaattagcgatggcatttgtaagcaattctattgtaataactggtggtgatgattttaaacacgacaatgtaaggaatataaagtcagtttgctacacactcgaaacaaaggcgtttcgatacattgaagatgtcgttaatctggtactactaatattactattactattacattagtattacaacacaccatcaatagttttaataatgttaaaattagtctggtcatcaatcatggagtgcatatggaatgttatatcactttggagggataaggaatgaagggggcaagttttcttatgaagactcaatttcaatttcaaaccctctgagtaagttattaaacgttaactttgaattagcgtactgcgacgactctaatgttgacgaggtctacttaaagtatatacagtacgcctcaatggttctaaatggcgctaatataaatgttgattcaagcaaagtaccaaaaaccagtgccactaccgatatcaaggctcaaggttcagagcaaatacaatcctccgattctatagaaggaaaagatgatgttaatgtagttgaaggtgagctgggtccaacgtctacaaatgagaaatgtgataaagaaacacctgtaggtcaatctccagatggagataaacaagtaactgaatacaacatggaaactggaaaaacagtaaaagacgaaccagtggctaatactcaatcattacatccaacgggggctgtagtacattctaggcctaggcgttcagcagctataaagtgcctatctgcaattgaagaggaccatttaaggcataaggagagagaaaaggaaaaatctgagaaggaataattttaaaaataaattatagagtttggatgactaaattagttggaaggtttatcatttcatataaaatatgtattagtaattgatgttgtaatttttataaaatattttacacaatattgaaatgttaattacacaatggatagtgatttattatacaatgtgagtgtgcttgtattttacaattacttcaatggtttatatagtttgtactgttattctttccatctttttaggcatgctgtgcagacaaaaaactgagtcattggctcatcagctgatcgcgtttgaatactcatgaagtaggcttccttgttattacaggcaggacaaacagctaaaagataaaattaaaattaaatttaaaagcaaaaaatacctggaatccttggagcatgtttaaattcattggcttcaaatagagttttaccagcctccttcacattagtacaaacggtctccttgtggtagtcctttgttaccgggaggttatatgtacaccttaaacaggaaaatgaagatttattttcgggtttttgctcaaaatataaaatactgtgacataatggacaaaataacgacatttatgaacaagaaatgaacgtattccataaacttaggattcttacaaatttaaaataaaaattatatattacaacaaattaatcattaaaataattcttacaacctcgccttctgattactttgattgaatctttcattctttttgatctgattttcgacaatgtgtggttgcgttcataaaccatattcgtgttaatattgaacttagacttgcttctgatatctgaaactaccttcctaaacgctgacaaattagtgtttagtgttttcctgtaattctttagtgcactctttacaaatggtttcgccctaatttcgggcataatatcctccatgataaactgctgcgatttccttattgatagaatcttcaaacactctttaacttgatccagaggtaaaactgaccttctatccataaaacttgtcaatgactccatcttcggttgactccactgtagcttatagttgtcagtaactgacgggtttaggaacatgttataggcttctctatttgggaaatcagggctaaaggtccaattaactctgtaatttatatgtgctattttataagatttcctaatagggcattcatccgctactgcactctttaaattacagtcattagttgcccagtccctaaagtcgtagagatcatcaaacgttggatatgctttaataacttccagggcattaacaattcctatgcctttaaccccggttgtgtagtcacatccacaaatgattgctattaacgccagctgttttctcccaatccccaactctctcctgatcctatccagagtatacagctcaaacaccttatcgttgtagaaattcttcaacagacactttgctccaaacaccagggagtccgagtcgtctgagatcactgcgtaacacttcccactcctgttcatgtatgcacactgagactcagcctctgatggagccactatgtatggcactccaaagtgttctagcaacttgtgaacatcatcgtaatatgggtttttatgagttactgatactgattgtggctgtgtatactcatgaccaactagctttgaactctctgtaacatactcatcatcttcagattcactcacatcctcatcaacttccttttcctctgtaggcttaatctccaatactttatcctctattttaggttctaaatctttatcatcttttagctgtaaatctttaaaatatttactgtaaacagctaaaaaataattattgtgtgatttgtccataactttagaatctgatttgattttctcaggtgagcttgttatatcaattggcgataaattattttgaacacgtttaactggagttttatgttctgaagcgttaaaatcaacttgtttaatggaattttgtgaaggttctgaggattttacgttaatctcatccatcagttccttaccaaaaatatcatcgtcagtttcaaataacgtcttgtcaacgagttccttaggcttatagttaaagcattcaatttcttcatttggctctgttttaattgaatagtcaaattctgaatcaagattattcattacttttcggtcaaaatatacgttatagttacagatatcaagaccaagctttgtgttgtaactatagcctatatttgcttcagttggaagttgttctatgtttagcatatccttagtcacttctgccttaaaactttcaatttcattattaattttaacgcctctaatgtaagatttgatctggtagctcgaatactcgtcaatatcgtccttaagccttatcgattcgtccctgtcgtcctggataaatctatctctaacgtcattcatgaggacgtatttagacttatttgataaggattcagcgttcttaatcgctaaaatctcatgttcatagttagagtcaccacccaagcctagtttactgtaatagtctgaagtgtcatttgagaagagaactgatttaggcgtaagatccgaagaatcatctggaaaaagttctaagagttcatcatagtttggaatggtttccttttctgcgttttcatcggttaaatagaggtcaaacccattttttaccgaatctgtgtcgggattaagatcctcatcaacacgaacgtcggaggaaaccacgtgcacagaatcaggaacagaagcattattaccaccaaaaataattttgggaggttcagaaggaagtctagcttcatcaggggtgcttggtttattatgcctggtcgagtttttcatttgtagggcaaggagcttatatgcgagcaatttgtgatttgtttcgcatttttctctggctatttttcgcctaagaagagtcttcattttagcaaatggagaacagccgtcaaacacgaaaacgggcttaattcccctgtctagaaggtaacaaatccttaagaagaacacagcaactatatctcctccatgcctcatgttagattctgaggctaggcagtggctgatccaaaaacttccatcaattgcgcaaaccttaccaaatagagactctactctcaacggcaaagctgttgctgataaaagatcccataaattgtgtactcccatcgtttataaatgtgtattactgctgagaatttgtgatattcttagatgcttctgaaacagcctgcgatagtattgtgtgagcctcgtacctgaaaaatcgtgtaaaaatattcctatatattacttacattctatccatgcactttgcgatgcaaatctgctcgtttttatttaatttatcgtcgaattttgatgggaaacacttgttaaaacatactttcttcacttgctaaattacataattagttagaatgcttactaaaatacatacctcattgagcatagtaagaactagaaggtttagcgctgtatttaaatcagcttgcggagctgttgtatctgacatattataaatattgatatattattacgataaatatatgctatgaataaatattgaaggtaagaatgtataaaactaccccagcttttataaatagaaagaatttataataaaattacataagaattacttatctttaaaatatttaaattatatgtaatttgattcaaactcgttaatcaatgaatgttaattaatcatatgtgtgatgaatcaaagaatcctattcataaatttaaataaaataaacaacataaaataagttattttaaaaatatgaaatatttatttctaataattttatttaacaattatactactttggcttcaggttttattttacaattttattatacacactattcatttactattttttgtacatttgtatatgggtgttactcgttccaaccactctctaacaaatcagaataatttatcaactttaactctaaatttacttgacgaaatcatctctgttttctcactaaattgtatttctccatggagtcacgatgctactcatgaaaataatctaggcttaattccttcatctcaatttgttaacgtctcaaggcaaattggactcacatataccccttccgagtctaggtccattaataaggagcttaagctaaaaggcattgactttattgacgtggatacgtttgttcagcttgtagataataagattaggctcgatagtgacatcaaatcaaaagtccctgaatttacttctgttgaggactttttgggccccaaactggatgaatgttatacaattttagactggcaaaaatctggtaaacttccctcttctgatctaaaacatatgctttcgtgctttgacaacggtcaatttgactcctccaagcttaacacattatttaaaagtgctggtctcaccagcaaaaggattattagcaaggatgacttcaggcgtatgttcatgcccatcagtgatacttcatttttctcagtcagacttttcgatgaaactaaatcatcttaatacactgtactataatatgtgtgtaacctaattaacatggaaaatactgatactttacaagggtcaaatcccaacgttctcaagaggttgcctcgaagtcagaaaaagcgtctaaagagggagaagaaacgtttagctcgcagactaaagaggccagaagtaaaaaagaggaggaaatcaattatgcgttccgagcgtgaaaacctattatcatcactttctccaggtatattttacatcattccttacatttgtaatgttatttatggtctattatcagatgaacgggagttatacataactaatctgagaagaacaaattatgagaaggcagtcgaactgaacaattttcttgaaaagtcatacaaagagggccttcctatttgcatagattgtagttttggagaggacatgaattcaaaggtactattaatcatagtaataatactccaggaaatcaggagccttgctaaacaaatatcactttgctacaacctaatcaagaaatataaaatacctgtgagaacataaacaatttatttttatacattttcagataaggctaacgttgacgagtttttcacaatcttcatctatttatgaagattgccagcttttcggttttaataactggaaggtttgtatcaactggtaatatttattacaataggtgcacgttcatgattgtggattttgggaactttttgataaggataagattattgttctctctccggatgccactgaggtaaaatattctcaaccttataagttcagtgtttggaggaattgtcaaatgataaggtttatgttattggaggactggtcgacactaacgttaaaaaggtattaaaccataattctaattacattctgaatattcagaacaagctattgaacaaggcgatttctcataatatcagtgccaaatgccttccaatcaaggttagaaatgttgcagtataaacttgtagaaatatgttccaaattgcaagaaaacagtcctaaatgtgtcaacagtttttgaaattctttgcttaaggcttagtagcttctcttgggaagaatcccttactaagtgtttgccatcaagatctctttaataatatcagtataatatatattctaaatatcttgtacaatttcccacacaatgaaaccaacggcaatctgtataatgtaaaattgtagcgataaatttacgtgtaatgtgttaaatgataatttgatatatattagtttttaaatatgtataaaacggcctatttgttcagttcaattatccatatacctaatagtcttgaagaagagtctgaaacctcgaataaaaaggatgaatcagactcaaataaagaaaaaaacgatgttgatgatgaaaataataatacaggtaattaataacttcaatcatattatatattaattcctaatgcccgatgtagatggtccaattcgcactcatccaggaaataaggtttcatactgtgtacactgtaaagggaaaacatttttaaatcaagagtcagtggataaacatctaagtagtaaggtactaatttaagcagtgtattagagcgattattgttataaaagcacatacggttttatacataaattacttagaatcatctaaaaaacgtgaagaaaactaaaaagaataacgagaaggcggaagaggcaagaaagagattcatcgaaaggatggataagatcgataaaaggatatggaaacacatgaaattgtgctaatatatagtgtaagattccacggtacacgttagatttattaatgaaatcagtataattgcacagtaaattttacttatatttaatttggagtataagtgatgtgtaagatttaaataaataaatccatatttaaataagattccccatatgaaatacaatagaatgtggaattcgtcgttaattatgaataattgattacattcgcaagttttcctgatttaatttattttctattattatttgttcgtgggtattacttacacatctctcgttttgtacttggatttagctcgaatttcgtttacacacttaatgcgatcttcgattacacattgtgtcattttagtttaatttttaatttattttgcaatataaggttttgtaaatattatggattgctaaaatgtgttttgatgactgatttgtcactgaattccacctaaagttccgaatgtacggattcaatacttaattgagatttatggaatttgctttcgtctgaaatggaaacagttccaagtgtgtgtgaatttactgaattagattccagcgagaatacaaagctggaggagttggacgagggaataaacgactttaacctcaatgacttttacaagtgtgtaaagttaaaccaactcaagaaatcaagaagtgagaattcacttcttaacaataactcttcaggtactactgaaaacggtaaatgtgatgtcgaagactctcttaacggacaatgcggcatcacagatgaaatgtcaaagaacatgctatcatacaagcgtagcagactgctaagtaaaatcggtgggtataaggcactctactcggacaaaatgggcattgtggagtaccttctacattcttatgtaattctattttgccctaacccagtcactctctacagttatgaagcagttttcaagaacatgagtccaggtattgtattgctagatattccattattcttccacaacgtatttacactaaataatttttattagattccgacgagttttggaacaccttgagaactctcactagtgtacagttagacgttgacaactacccgaaccagctaccatgctacatatcactcctgctggaagagtctgacggaactcatcaattccaaagcttaaacaacgccgacgcaaagaaactcgacactcacttcacatggctttgcaggtgctgcataaatgtaacaggaagcaaaaacgaggattataacgaggaatcattatcggattctgttgacaagagatactctgacgtgtgtgagagtaaggggaacaggaaaaaatcgccaggaagccatcttactcttaacaacgttcttaatgacaactatgacttatcctcggatgtcctttacgaggcaattaggcagaggggaaacaggtacctacaaagaagtctgtacagtaacgttaaaaacatggctggtttaacctcgagaggaattaaccctaatgtggctgctaagctaacggagtctgacagtcgcatgaagaggtttatggacatcattcaggagtcttcgcttgattcttcagacccttcactctacaacaattattacgatttatttggagatgagaggcgacactcgtcaagaagatcaatgctaatgagaaagaaatattcctgaaactacggcagcttggaagcttttaaattaatgtgtattttattatttatttgtctcgattatttcatcagtggggactgagaagaaatttcttcctatttcacctgcacatttcatttatacttattcattcattctttgtttattatattaatttcagtatgacataaattcactggaatcaatgaaatacattacaagttattgttaatttatggaaatgaaaaaatgcaggaagaaatcgaaacgtaaacggtctaaattaaacttaacaactcagaaaatttctaatgacataaataaaatatttaaatcaacattcaactacaaatcggataatattttttattctaactgcgattgtggatgctctcggtctcttaaatcaattcaatctattcttattaaaaattactttacaaataagtatctatggattcggtattctggagtttccttaaaaagtatctcagaacttacagatttttcatgtattatatcaagtaatggatttaatgagcttaagtttgactcactcgacctcaactttgttaaatcagatatttcaagacaaccttgggttgtaaataaaaaattacgagatttggcagtgaattcaatttacacattttgtatatataataatgttccatattggcagggcctacatgacatcgcttcggcattggtccacctcgatccaacccctactgttggtgagctttcagctattcttgagcacttgattaagacatacgctcctcttctgtttttacctactactgatgatattaacaaaagggctaatgagctttgtcaaatttggatgcttttgtttaagtacttctttccgaagtttgtcgatagttttgaacgagtatgtgatagcccattttgtgttggatggtttattacacttggtttttacaggtttgggtgtgcatatatttcattagcctacacatttctgctctttatatcaaattctgaaccactttcagcgtttatttttcgagagctaggctatgttgcaaccagaggttacattaacttccttctaaaaaatgcagtttctgtcgacttttctaactctgtaattttcaataactactccacctctaaccttattattagtactgttttaaactctaataagatccatttggagcccgaagagttcattaatgtttcaaggaatctttacgactcaataggagaacgagaaattgaattgtcagaattcccactcttatacatttttaacgcagcgaatatattatcatcttcatcacctaatccaattacaattgacccgtcacgcccatttgttgaagttgtgcactctgatgtgtttggattatcaaaccagaactattacatgtttgacgcgcaagttaatccgacgcaatactactatgattactcttcaactaggaaggattctattgataataaatatgttcctataaaaaataagattagacatacaagaactacaaggctacatcggaggattagttttatcttattcacgaaaattagtgaggttgtaaattatgagcttttgtattgttatcttgaatcactttcaaggatgtcaaacctttaccaccataattctgtttccaaaattacccaaaatcagaagataaagcgtaacgagtttgaaatcggttcaatcctaaacccaagcctagtttataacataattgattctagaagccattacctgactacaggaatcccgttatcaaaaatatttggtgaatatagaactaatttcatgactaaagttagtgttgatgatgaggctgagagttcatttttggacaccaactttacagtttggatagttttgacagatgaaggctacgaagcaactgaggatcaatattctttgcagtctctaaggaatggtgttgaaattatggataatctggttagaaactcaatcacgtgcgtaagtattctgagtggtgggtataaaggactactcaaggctcttaattctccgatacctccgattccatcattactttcgagattaagcgttaggatgttattaccatgggatactcagagtggtccaatgcttggtccatctaaaactggtggcttaaaaccaacatccccatctatgtcagcagctaaaaatctctataatctcgcaagttctgttgttagttcagctattgacatagaaaacaggatagttcagggcatttcggaagtcaagttattcaataggtttaagcattcaagaccaagttttccagaatatgaatctcacactattaccaagcagttccaagacatacaaatatctaaatcgccttcaaacacacattatggagatattctaagtatttataatcgcacaagcattgttaaccagttgatttcatgttgtttatattccataaagttgattacacctaatggattatctgtaacaataaggtcaaatggcacactaaagctaaatggaactatcattcacccattaaggtattcaaatgcagtatttgataaaaacataaacacattgatttcaatctctacctttctaactgtaaactgcgtagataagtttatggacactgaatcactttcctatgattcatacaagtctaacagtagtctttccccattattgaagactacaagagagaagtttctgagtaaattcatggttttattcacacaatctactggatttaatagctctagaagactatttcacgtgaatttatcacctagatattttaataagttagagtttactaccaatgtgggtgggttgatttcaaacgtcagggttccaggcattaagaggttgtggagaatttacctagttgacaggcagacatttttaagtcatttgttggttccgtcgcttacatttgatcttggaattttggaggaagagaatgttggatctgattcatcaattacagaatgtgaacgtaacaacacattcccccaacatgatactgatctgtctaaatcatcacccactcatgattcaaattttcataggtttcaagatgttagaaacattaaggtgttttctagaactaaccagtacaaatcagcttcatcaattggctcaaaccagtcttttaattcatctaggattgagacccgagtgtacgtttcaaacagtatccaaatgccctttaaacctaatgcaaacgtttttgtatctagaagctcactaaatcgtcgtaatagttcaaggcagaactaattgtaacatattttgtgtgtatttttaactaattttaattttgtaatataatgtatatgctatagtgtatatacacattagtaaacccaacatacgatacaaatgtatataatatagtaaaacactatacataaacaaatatacaatgtataaaataataaattgattttaaggagttaaattccttaaaactctgtgaattcttaaaaatttatagagagacaaagctgttatggagaaacctataaggaaccattgtaatgcgtagttaaagtgtgtgccagggtcagcataaaaaagtaggtaatcactcttttgttttctctgaaatttgaatctataaggtccaggacgatcaatgtgtggattagagttatatttagaggttaaaatggtattatttaggagccttttgagaaaactgtcatttgaagtagcaccactgtccacgtcaagggatggtttatcatcatcgaaatatgagtcatatacactaagtatgtatttttttgtaatatcaggatactttgaaaataactcagcacctattgactcaggatccatgtatctgtatacttttctagagtcctcacaagttaggttggaaggcctattgatggactcagttaagcctagtttgtaaccagttagaccatgtattaggttttctattagagatagtgttttatattttattgaaggtattaaattttccgtaatttcaccagataccaatacacctctcacagtgacccattctgacccaatattattatcaaataactcatcagaattaagccatcccatattaacaagaatagctgaaccatcattaaatctaagtggatacagaacattaaatccaaattcctttccatgctcatgaactagtgattttctaggtccaactaaaaactgttgtttagtatcaaggactccgtgtgcttctacaaccctatagaataatccatcaaggccatcgtcatggtttctagaatgatcaataatgtcagaaagtgagtttatgataattttaggtgagttaagtgctttttctctgaaagctataatctgttccttccatttctttcgattcagctgccaaaatcccaagtaaatgcaaactgatgtgcataaaagccatgtaacaaccaaagttagtgtttcaccctttctgattccatattcactgaaataaacagtggatttcactggagaagtaacttctttatgaagatcaacgagtttaattacaacgctgttttctaaatcaaagggtctggtgggaataggtttagaatcgaggaataatttaatctccctgggggttggcttataaagccattggtccttagtgcactttataacatcagaatcatcaaatgttacaatgttttcctgggttttcttaaccaattcatctttttttttaatattttttatcttagcagagtatgaacgtgtgtatgaagtggaataaataaaagggtggaatctattttttatagaagaagcgtttaaggaaattctactgactaatagtttgttgaagataacaacagtcatgttatcaaacaacaatgcgatatcaggaatccagttaaaatgtttcaaagtcagtaaggtcgtttaaaattcttcaaataattgttaatcatatgcgaagtcttgtggaaaagatcacttttctaaaaataataattaaaatgaatactaaaataccaaaagattgttcgtaagccagcgttcaaagttaggaacggaattccttgaaagaagatttacaaatttaaataatcgattcatattaataaaaaatgaggaaaattattagaagtcgtatggaataaataatatatctgtgaatgttgtaaatataatgtagtgacaggtgtatgtgagaattgtttttaatgagaattttgatcgcattttcccctctttcataatttattattttttcacattttaattcataaatttataatatattaatttaaacacgctcattattttatcctttctttttttcaattgttttaatttcaatttcaattttaattaaagatgttatccctctaaatgtactataacctttctgaaaatgctttctgcctctgacagcgggtctgactctaacttttcctccataaatcgttattcttttgatccatctcgagactatcttgatcgtaagttttataagatctttaaatcatgagtctaggatacaatttctctccaaactcagaagattctaaatatactgcaaactcaaatggaatttcaggtattttacacacattttatgttgttgtgtcatccatctattatattattttacactacaatctgttcactatctatatttaattttaggtgaatcttcggaatgtcattcagtatcagcagatgactctgatgcgcaagatttgaattctgaaaatgaacgtcaacgagatccgatggcgcagacgactgatcttttgactacctcatttgatattcccgaatttgaccgtgatattttggaaggagaatgttattctgaaaacctgtttggagatggaaatcgacacacctataatgataattcacctgtttctagttaccgagttacctctgataccagagatgactgtgaaattgtggatatagttagggcaaatccccgcggaaacataattgacttagttaccttggatgaatcaaacagttcaatcgaacgtcgaaattctcattcaacccctattcttgttgaagactctaataccaatgaagcttcaagttcctctagttccagtggtcctgcatcaagtgatgatgtgacagttatacaaagctcttccccaaatagtaaccgaagagtgaagcgaaagagtgacgactgtattatgggaccgattcggtgggttgataagaggcaggctcaattccccttcgattacatgtcaaaccgacacatttcaaaagcttataaattttttgacactgacagttcttgggattctaagatcattgaagacttggaatttttgttcaaatgtcctatttgctactctacaattaccagattcagatcagggaaggtccctaatgaaaatgataaggttatttattccaccaagtgtggccacttattctgctttgaatgcattgaacgtgtaaagtcacgtcgggaatgttcaatttgtcgtaaatcgctcagggaacgaaacccttgccacgttgtgttcccttaacccatacatgtccacatcttatatttaaacacgttggataaataacaaaaactgtatactaacaatatggcccaaattaagaaatttaatttgattttaaaattttacacatctaaccattaatactcttcagttgagctttttaagtttatattaaacttctcaaaagggaatccgagttttttaaggtccatttctactaccttaagttcctaaacaaattatttgatcgtgaattgcatttatttagtaaattacctttacaagatgctgataagcacctttagagttatcaaattcccaaacaccctttaaaatattatatagcgaatacaatccaaacattaaaagtgataagaaaacagcctaaatttaaaatttaatttatgatattttaaagtacaagtaaaaaaagtttaagggcgtgtttatgtttaaatctgtataaatataggcagaatccgacacaaacagcagagactgataagattatctttccagaggagcattgacaatcttcgtccatatataaatttaaatttgaaatataaaataaattttaaaatgttagaattgttaaaaatattttacaattacaggtcatagttcccactgaagtatgccgaggcatcatacgttttacacatgatttgccttccattaaaccaccttgtgtttagtgctcttacagcattatcggcatctaaatatcattattaggaaatacaaataccctcaggcgtgttgaatactacaaaaactgatagagtatcattatttgcagaaaagtgtaagtaaacagaagttacagtcccatatttattacactcaaccttgacctaaaaagaattttaaatggattactaacctcattagctaaattctcatcagcgagtttaggatccaccatgttatagattacaatcacgttagatgtgccaaccactgatgactccggtgccaaagtgacttgtatcttagatccagcgatttcaaatccattcattgtggagcaaacagtttgtgccacatttgcacttacaaagtctatataacccagagcgaaaaacgctccgggtaacatttctcgtgaatataaaacgcattctgtaatgtttccaaacggctcaaatattcttctgatatctgatgccgccagttcaaatggtacattctctaaaacaactcttttaccattcagttccggtggtgttgccccaattgtgaatgatggagtcgatgccgatatttttgtcagcacattatctacaaagtaattgaggcagtatttatttgttagtatataaattgtaactcacttgtatcaactctgactcctgaccggttttgtaaaaaggttgctgcagccacagctcctgctgccagagggttagagagtggattattatatccaatgggacaaattcctgtgcaattaaattaatatacaattacaaatttgataatttattattaaagtacccgatgaggatccagatgatgaaatgtttgggcgagctagtttaataggttttccctttatgtgaaatccctgcatagaatttagtgcaaggtctgctgattcctttttcctatattcaacaaagcaaaagcccttaaccttattagtatcaggttccgttggtagatcaatgtttaaaatatcaccaaatgatgagaagatctaactcataatgaattatattttgattatatagtttacttagaaacataccactcgtatatcttcaattgtacaactaggatccaattgacctatgtatatcttgtagcttttctgaggttcttctggtgcttttgactgctcaggctttttattatttatcagggatttcgtatcacaaagttcaggacttatacttgatactggagttaagctatcccacgaagattgtttcttattaatagatttaaagtcggtgctatatgcctttctggtagattctgtggtcaaggacgaactagctgttttcctctcagagtcactagcctctgagtagtgccgtttatctctagagtatgagtgtttgtccctatctctgtcataatctctatcataatctctatcataatccctacctctgcttctggttcttgatctatgtctatgacggctacgatagtggcttctacttctactcctcttcttatacttatgctcgtatctatctgaatccctcttatgatgacgacttgatctataatcatcataagacccatcacgggaatagctacgtcggtagtgagacattattaaaatataaaatgtggtacttgaaggaaggaatcttcttgattattgttgatggaatatcaaggaaatgttgatatgctgtgttaaaataataaatcaagaatgtgtgaaaacatgaaaaaataaaattaaaataatttaaaataaatatcaacaattaaatttaattattaataaagaattcaaggaaaatatttccccataacaataaagaaaataactaattaaattaaaataattaattttcaaattaatttatataaggcaaaatattgttgttaatttcagaaacaggggttctatatttaaatcacactactaatggtcgtttgattactatgtttattatatattatctttttaaatcgttataattttcgttcaatctattaaatttatcaattaaaatgaaattatttttataacaattcaagttaatttttatggatatcagccagatttatacaacattttcataatatgattatatatgttttttaaaagttttatatagtttaaatttattatacattatttatttcatcatttgaatctcttattaattgtttaattataaaaaaatgtttatgtgtaactaacttttgtttgttcataaatcttcttctctaccacacaacgacgttgttttcaaatatcatataattaatttattaaatatcatatttgtttaaatgtacataataattaatttgtttttacatttcaattcagtaggaatcttaacttgggtatactaaaacataatgttcaataaacgttgatcattttaaaataaatataaaataatgtcggatttaaccttcattcgctcaatcatatcactctgtaggcaatctctcagtggagataagctctcaattaaatcagccgatgatcagatgtcattgctggttaaacctgattcttcagaaacagatcttaagattgtactaatatttaagatcatcttagcccctcaagctatatcttcaattgagaatacacttacgggtattttatactgctttaattttacttttagatgatgatttatctgggcttaagtatgcaactgccgatgttcagctttggtctgcgatatttataaagaactacattaaggctaattttgacacctcagaatcattcggaggagtgagtgaatctataaagaatataatcaagtcattcctgataatttcaacactgaacagtgaaaggttaggaataccaaaggctgtggcatcacaactggaaagtgccctgttcttaatttcagatcgttacttcccagaatcaatggaacatgtactattattcatagattattgtcatttaagtgatgtgaaccatctggtcctattagaaactctgtcaaatcgggtgcaaaatgagcttaattccaggagtaacaaaaacttactaacacctactggtggacttacaagctctttgaataaccctctgacagacgcacattcaaatttggaaataaactacgcccagtacctgttagcacatttgaagaattattctaacctactacagtcagtagtttcatataacaagattcttacgacaaacaacgttgttgacatcagcagatcatattttgagttttttaacaccttagtggagggagttaaaatcatgtgtaatttatccaaaggagttgggctaaaggacttagaaatgagcaaattcttacagtcaacatcttttttgttctcgcaaagcacactaacgacacatacaacaaacccactaactaagtcaaacgatgttacatgcagtccaggtgattcacttttctacttcgacgatcgcaaacaatttaaagatataaacttgttccagtctgcattaaatttacctgaactaggaggaaaccaacacaacgttcacctattaatatcgccatctctgttcttgaatgaaatgtcgtataataagagctatttcaagacaaaactgtcatcattcagactgttttcaaagtttatgaaaaagtataaaaccaggcagtacgatgaggatactcttacagagcttaagatcgttttaactctggccgatacacatctgttgtatttgttcaagtattcaatgctaaagttcacagagtactacacgttctacacatctcagaaaaactcgttctcactcaactgcttagtcccagtgatccttgacctatttgagtttatcaggcacgttacaaagatattctgctacgttcactcaatagatctgccggagtgcttcgaggataacgcccagctttacttcagtgggttaatcaacctcatccacttcaacgaccagtttataacagaacatgatactctaggtaaaataagaatatattgtattctataaatagtattatagtttttgtaactatagtatatgaatttgtaggaacattgatgagcctaaaagtggtgataatgaagctattcaggtattacgcagaacgataccaggaagtattccacccatttgtgtttacgtgtatcgaggatgttgttaaattatgtcgagggattagccaagattcaacctacgataagctgtgctgctctgcacttgacttcctgtcatcttcgtcatcaactcactggagagcttctcaccagggttctgccagaaacaacccgtttatgaataactcgttcctggctgagatcatccagaacatcattgtgccaaatatcggattcagagaatgcgacttgattctactggatgactgtcccatagagtttgtccagagagagctggattctaacaactgttcaagcagacgtttctcatcaatcaccttcctaaagaagctagtttcaggatacggccaagtttgccaacaaataataaaccaggtggccaaaactgtggcttcaaataatgattataagctaaaggaactgtatcttcagctcatcatttgtattaactttaaggtaacttagttaattcacatacttatttaacaaaatattaatttacaaacttattttacaataaaattgcttaaaattaatatttatttaggactcgtctggtgatttcaacgttatcacgtactttactgattatttgaagaatgagtttgttgtgttatcacagaatccgctgactcgagaaaaaatgctcatcattttggccatcataaagtatatatacacgtttaagaatttgttgcctgagtctgagctagcaaccgttgtaccatatcttgttttatatctgcgaaattcacacgaagcagttcgttcgttctcagccgaggctatatacagacttttgggaaaattaagattacataaagatacgctaaaaacatgtttactccaggttcttaatatagcattataaacatagtttattgacaaaacttaattcatgtttaggggttggaacatctgttgacaatgatgcgtggttgtggaagagcgggaaatgagttttacgcaaagtgtactatgaggatacttatatatttgagagaggatatcagagaaagcgggatggtgatgatagatatcataatcagtctaataaaatcggtttctgataatccagtcaacccgtcatataaccacctcctctttgagtgcctttgtatattactgagaattcatcttcaaacacagtcttacacagtttcaacaactctcgagaagattgaggaggctttgatccctactctaggcttgattattcagcaggaaatgcatccattcattccatacagcttacaggtattagcaagttcatatatacatacacatatttataaatatatttaaatgtattattatttaggtgttgagtataatgttgaagtatgcaagcaagccctcgacaacatatgtacaacttttgagtcatctagtgtgtattgatacatggaaagtttcaatcgtaagtgaaataaacattcgatttcgtttataatttgatatatatatacatttataaatttgtaaatgtatttttaggcgaatgcacagggcaatataaagcttctggtgtgctattttgagaaacatacgttatttgagaatgaaatcatgacaaacatggagaagatactgaatatattccacttctgccttaaccacaggagactgtcaaggtattcgttggacttgatcaacgggattgtgagatacttgccacttaactactacatcaacttcctaaagtcgattgtaaccgttcttctaacgtacattcacaacaacaagagcggagagacgttgactgacgtcgtcacctcgatatcgtacataacgctacagctacacatgcaaaagtacgcacactcactggtggaaattctagagtcgatacagtctggaataagtgtaaacttcatcaggcttatatacctgccaaatgcaaagaaggcaagctccttggaggcaaagaaggtacacgccatagcagtggcgaagatagcaacgtcagatcagatgaaggcaaattctgaactttttaggctaatgatggagtttttggcggagctaatctcgggggaaaacatgactctggattcaccaaaggaggacctgctaacaatagggagcgtgagtgaactgggtaacctgtgcaacatggataacataaactacggcgatttcaacttcgacgtcagctacgtcaagctgcactcagtggaggaggataagaacaagttactggatagaagcctgagagtcgaggagatcatcagaggaattctcacacaagtcggaccgctcctaaaggcttcagcttcaatgtcgaacactgtcaacgttctaatgcaatttatcgcatgaaaacatcttgtacattttgtgtaagtaatatagtttcatatttgaaaataaatacatgatcacgggaaattcatctacacaactaatctatgagttgaaattcaataaaaattaaaataaatatattcgctaaaattggaattagctaaatttgttgttaaagttgtatgaaagtacatttacgttgatttttttgtgtactagtggggtctggaaactaaataaaataaatttcaaagatatcttgtttttaactttataaattatatcgtagaccttccatcaattgtcgaagtgttgagtagtttaatatttattagtttgtatatctgtacttatcgggtgttcatttcgtcactatacaacttgctacataaagtcgtcaacaaagccacctaaaaaccagttttacgactttaataatagtaaaattatataataatttgttgtttgggtctctttccccaaaatgatgtttattataaattggtaagccgtttgcagataaacctataccacataaattctctaaattgatctaaacgtatgattttaggattaagaaaacactccagtcgctcggtttgttaaataaagatgcccgtattgtgtttctcggtcttgacaacgcaggaaagactactttgctccgtatgctaaaggacaatagggttggaatccacactccaacactccaccctcactctgagcaactcagcttagagaaagttaacattacagcatttgacttaggaggtcacgagactgctaggagagtatggaagcagtactgtggtaatgttgacgggatcgtctttatagtcgacgctagtgataggtcgcgctttcaggaaaccaatgaagagctgaggtctcttcttgcagacgaagaacttttaaacaagccttttgtggttcttggaaacaaaattgataatcgcggagctgcctcagaagaggagctgagaacggctctgagtctctacgcaaatgatacttatgggaaatgtgttaaatcaggcagaggaaggcctgtagaactttttatgtgcagtattattaaaaagcagggttacgcggaagccttaaagtggctatctcattttcttcacgacgccaaataattttaatctttttatgtaacaatcctcttcatttgttatacaaattaatttagtaaaaattcattacaatttttactcattacacaagataactttttcttacaccatgaattaaaacactagttttaatattataatgtagttacgatggacatagataaagatgaacgatcgccaaataaaattgaaaatagactttataaaaatgcaattagtggaatcatgttaaacaagaataaatatggtaatttggaaccctttaatttataaaccttcagattctacaaccaaactatcaagttcagatccattgtgagtattctttatgaataaattataattcagctacaaacctaaaaaactaggtttaatttcacgccttattggtaaatcaagggcatcttcctctaaattgggattatctgacaggttagcagctaaaataataatttattcaggtggagtcatgataaatacgagactcttgtatcttatactcctggatcaatgatttatgtgagaaatcttcctccaaacaccacttctgaccaattaaagagctttttcaacagtgttggaacagtttgcacagtcaaggttcaaaattgaggttgataaaattgttcagattgaaaggggaggtcttttaagcgcctttgttggctttgtaggcacagattctgctcaaaaggcagttgaaaacttccataaatctgagatgaatggaagaaccataaaggtgtcattgtctgacacgggtattaaaattgatgattttaatttattaattaggtaaaaaacaaaggaattcaaccaactctgaaggtcgtgtatctatttttgatcgtatgggataattatgaactattaaaatttaatcaatttattactttttatcaaacattttagatataaattccttctgtttcctcttatgctccttaagcatttccatagggtcagtatcatcgacactcctcttaagtatcggatgttttacctatgagaaatatgaatgtttaggatgctggtttagataaatataaatatatatgtggtaaatccttacagggattgatttatctccattttcagttatccatgaactcaatatctcttctacaacagggattgatggtatttcactgggttcctcagcaacttctacagatagaaattcatcagatgggcaatcagttctgtgttcaacctcgttgttttgatgattatgattgtttaatccaatatttgactggagtaataacatatctccaaaacaatttgcaattcccctctcaattaaaatcgattcctcatttttcaacttttcagttaacatgttacaaattgtgtagatggttgatgcgtcctctgacaaatcatgattgacgacatctttagatgattcatttattggctttgaaagagctgaacaagaacatgtttcaaaatcatttataaatgggttatcaatctctaattcgtattcataatcaagtgtattgtcaagtgggttccaaacatctttccaattaaaattatcctttccatataaacttaaatactttgacctaaaatttgaattaataattattgaaggtttaaatacttaagtatgttgagttaacttacagtgacattattgatccatcatcatagtctttagggtaattaagtgaaagtatacccttcaaaatggcctaaaattttgttaaaaagaaattttaaagttaaaatattcaatgattaagtgatttctatgattaaatttaccttcgagtcaaatttgtttaccttaaaatcatcaagataggtaggatttattaaaagattggagtagtgtttttggtctccaaatcgttgttcctgtattcgtataaaccagtcacttatgtttactcctacaaaatcgttgtacatattcccaatttcagttttattgattgtgaaagacttgaatccatcagagcataattcatctggtagtggtatgcctccagatttcttaactctaatattaaaaccacttaagagagaatttggatcgtggaacccaatttcatcttttccattctcattaatagttaatgtagttttatttaggatgatttttctattatcaaggtccatacataaaagtctcccagaagtggtatatgccaagcataacttaatggagttagaattgaagtttagaattgatagacccaagtaaccgtggaaaatgttcgtcatagcactctcatttgtactgtgaattggcaggtcaaagtattctttttgtgtttgtatggaaggaccatatgctgggaaatcaccatcctcttgtgattgatcaacatttaagaaattcatatacttagctctgttaaatactaaaagagtgtcatgattcatatcaacttggtcgaaatctttataggaatacttatgtttgggattcattgagtagctatcaaatgaggagctaatttgtatttcaattctaattggaatctttaatctccatgagaaaacgaacagagtagattcaggcccactacaactccacttaatactacgtattctagaacccataaaatcggttgatgggagtgggatgtcaagaagaggtgtgtttggtattctcaaatccaaaatcaaaactgagttactagtaccataaacagctgctagtataaaattgtattctggatgcacttcgcatgctgtaaatgattcccaaaatgagggctttgatcttctccagtaatttgaaaaggatgataaatgaccacttaattgattcctaaaattactcgtatggttttgtacatcatattttctctcagtccactttccactcgttactgttatggttgatttaggtttcaaaatcaaatccgaaaaatcattcgatcgtttatcaaaaagataaagcctgtttccaccaagaattaaactattattatccattccgtaggacactgtttgcattatatcattttcctctttaacataattaccaagtgaaattgttgaagtttcatgtcccatattaccatcataaagaagtaaattattaccagtggtaagaaaaacagattcttcaggcatatatggtgaaattgacatgtaataaaccttctcttcaggtgtgtatgatacattattgagtgtttttaccctccatccgtcatcatagtaatagcggaaaacaaatattccaagtgagtttctagcatatacagtggatgaaaataaactcttgttatcagcttttaattcgagtatatctaattcattcatcacagtgttatatgtaagatttaaaggttcgttgccagaactactaacgtcactatcagaatcgcaattatggtattctctatatgtattggatttaatggttaatccatcccacgatgactctattttgtgagttatatcagtttgtttatatggatccatgagataatcactgtttcttttatgatatgtgaaaaaacatgaaggataaatagttaaactttcattgaccttgagttttatatctgatcctactagttctggaacaagctctaaacctttaattcctgcattttgtactcctgaaggcatgaacactaagtaactattatcgctatatcctttaaattcacctccatcaacaaaatcctcattaaaattgttatatttatctttattagaattatataaacagacggtatccatggaattaacaacctcaagttgcaataacttgaaaaggttagattttggtacggatatatttccatacttcgatatattacaatgtgtataattagattcttcatatgggattgtgtagatgttatttttgatattgcctgagttagtgtggaagtattgtatccttctagatgtatgattccctgcacatttgtaaataacccttggaacatttaatttagagttatgagtgtcatttttagagtatattttggtaccatcgtttaaggaatctgagaaagagtatggaaatatttaaaaattacctggaattgagaaaatgacttctttattatatgatgaaggtttaggctcagatctctgaactgatatattggaacaggatccatcaataacctggtttaaaatattattatcggatgtattaagcctcttgtttccaaaatcattttcaagaagaaatttataaaatgactccgaatatgagctccaattagccattaaaaaataatatacataataaaatgttaaaaaattattaaaatttaaatttaaataaaaatggcgaaggcgccagatatgcagttaaaaattataaattaaaaacattggtctcaggaatgtcgtaatctgaaaggcaatcttcttcaggtttaccgttcaaattctctgaatatatggaaggttgaaatgagggtgtgtagtcagacttgtcgaaggcatccgagcgtgtgcatgttacacatgagatgaataggatgcgttgctgttttttatccaggaaaaaataattaaatgagttgattgcagtctcagagttaaacggatcatcctctccacaactgtcgaaggtatatatctcaacatccttgatgtgaacaacatcctaatatacaatatttattgttatataaacgtatatattatataaaaataccctaatagtttgccagaactcatctgcgaaattagggaaacgccgtgaaaccacaaacgatatgttgtagtaaatggtgttaacgactgtgtcgaagttgttaactttcttaaaatatgattcgtccaagttactaaattttatttttagaatacagcatggtacctaaaatcgtaatcttggaagcacttgtttaaaatggccttgaaataggtggtaaagtcgtgtgccacggccttgtttaaaaattcggaaggatcatgttttaaattttcatcggacctgaagcgtattcaaaataaaataagagtatactttgaatacgaaacgagttcaaaattggtgtcgaagtaacgatctggagcatccaaacattgaaatattgagtttattctgcttaatccagagtgttctaaaaatatcattttaagttgacctatatatgtccttcattgtttttaaattaatggactgaactttaaaataataaattaatattaaaatagtataaaatgataaatattaaaaattaaagttcattaatccattaattatataaataagatttaataaaacattaaaaggacaattttgaaaataaaaaatgaatggaatttgtgtatggtgtttatttacttgtgaatggttcaatttggttttatagtgatatttaatattttattttagttcacaactaaatatttccatttcaaaagttcatatataatagttattttatttattttaattttgtgtattatttttgaaatattcgaacaataatatcttgtgattgaaatcatgtattcctctataattatattgtcaaaatccccttcatttcaagtttaatgtattatataagacaatacaagtggcttattagatatcgcaaactttatttcttaacgaagactaaagcatattctccaaaaccgttggattctactaaaaatgagattacaaaaccaagtgaatcgccttcttctaaccaggaatttataagtcctctttacactcaaaagcctgggatgtttgctaaacctggagttctttttaaagatgataaaacgagtagattcaggacttacaaactatactttttctccttcgtttcattcattgtaatagtttcaatgattaaaataatacctccaggtcatgttggaatcgttgttcgaaaagatggtttgatatataatattttattttatttatttagggaaagttgaccaatttaacaataagggccgtttggctttatttcacatacctttcattgaaaagcctatagcttttaggataacccctataagaaaaaagatcattagaacatgtgaaacatctgatggtaagaaggttgaggttgttattttccttacactagcagcaaaggttccattttcttcacacatttattccatttacggagttaacttcactaatggttttgttgagaaagaactcaactttgatattgatcaagtaattaaaaagttcaaaatggatgatttgatcctgagtcctgatattatagagaatttggaacataaaaaagggaatatatacactataaacagttcaatcgacaaagcaaacgaggagttgattgaacgattcaatgacgccggaacattcaacaaaatcctggtttcagatgtagtaagttcatatttctatctttataaacatatggttataatatgtgtttagaatataagttatagaagaccagatttagcaacggatccgtactagtgaaattttataaaaatagttttaattatgcccatttgaatattttaattgtaaattataaagaaatcagagatactagagccgtttccttatctctaacattgcaggacctaatattatataacttaatatatgtgttagtaccacaatctactccaagtttctctagtttttggtgtgagttgtcacaaagagggaatttagctaaaatataatatgaaatataattaaagaacctgacttccaacaacgacaaactggaattcttgtaacaggagcgatatgagaggtaaatgtctcagtatggactgcaggaaggcctaaaaataacagtaaatagaattcaatttatatgtaaaaatacctgaggtgtttaaaaaatcgccgggttttctatttactttagttttctgtatttgcttagatatagcggagcccataataaaaggataaaatatgtttaaaacagataaaacataaaaggtaattaaaataaaatcataatataataaaattaaaatgaaatataaagaaaaatataatatgaaataaagaaatggatttgtacgatgagtaaggcttacgataaaatcaatattaaattaaaaattgtcgttaagtaatatattgtataaataatttgatataattaattatacattcagatatataatatatgatgtgttaatgaaataatgtatgaattgatgcggagagaaataatgattaatgtatttactttgtacaatattaacacattatataagtttggttttataaatgaacatttatataatttaaatttatactataatttaaaaaacaacatcgattaattctatgtattcctatcgttagttaacaataacaagaatctggtgggggtttggtagataacgaattgatgttgttgatttaatgtaatatatacactgagttgatgtatttaaaaatattgattttaatataattttaattttagtaagtattatatttaatggatttcattaaaacgctgaagaagaagacggaagccaaaattgccgacatcaaatcggattttagcaactcttctacccttccaaaatgtaaaccaaatttcgactataaatctctaaatatttctacggatatcggtcctcacatgaccgaatatatatatgaaatggactttgatttgcgagactttttaaaaaagtataatttgatttatccatgcactgaatcacaatccaattcatttgttgactttcagatcagttctttaacatctatgaggaagttgttgcttgacatgcccgttgttgagaatgtttctgaggctacaaagactaagaggtcgaaactacatagtcaccaaccagtgaaagagcttacacttgaagaactttactactgtaacgatttagttctcttcaggttccttagaacttatgactataaaccagaaaaatcattaaacgcacttttaaaaacactagcatggagaaggactagagatccaatgagattaaagccagaagtagtacacccagtactatataaaaatttactatatagaagaggatttgattattacgcatcaccaattatatatttcaggtatttcatattctattatatacattatatatatttattatatatatatgtatgatgtatatagtataacatacaaatactatataataatttaacatggaaaattaattttaattttatagacctataaatgagacagatgctacgctggaattacatgttttgggcctttattatgttttggaaagggctttacagacatgtttgatatcacaggggaatgataaggtgtatgttattgtggacctgaaggactggtcgctgtcaagactaccaccaatggaacttgttatagaaactgccagagcacttgtcgatcactatactgagactatagatgagattttatttgttgaccctccgccgttgattgatcctgtatatcagatggtgaagtgtgtcattccagcatcgacaactaagaaactagttttcaaatcgagaggaccaaaattatttgaatatctaaggtcgagaatcccgccatgttttcttgaaaaatctctaggcggttcatgtgaacctgagatggattttcaagattactggaaggtcgaggaatcgcaatttgagctttttcaaaacaaaatcgacgagtggattagagaaaacaagagcaaatatttaaaacgaaactctgagctttagtttcttaaaaaataaaaaaataatattttataatattttaatttcccaatataccatatgtgaatagattatatattattatcacattcaattgtttgttttttatatttatttattttattttatcgttttatttattaataaatatgtaatattcaaaactgtttaatattaataagttgaaaatgagttaacacaacaacggtgtttcctaaaactcttatatattgtaattttagcttaaaatgttgaggtttacatctctttacagtttatataggcttgattacctggttttcaaaccttatttaaacaaacaatataacactttactaaatggaaggtttatgtcaatcactttaccaaattattttaaaacatccagaattcaaagcacattcatttgtaatcatcatttcagtgacattaaaaattatcatacacatacatcactttcaaattaccatacaaattcactcaacaacaatataatatttaaccaaccagttgattgtagatctaattttaattcaaattactatggtaataacttgaaattggcgttttctactgaaacgacccccaagaacgaggttgttaagagtaaaaagaagccatctctaataaagaaggttgtgaaagtgcctctggttttggttaaatggattgtatatataccatataggattggaaggggaatatttagagtgttttcactcacatttagaggctttaacaaactagcaaagttagcagcaagagccgcagtcctccagaaagttacaggagtctctggaattttcaaaagcatcgtaggtggtataaaacatacaatacactggtgtaaaacaggctctaagctatatgcagcaaacgtcaaggtgtcatactacatcttgaagaagcttatcagagggcaccctatgaggtaccatgagagaaaactccttatgaagactatgaatgatgcccttaaacttgttcccttttcattgttcattatcgtaccatttgcagagtttttactacctctagtgataagattcttcccccaaatgctaccctcaacgttccaaactaacaataataaggacgatgactaccttcagaagaaactgatggcaaagaaggagcttgcaacgttcttccaggagctcgttcaggaaagaactaaccagattctacgtaagttaatagtaattaatttttattagaggaggaactcgactcttcaatgaggactaaagctgaggcattgaagcagtttcaggaaaggttacttaataaaagtgatgacatgaatccattcctaaggtaatttaaccaacaattaccaataaatttagtgccaatgaactcttggtgttttcaaaattattcaaaaaggagttcgtgctagataaaatgagctaccagactcttaaagtaagatttattctattatccttaataatttataaatcaaatatttaataacaaattgtttaggtaatgtgtaaacttcttggtattactcctttcgcacttaaatcacacctcgttttacaactccggtatctttgataaaatatacacatcgtactacacctactaatccaatctaagaattataaacataaattaatattgattaggcatcatttgcttaaaattcagagggaagacaggttaatattgtgggagggtgtagagagtttagacatggaggagctccaggaagcctgtaaagaacgagcaatgaagttctacaatgtaacaaaggagcaactccaacagcaactgaagcaatggcttgatttgtctagtagacgagagatcaacccgattcttctcctttggagcagatgtataacgatgactcacgaacctatggtgattaaggaaacaggggctgcagctgactcattagaaacggttgaccctcaggagatcctagttgacgccaacgctgaagaaacccttgaggagaagcctgaggagaaggtcggaaggtctaagatcaaggtcatccaggacgtcgttgaggctgcccaagttgatgaggagcagttacatgagcgtgaggaacgcctagaggagttatcggagaaggtgaaggagcttaaggagattatcgaaaagagtaaagaggaggaaaccatatcaaatttcgagtcagaagacgttgtaccatctgaagaactacttaacatggaagatgatattccaccatcagagcgaaaaaaacaagcggagtcagacgacgagcacaggtaattcctaaccatttactttctttttattactttattattctaatttattctttagtaagttcgaaacattgtcgaaagaggagcttgttcagagacatagggaccttttatcctcacttgatgttcagatgcagatcagtgatctccagtaccaccaactcactgagctttactcgtacatggttaaaatctccgaaaactctaccccaaatgaaccgattaaaatagaccataacgacctcaaattgcttctagactcaactcggaatgatttcaagcaaatcgagacactatcggcacagtttcagaaagtttcccagaatttaacttcataatttcataaatacagtttagacagcttaagcgagactaacaaatcaaatagtaaattaaatctctatacttttatagtgtatccatgtttatttagttaggttcattgggttaaatgggttatttgaattagttctgaaccaatcccacaattgcggcgtaggaaaccgacgagtcgctaactcttgtaatccgtgaagactaagttaaaatttttaattcctggattaattacttgagagtagtggagaagccttgaggtcacattaaggttagaggcagccaaaagctaaaaaatatttatacgttattttatgtatacccttaaaagtagtaggattggatttctaccgcaaatagtgttctcagtttcagtcaaataccagaggaagtctaaaatttattaaaaatcgaggagaaagtaatatttcgtgaattacttaaatatagttaaattatatactgccaaaatgatatagtgtgaataccgtcgtgtttatggtttacgatgaggtcaatgccacgtttgtcaagcatttcaattttctcgtataaaggcttgttttcagactcgtatccagtgattgagaattgaaatctgcgaaaattagattaaatattaaaaaccttgatccgaaatgacaaaaatcagaagagaagacgaacaatgtacgctaaattatgttagtcttatgatagaaatgaaaaataaattaatattcatttacctcatcattgaaatatgggaccagtgcagaagctaaaaacatattatcattgttagacttacttagttcatcagcaagagattcgctgaaatctccgaccattattggaactaccttaacaggttccctaataaatttaataaacatcaaatgtgaatgaattaaataaagtaaataagttattttgagaaatactttttgaaaacgaatctgagtaaaggtaaatgcatctcaattgagtgttcgtcttctgatgcttcattgttgattacagaaaagcccttgaggtttgaaagcttatcgacaatatcaacatcaacttggagaggtcctagtggtgtttgcagagatgagaatctgtcaacagcacaacctcttagaaagaaatgatgtgatggacctagtacgaagatagttttactaaagaaaaattagtttttggtaaaaccaagttacaattaatacacaaatcattataaattgtaaaaaacatactaagaagcggagtcgatttgactgtacgcgtgagctgcagttttaagtgaataagcatatccagcgtgtctataaagatttattaaatatgaaaaatcatcttacggcgcaattatatacttaagagtcttgtaagcagcattagttaatccttgaaaggaagacttaatttcagattcaagagcaccagctaagttaaagttaaatttagtttaattatcatatatttagtgttaatagagaatattgaggcttacatgagtttgaataccaacttccagcatgtgtagcaactctcatttaggaatatccaatggtgaaatataataattttaataatttaccgttaataatatttgatcaataaagataaatgaataatataattaacaggttatagaatcacaagacataccaatatactaaaacatataaagaattatattttacaatttttaaaattaaaaatattaaatattttcatctttttgataattttttttctttcatcattgataggaattttacaggatcaactcttcccctaaaccgcgacggacactccactaaaaattattgtacaatattaattgtttatattatagttaataacacactttctgggttctcgttattatcttgccttcttttagtcctcgctaaaattaaattatcaatacttatattttttgttttaactacattttgagtataattatacaatattgacttacaggtggagttggtatcaggaaccgttggcattagctctattggttgagttcttggtttttcctacgatcacaattatatattggggtaattataacatttaactattttattcaataatgtgtattaatacttgagtaatgtaaggatgattaagagcatctttggcggatattctttggttggggtcaatatttaacatttttttcaataaatctaggcccaactcagtcatacaagttgacccatgaaccattccacccattattccaacctaacataaatttgatgtagttatattatcaccttgaaaacactttcaaatgaagggctatatttgtgtatttgaaatttattactaacaacgcctggcagtttagaaaatccaggccagttctcttcagtcggagatccacagagtctaaagattttatccaatgtatctgcatcgtttgttcccatgaacaaaggccttgatagtataagctcggcaaaaatacatccaatgctccaaacatcagttttttcggtataataaggctcacccaaaaacaactcgggagctctgtaccaatgcgtaactacattatgtgtgtatttcctaataggaacaccgaatttcctagccattccaaaatcgcaaatcttaaccaatccactgttattatacaatatattagttgttttaaggtcacggtgcattacccagttctgatgtagatagtttattccatctagaagttgcttgaggagacattttctctcagacaatgtaaaatttggtctgttttcttctaataaagtcttcaactcatgctcaacatattccataaccatgtaaaactggtcgtgcttcttattcgtaacaatttctttcacagataaaatgttagggtgatttagttgtagcagtattgagatctcccgcaagttcgttaatgggaatccttctttccactggacatcgtgatactttatgtgttttaatgcaactatttttccagtttttaactccaatgctctgtatactgtcccataagtaccttcagatatcttatttaaacacttaaaacattcaacatctctacagggtttatagtccaaaataaaacggctgggttcgacttgttcaaaaacttctttagattcagattttaatttctcagaagttttagaatgttcgggtatctcctttatcttagtttcattttttgaactaacacattctgcgatattagattttaatgacggcgaatcatcagttttagacactgaatattcgtctttattataaatatcagttgaaacattcccataattttcaggtgttaacaaataatcttcttcatccataataatgaatgataaatactgtcattttaaacaaaataaaatatcaatattgtaagagagaatatgtttatgataagaacaaatatttattaaaatattatttaaaatacatatattaaaatttgaattttattaggtttgaaattttttaataattatgattttatttccccatgggattcttttaacaattatgttattaaataattattcaataaataatataatcaattttttatttatattataatatgtaatttagttcctaaattcataaataaaactctataaatttaattcattttaattcatgtattataatcgtttgtttaattgtgtgattcgactatcaaatattatatcataatatgtattataataatgggattaacagaagaaaaggtcccaaatctctacaagattttcaagggatcattacttggaggtgagtttattaaccaataaatcacttaggtatgataataaacatattttttacaccttgtgatgttgtaaagaattattggtactataacaacgccttgagcaaatgcaggactcaaatgtcttctttaaatgtagtaaaacacatatacaaaaaaaatggtctatcgagcttctggctaggtaatttaattttttatcaatacaatatgttattttaggttttacttggtccatgcctttgactatatttagtcaatcaatatttttatatacttatgataacattaagagcgatgttacgcctcctgtcgctagtttaatttctagattcatttcactcgtgctatctcaacctcttgattgtatgcgtacttattaccaggcaacactatacacatcgcaaagagtaacattcaaaggaattgttaaaaataatggatttatgtcactatataaaggtttcaactcaacgatgattcgggacgtgccattttcaattattcactggccaattaatgagtttttatatgataaaataacatcgtaactactaattggttatttatttattagtgattatttacatagtaataaactaatattctgataggctaggagtttataaaagaaggaaaatgaatcgatttgaatcaattgttattccctttggatgtggaactgtatcttcattaatcgcaacattcatatctcaaccatttgacatagttaaaacaaatctgcaggtaataacttatagagatagttatagttatattatccaacaattatatccttaattaacatttttagacgataggagttgacactgaagaggcaaaaacacacccaaactcttctggaaagtttaacatattatcggaattgaagagaataagagctacttatggaatgcgaggtttatttataggagtaatgccaagaataattaaagtggttcctggttcagccataatgtcggccacttaccactttttcaactgataatcaaagaatttacaagcaattggattattataatccaaataatgcacttaaaaatgtaaattactaagattatataaaatctatgatatacgttggtagtaattaagagcgcatcgttaagtaggagattttaaaaggaattaaaatgtgtaaacattatagtaataataataatttttaaaaaaggaataattttaaaaagtacataaaagtgcataaaaattaaatatatcataaaatcataacacaatgttgggagacgtacaggagtaaagttaattctttttgaattaacacttcttaatgtaacattatatttatgtacactcctaaaaaaactaaagccgaggacggcttctatcctagatcgcaatatgacatcggatccgcgtcgtttaatgattctaactcattcaattgtatgacccagaccagcaacgacgagaccacttactatacccaagtcgataagcgcgtaattctaaataaaaatttagtgaattttaacgtcggagggattaaatacacaaccacgatgtcaacgctatcaagtgatcagaattcgaagctatataaatatgcatacttcacaattaacggaatagaaacgcatgataaggaatataattttgatggtttctttaatttcacggactccaactccggaggcattgcaaacatatttattgatagagacgggaagaattttcagtacattttaaactttctcagggatggggaagtaatttgcccagatgacccttttgtataccagtctttgctctcggaagctaaattctacacccttagtaaattagttgaagccttatctcgtattatacacaagcctgaggtcatttctgaccctaaacttgaaattcctgaacctatacctgaaatggaggaagtttcatctcagaaaactcaatttgaattttgcgacagtattcccctgactcaaaacaccaattctgatgtatttttaccacctcataatgtatttttaagaattgaagagaatgtaagttttcctaatttaacttattaacttatatttaactcagtttcagcattgttttatctttatttactttaagtttacactcttgcatttaacttcattttctttaatccttattctctataatgttacacaaacatatgattatttaggataatatagaagagtctattcaattcgttcagactacaccagtgagactactgggtgagcagacgttttctaccaccgctgatttttaatgtactataagttatattacattagtattatcatttttatccttagtcttaaaaaatgtgaaaatgctctgcggtttattgctgttaaacgggttgttaatgtttttggcgcaatttccactttcgtagagcgaccttgacttcgacttagatctcctcataccgttgggatctggagaggtgaatggactattggaaccatctgcgatgaatgggtttctcctttcgggggataacacagccttagaacgctcattgatcctggacacaggagttccaaccttaacctttttaacctttgacaacatgacggttcttccaggagttaaattcctttcctcagaattacttgtttgcagaacgttctttgctctaagtggatcgaatggattagttgaaccattattagtaacagcggatgttgttaattgaggtggttgttccgagttctgagacttaggatgatagtcagatttctcagttttaaccaccctagtgcaatggccagtgtaatcgtcgtttatcccaggcaactcttccttcttttgttccactggaggagggttaaagtggttatacattttaatgaactccctgattaattattagttacataactctatttaatgttaatagttggatttaagttatttagtaataggatagttaattacagtctcatgttcttataatgaatgtcagtttcctcgcgttcgatctttagcttcctgttcttctcactcaagtctgacacggcactaaaaaagtttaggaaataagaatttacttttcaagctccacaattcttgtagttaagatgttcatcttctgatcattggaaaactaaattttaaattagaaaatataaagaaataatcatacttgggagaggaatgtttttaagttatcagcttcaggaaggttctggtcattgagactaaaaaacgtttgggaatgtttaaacaaactatttagaaagactttcaagcttggcgagcttttccttaagttcgttaactttattgctaagaccgtgtattgtggtcttgctactttcctgagaaaacaacagctccttgttctcattactcaaagattctgagcgtgaaatctcttgatttaactgttcctcaagaaaatctttctcagactaataaaattataaaatatagaatctgaattttatttatttaactagtattaaaattatatattagtaagttgatttaacctggagtgaagcgagcttttgagaaagatcgagattgtcagatgaagcctgacttaaccgatgtttaaggtgttccaactcattctataaaaaatataaaaaaggcgaaactgaccttgattgtatcagaaggagaatgatcctggttggagggcaggctttcgatactttctggaaaatgtgtaagatgtgcgatgaaatttaccggatttggaaattgagtaatttagggaaagaatctttttaatgttaacagaggttctacataatgggcatccaggattcttaactttaattctctcaaaccagctatttaagctacaaatgaatcatatcaatatacatattagtgatgtgatagtatggtagacattaaatagtaataaatagagtaatatacagcaataaaagataatatataaaggaataccagtctttgtggtaaatatggccacagtttggcaagagagttaaatttgtgagtaaacggtcgtaacatatgctacagtaagggaattcccatgactccatgtgaaaaaacacttatagtacaaattaaatatttaacataattttagaataaaactataaatactattgtacagaaataaatttaaaatgatattgaaacatttttcttgaaaccgcacatcaggatctgatgttgaattgtaactgttgtaaaattttaatgatattatttcatattatctgaataatatttaaaaatgttttcgatgtgtaaaatttgaattacaatatggattcgtccagactatctgagtttcttatacaaagggaaggctttgagctcatcaaggtcactgaagatgaatacaaaggtttatttagaataaaaataattaagtttagaatctaagcgattcattgagagcccagacgcgattatggatgagtcggttttttttcacatcaagaaggtcatttcatacctcttctacaacgaaaagcttaaaccaattaaggaccctaaaaccaatattgactcggaaaacaaagcctttgatagcgaatttgcgaaggagttgaatcgtaacgttctcaacactctggtcgatggttatgttggatacgcttggctatgtgaagtttgttctcgatggatcaattttctaacaaatttactaaagaatgatgacttctcaggtacttttggatcagtttatacaaatatatataattttcatattaaaaactaaatgtatatctagagaataaggatagcacgtttgacggctcaaaggcgattgtaagtcctaaattattaaataacaatttagatccaggaggctctaatgtcgtatttaacctcaaaatatgacactgataggatgagttagtctttaaattttcaattattttcaggaatatacatggaggataagcttagtcacgacagttggaacccgccagaattgtactggaaccttatgaaggtatttaatatttcaatgtattgttttagtcacctctagttgtctcacatatgctaaaaatataccgagataagccaaaagatgagttcttgtcatcctggtaccaggactacatgaacaactttagctcctacatcaagatggagcaaagtgaagttaacaaggaaggcctttctaggattacaagcaattttagtgtttttacactaagaatatccgaggagatccataaattccttctcaccgtatgctttattcagttaattcaacaaatattaacctcacaactcatttgttatcagagtaactcgttggaatcgttagaatttgattcacttgattctgtcagtccattattttggcatgcagaaaacgcctacatttactctcaagctcttctccactttatttatcagtggcgaatcgacttgaggggatgcaggagactatctcagcttattgcaaaggccacaacacatccaaatgaaatccttagagagtcacaacttaatattgactcagttttagaatggtcagtatcgcaaatccacctactaatgaccaatttttcaaggtaacaaaacaccaaacaaaattttttgtttagatttccaactctgcatttatcatttaaaaggttattatctagtaaaaaatcaagcgaggataaatttaaccaccaagaactctgtgatttttacgaggaattgaataaaacgttaaaggcgtttgacagttatgggttcctactctttgatattcgatcagctacaaaatcaggtatttttctaaaaatcaattttttatgctaatttgttctatataataaaatctatttgtagaaaaagaagatgaatcaagtgaagaagttgtgattgatgagtcggtatctcaatttggagataaaagagctgatgagtacatgagacttagaaatgccccagagatgccacctcttgaagctatacgtgagagtaatcttctgaatgacctgatagacgacttttctaacagagatgtgaatattaaagagtcaaccacttggattaagtacgccaacctgctggtaattctatcagttctttctccatacgaacttctgtacttccactactatgaaaaggtctcagattatataaagaaattgcctcaaagggaggtttggcagcagttttacttacctccagaggagtacgactcagatgactcaatagaatcaatagaaagatacagagattatggagtaatggatgagccggaatacgaatcttcggatgatcaaagccaaggtagaaaaattaatttaatattcttttagcttcaagtataaccgcatcagatgaatatgatatcaaaaccgtatctcacgtccacaaggcctggcacagtgaaacttcaaactccattctttcatcaaacgtattttcatcaagctcaagtaataagaaagcatccaaatcaaggagacgaagccaatctaaccatagtgatgacagtggtccatgtaaatcagatgattctccgaatagagaaaacgttaaatcaaattcaggttctagtttttataatataaagaggagaaagcgagcaactgattacgaggaagcaattatggatgacgttggaagtgagtacatggaaatcaaaagcacacttgaaactgcaatatacaacaatataaatgaacaaactaagcttgggcctggtaaaaatatttcaaaggagaggcttgatgagatgaaacaattgtattcacaatttaaattaaagtgcgataagatgatgaacattgccaaaaaagatttgtacagcctatacaatctaattcacaatcaacatgacacctcagaatgtgagtatgagatgaggaaattcatagaaactaacatagcttcatcagttgtaatgtcatacatcaaccaaagagttctaaagagccggaacatagacgagctcaatgatatcaagctcatgctgttaaaggaaatcgcagataaacatccagttaaaagaacttctataatacttctacttaggtttgtaaaacaatttataaatatttcagggatttttgcaaactttgcgtcatcgggaatatggatgaaagtccaaataaactagaggttagaaaaaaataatcttaaattatgatatttagaggctggaagctattgtggatttgctggtttatatttcaagatttgatcgtcagtgcctaacaataatagccgtattcgattcaattgtaagttacacatctaaaactattttattattttaatagacaaaaaactaacaattgttttcagatcaacctggttgacagaagcattagtagagtgtttatatctaaaatgctgaagttctgtggtccaccatattcattggatttctcattaatgttcataaaactagttgaaaagttcataggatcaggtaattaatatattcataacaaaaataaaataaaattaacaaaatgttttgattaaaaattgaataggaagcagtggacctaacgttcaaattgagatagagaatactctgatgaggaagtacatcaatccgttcattaaagaatgcctggaaaataactataacaaccaagagataattcagattgcaaaaagatgtgatttcggaaatgtagtcgaataaagaaataaaaatgctaaaacttttctaatgcacaatcaattacccacaagattatttttcaaatattatctcacacattttaatatattttatttattttgttttaaaatttttaaaatattacattaaattgtaatatgatatattgtactatatcaatgcttctaatcaaaatttcaatcatttgtttcatcttacaaaatttaacattaaattaacaaataattaattttgtaaattatttttaaattaaatcgaaacattcttttattttgtaaattattttctaactgtgtaaactataatgagggaaatcctttcatattccttcgatgttatcttgtctagtaaaatataattttaattcctttttaataatattaacaatggagtatgtcgataatgatggattttccaatgggaaactccataatgtgcacaagttaaacgttgcttcacggctcagcgagcttcccatgaataaaggcagcaacatctcccctcaggcccttggaatgtccgttaagatggaccttgtaaagagaagatcaactcagacggctagtgaaaaggagtttatgtactctggaggatttacgaagactaagaattcacgtgtttcggatgaaatattatctgcagctgatatattgaacaaaattaattccaccacagcttctggttatagtctgagcaataattccctagtatacagagaagctttagcgactagaatgttactgcgaacaatggctttaaagaattttgctaataacaactacagtgatgctctactggaagcacattactcgctattgctttcaaagaagtttcattcccaagtgagaaaaacacctttgtgtggagaaatggcaatagaacttatgatactaagtaagtgttatgcccggattggacactttaaaaagggtaaggaacacttggctgagtttcggttcttggtagagaatacactattacaatattctaagggttctcaagcgttatcggatgattccaaaaacgcagtaattgactgtgataagaaagtctttttaccaatagtttacattttagctgaagttttaagcagttatggaatgtccgaagatgctgaaatcttcttctctaagtaccttgcattatatgttcaattatacggagaatttgatcttggacttagtaacgcacttgggaatgtgtgcatatatatgatcagggataaacaatacatgaaggctctcccactgtgtattaaaaacttggagattttgaagaaacattttggtgattacgattctgagcaacctaacattaaggttgcagaagcttataataatctgggtattgtttatagattattgaataaccctattgacgcattacaacagtttttcaaggcaattgatatgaaaatgcggttatgccgtgaccgcaatcatccttcagttcaagatatattgttgtcaataggatgctgtttccacattctaggacaatttacatcatgcgcgtctatatatagggaagtatacactactcgctcggattcactagggaaatcacacccatcaacaattgcagttcatcaattactcacggaccttgaacgagatattaattttagatataatgaatcagacaaatctgaacagcctggtgatggattagataagagtccaaagtcagattctaagattaagagagaaactgaattagtcgttttaaacagtcctacagtagatgtttcaagaattgtagcactgtattcaaacaaaatggaatctattgatttgaataaatcaaaagtaaattcttgctctgaggttatattccctactgaacgccttctggatttatcaaagaaactaaaccttaaactaatgaagttgccagtaattaatgtaccaaaactttcaaaaggaactctgttcattaaagacggacttccagcaatgacacttaaccctgacgcggaggatattcttagggattggggagttgatccacccgatgtctcaatttcaggtgaagtgcttaatagtgacttaagggacgatggtgttagactatttgttccactggttaaagaagataatgaattaattctaggttatcacgataaaccggttttcgttccaaatcccgcaatatttcatagttctaaacaggttagtaagatgttagaatcttcttctccaacacgtacatccctagttagtaagattactcgagtatctaatgaccctttcatgaagcctgaacctcctgaaagacgagaaatggctacatcacccaaaagtgattcagccgaaaaaccagatactgatccggataagagtgactctgataaagttgacacagagaaacctgaagaacttgtaaaggaacctgaaaagctgagtgtaagacataagataggagaatttgagcgtttaaaaagtgttaagtttatagaaaagccaaaagtggtagaagaaccgatagtgagtgtcccaataactgagttggttaagtcaaagaactcaaagaatgcaaagtttctggccaaaatcggatcactttctaacattaaagttaagcagaatatgtcccctaaaattgacaattcagttcttaaaaagacaatgatggcaaagaaaattgctggtaaaatcgcaagaaaggtgcccacaaagagattggcacagtcaccaaaacacaaacgcgcattttcaaactcttctgatgatagtcaattttctcaagattctctcattttcactgatgaaactttatattctgatgattcttttattttatctgatgaaagtatcaagacaactgattattctgatgatgatacggtcattgagagttgcagtgtggtatcaaactcagatactcctgtaaactcagactatgagttaataaatgattattcaataacaaatgagttgtttacatcaccagctgtttattctcttcctgatacagtaagtccagcaaatttaatgaaacaagatgttaacaaattgccgttacttatcagatattatgatgatgttatacctgttgaaattgctagaagggttgcttcagttaaaacatactttagtaaggtttttaatgattttcttgatgaggataacaaggacaaagttgaatcgaaagaggataaaactgaaaatacaactgaagatcagaaaaatcacgacaaacctgcaatcactccaaagaataatactagtccaggtgataagaccccagttaaatctcctaaaggtactaataattctgatgatatgactccagaaacgtctaaaaatcctccaaagtctaacacaccaaatgttgataaaacctattgtatgttattggattgtgaagggaatgagttagcttcagttccttggacagtggatttggtttcattatccatagcaagatcatgtctacaggaagatttccttaacagatactcatttttggctaaagctaataaggcgtatttgaagaagaaggagttgtcttttaaagtagaaactgatgaggagaggaagaaaaatgaacttttgctgtgtagaatgttactggcaggacaaggtttaactgaacttggattcgctaaaatcgccacctcaatgcaggcaattacaaatgaccttacagcagggcttgactttaaagtaccaaattcagttctggaaagcattaagaaacagcaggaacagatagaaaaggagatgaaagaacttgaattagcccagaaaaagaaggaggaagagcttaagaagaaagaagcagctgccaagaaggctccacctccagcaggtaagaaagctccgccaggtccaggtaaaaagggccctccactattaaagggtaaagggcctttgcccccaccaagtaaaggtggattcgggaaagcagccaagaaagcagctcctggaaaaccagttgttgactcaaacttaagaaggttcttctgggatccaatctttggagatgatgccaaagatactattttctcaacccaaaagctaagaccaatagtagaagtcgcacaaatcgaacaatcattcgccaaagccactcctaaagcaaaggataaagccgtagaaaaagctaaacccaaggttcctttttattcgaattagtgatttattactattttatttatgacgtgataataaattctttagtttattcaattgctgcctgatagtaagaggagttataacatgaacattgggctcagcaaattcagcaaatacacatttaatgaaatcagagaagcaataatacaccttgatccaaatgtatcatatcttttatataccattttaattaaaatttgaaacaaaattttatttttctttaggtcctgaacgttgattcaactgagagtatattactgttattaccaaacactgaggaaatttctgttgtttccgaattcgttaaatcgggtactttttatatccacaattagaatttacataaaaatttcttttaggaggcgatttgagtgccgttgataagcctgaacagtttgttgcatcacttattggaatacctttaatgaggcagagattggagtgccaccagatagctcttacctttagagacaactataacgatatatattacccactagaaaacattatggactcctgtgagtgtattatggactctgttaagcttaatatacttgtacactttatcctcaatgttggtaacaagttgaacgagggtgaccccagtaagggtaatgctgagggatttaagcctacaaccttcccaaagttaaatgatttcagaacaactacaaaaccgtcaaaaacattattacaatacatttgcgatgtactttataaataataaacatgaatttttagatgattgctgatgaggatgaaaatatactcgacgttttagatgatttaaagagcttggattcgggctcaaaagttgatatcgatgcgctaaaagacaaaatgaaaagatttaccaatgatctagacaagattaagaattcgattaagaatgctcaaaatgttaaatgtgatttccaagataatttcacatcaatcatgcgtgaatttttagttgacgcagaaccaaaagttaactcactttcaaaacactttgaagaagtaagttttacaaacaaatacgacttaattacaatcttgtaggtaatgactacgtttaaagaagtggccagatttacaggttacactgaaaaggaagttgacaaggtaaaaccaagtgaacttttcaagtacttgtggtcatttgcattatcagttgaccagtatagaaaacaaagaatagaagcaaggataaagttagagaagaaagcaattgcccagactaaagttgaagttaaaaagacccccaaactacaacagaaacaaactaaactcgtttcagttccaaaattacaaaatgacgaccttgtcaacattgtaaaaacaatataatttcatacataaaaactttataaggtattaattaaatgttagaacatggccaatacgatttacatcttctactccactccttttgcattggaacgttgtagtcaatgaaggaaaatgcctctcccatgcaaggcccactgtaactattcaacgatttgcactcgaaattctctaaatcattgtgtaattagatttttgaatagtttattgaacaaaggtattaatttacctccggaaagttcccatccctctgaaaaatattataaatattcagaatatacctggacagtatagagaataatctcgtttacacatgacacaaggccaatttgcgatacaattctttgaccattgaatcttttcttcctttcccatttccttataggttaaatcctgacccatacaaggtcctaccaacgatattaaactaaaatttagaaacctgaataaaacttttgtggtgtgcacttatgcgatccgtcatttagcaaattatgttcaaaattctaaaataaacaattgtaatatttgacaaatatcttacaagaggacatggtttagagtagtctctttgacagttttctaacgttgattcatgatcaactggtttaagaagttcaagatcagaaactgaaatataaattaaattggggtttgataccctttggttcaactctatttacaggttttaaatcagataactcgtccaaaacctaataaatattttattaaaaatgaaatgtgtgtgtaaataatgatcaaatacctcttcagcggcttcactaactattggaactggattttcaggttctttataagctgatatagcagtatcagtgatggaggatgtggaatcaccaaattttaaatgagggtcttcaccaatttgtgaaggtgcaagaatctaatcatgaattgttataattaattatcttacggttaccttagataaaaagcaaatgcaaaatcttaaataaaataaaaagataaatgagaagaataacatattatgttacacatttttaatttaaatgattattattaaggtttattatcaccacaaatttaaataatattttaatccaaaatttaaacataaaatataacatgaatatattatgaaatgtttcatataaattaaattttggattaaaatattatttatccttgactgagttccaatttgttgagagtctttcacccgatgatgtcgtctgtttacaaacgttaaataacataataacatacaaatgattttaccatagctcttttagtttcttcatcaccttttgagtatatttctttgagtagattcatgaacttttcatctgagtcttccgtgttttcatcgacaaccaattcctcattaaaatttttatcactgaactaataaattaactttgtaaaatattactttatcatatgaatttgtaattctgtttgaattctcttgtttagagtcatctgattccaagttatcccacattccacctgagaattcattagtataattatattattaaatttgaattaaaaaataataattaaataatttaataccttcagtcttaaatagctttatttccatctttttctaatttaagaataaatgcatgattatagtgtgtaataatttataaattaacgaatttaatacatctgttattgaaactttcatgttttcatcagattctgatggattcttaatatttgatgtgagattaaagttatatgtatatttttcatcatctaaattaatatgaaatatttaataaaaaccatctgatgtgttaaaacatattgataattttttgttatttagatttaattttaacgcttctttcaatgcgaaattcttatagaatactaatgttaaggacttctcatcttgataccagctgaacctattgaatgttaatctggtaagattattaaatacctatccataaatttactatttataaataaagaaatgataaaaagtttttattttatttaatatacgcaattttaatgtttaattttaataatcaatttatttgattctattgtgctatatttatatcacaatagcatttactagattttatttttatttaaaagtctcttgttcttgtttcaaattgttttattttaaaatgggaatttttgctttctactttttcttaatttctattttatacaatattttatttttcatcatggcttgaatacttagtattattatttatcgtttgaattctaaattagatatgtcgtcatatcctaatatgaatcctatggtaatgcctcctccccctccacctcctccaaaaaccatccgtaagttctattatccaatcatatattattatatccaatttataatacatttgatagaatctgaaatgggtcaaatgatggagggatatgatcaggatcctcttaaaatgggtgttggagtatcacatgattcctatgctagtatgtctgcgcctacgtttgcagcaccttttatacctcagcctccaagtgcacctccacccggtccaatggttcatcctatgggaatgataaatccagctatgggattaatggtacctcatatgggactccaacacgttcaaatgggaagacaagttatagatccatacctggcagctgagatttcatcaattgttcacacactctcgacatcgcaattaatttatgtccttgcagccttaaagaagtttcttaagcacgcaccttcagaggctagaagattccttattaataatcctcaacttacatatgcactgttacacacacagttcatactcggagaacatgatgaaagtgttttacctctttctaaacttgaccatgacatttcgcaagttaaccgactagaaagatcaggacaccttaaaccttttcacgtagtttttatttattttaattattgtatagagtttgtatgaagataatccacttaaagctgaacatatggaacattatactgatcaatacaaacaagaatacaaaatgccataccaacaaccagtacagacagtggtattgttaatattatttattattgttaggaacatgaaaaggtaaaacatcatcatgaacatcgtcctcaacatcatgagcgtcctcaacatcatgagcgtcctcaacatgagcattctcaccatcttgagcatcagtcacacgttcaccaacatcagatgacacctcagcctcagcctcagcctcagcctcagcagttaactaacgaggcaactcagaaggatattgacgatttaatgaacagtggtgtttacccagcttccgcacctcttgtagatgctgtcattaagaacaacgatcttctaacaaagtaaataattaactagttaggattttataatatagatatattattaaaataatttgtagtatacaaaaggcgactagggaggagatgacttcatggcctgctgaacagaaacaacaagttctgtcgattaaagttgtaagtatatatgtgttaaaatattattttaggcgcttcatatgagaggtatctcagttaacctatagcctggaaatattaattttatacatgtgttttctattcattaaaataatactagtttatttgagtataaacggtaatataaatagatgttgtcaaatgtgttccccatcattaaaaaatttataaattatttatacaattgtaaataattaataacaactttttacgctatggatgttaatgaatttccgtatactccttttcttggagaatccgttaaatttcactttgaaagtgctgataacgtaaagcctgaggacttcaattttccaaagggaagtttaggggttttacatctggcttttgcttctaataaaaagcctgaaggtgatgagagtaaggattactccttacaatcacttgagtactttccttcatcattttatcacaagaattctccgcttaaacaacttgccactaacaacaaattctccgcatcattagggtaattcacttatttacacactatctgcataaaaaatagttatatacaatgattcttccaattgtatcctgattaatttgtagtgacaaattggagtcagttggaacaagagatgatctagaggttttagttgaagctgtagttggatgtggaaagaaattagaactactgacaacagacctagcaacagttgcaaataccttagcctcagttttaacctcaaataaactgaaacacgcggcacttttgctacttgattttactgaagaatatgttgaactccttttgacccaactgctctttcaactttgcccagataacaggtttaaaaaggataacaaacatgagttctatttggagaatctctttgtatttaacaaacacgcaaagaatctatcacacatgcaacaagtaacagttaaataaatttataatttgatacgactaatgaataattttcagagggtaaaggccttttcggaatccatggatatggcaaaacagttaacctcagcccctccaaactattgtaacacagtaaccgtttctgaattttttaagaagaaattaacctcactgggtttaaaagtaaaagttcttgagtatgacgattgcaagaagttgaatatgttctgttacttatcagttgcacaggggagcaaatttcctccaaaattcctccacgcagtttataaacccgagggagaagttaagaaaagacttgcattcgtaggaaaaggcttaatgttcgattccggaggctacaacataaaggtgatttttaatatattcacagtcataaaagtttatacataactgtaattaatttgtgtttagagctccagtagtatgatccattatatgaagctggatatggccggatttggcacagttttctcagccgcttatgcattggcaaagttgaagccgaataacgtagaacttcacttcgttggaggtttatgtgaaaacatgcttgacgctaactcatacagacctggcgatgttgtcaccgcctcaaatggaaaaactgttgaagtaccagactacacatattaattgtgtttatattgttaaatacgaattctatattgtttaggtattgaatacggatgctgaaggaagagtaacactggcggattcgttgtattatgcagctcaacttaatcctgactaccttgttgattgcgcaacattaacaggcgcagccatggtagctctgggtaattgaacatttatccctatataatacccaattacgtactcatgattaacaaatgattaggcgtaaagtgtgcagcattttactccaatgacgaagatctagcactattatacgaaaattcgtacgttaaatcaaatatttatttattaaacttttacacgcaatatatctgttttagggctagaaacgctggtgagttgatgtggagaatgccgttgctgaaggactataaggatttgctaaagtcgaacatagccgactatgcaaacgttaactttaatggaaagtgcgggtcaataaacggggctctgttcctaaaagagtttgtcgacgatgtaagataatgaattttatattttattttagaaaaaatggctccatgtcgactttgcgggacctgtattcgatttcaagaatgaaaagggaactggatttggagttttgacacttctcaatttcgtcctatcattgacataaaaattacaaaatcaagttaacaacattggaactgtaatgataagattagaaaatcaataatgtagtacttacacatcatggtgctattattgtctaataaatcagtatattgagtttattttattattttgttaagtttatatattttaatgattttttttaatttactgtaaaatatagtaactttataacattttgtgtatttcttttttcataatttattgagattctcgaattaattttttaattttatttttttaacttaatgattaaatttatcattgattagaaattcatttaacttgattaatttgaaatgtgtacggcatcacctaacaagcttgaaaggttatcgcatgaatatttcgtttcatcgcttagaacttggtgtaattctcaaaatgaccagacaaagactttaaatctagtaaaatcggaatgggttaatagaattacgaataaattaacctccacatctaaagttgatttaatgaaactaatgacattaactggcctttatgaggttgaattagactttataaaactctcggttccaaccctaatttacttttcaactctgtataacagtggatatggctgtgaagactcttgcttactacttactgagtggtccaataacactaacacagatgttagtttacagttaaactctggtgaattcgtgtataacccaatttatattaaccgtgaaaggttcaagaatttattgttgaagatgttaaattctccatctagagataagagaattagaagaatacagatatatttatctaatccagactcttttgaccatactaacatggatttattattaagcacttgtgaagaacacagtccaagttctatttcccagctatcaaactctactaaagactcaaaattagtgcccaaatcacctaaatctacgcctaatcctaaccctaattcatcagttttaacgccaaattcaagtaaaatacttgaattacttgaccaatctaagcttccaaagctcttcatcgagtatatcgaacccaccaaaggattattcaaactctaatctaatgtactttaaatatactaaattgtccactataactaattgaatatgtgtatagtataaaattatctccttggataatagtttgagtatgtgttgtggcttcttggcgttccaccaagtggcacgaggttagtggaatttgaaaacggccttccataaccgccccaacgcctttgctctgttccgtatgaacgttcgtttgctaatttctgtaattccggagggatctcctggttcgcctccctcatcaacttcaccaactcacgcgcactcttaaacttatccggagttaaaaacgtatacgaacttcctacaaatacattagacattaatttgaacaactgtataatcatggttaataatattatttctactgttaactaaggtgaataactaataatatactaaatcaatagtgcggatgatagaatagtgtgaataatacctttcattccggcgcgtccggttctcccgatacgatgtacgtaatcttcgatttgtccggggaaatcatagttgataacgtatttaacgtcacggacgtcaaggcctctgctggcgacgtcggtggcgatcatgatggggtgttttcccgatttaaactcgttgagcacccaggtcctttcctcctgtttcttatccccgtggatgcaaagtgctggccagccatctagtctaagttctcttgtaagtgtgtcagctcctttcttcgtttctgagaagattaagatctttccgccgtccattagtttttttagtagttccttgagtttgacgcgtttttctctctcctcaaggataaacacgttctgctcaatgttatggcaagtggtaaggtctagtgatccgatattaacatgaacaacttcatgactcagcagcgatcttgaaagtgcaattacttccttaggccaagttgcgctgaacattagagtctgcctgtctggtctaatctgtcctacgattttcctaatctgaggctcaaatcccatatccagcatcctgtccgcttcatccaacactaaatatgttactcttcttaaatttgtaacactcgactctagaaagtcgattaatcttccgggacaggcaattaaaatctcaacacctctcctcaacgctatggtttgaaaccgctttggtacaccaccgtatgctacacttgtctttaatttacttgatctaccaaataccagcgcagtctccttaatttgctccgctaactcacgcgtaggagctaatactaatactatcggaccgtcccccggcctcaataacgcctgcgcatttatatgcactatcgccggcaataaaaatgccaacgtcttaccagatcctacaaatattattccacacaatatttaatagtatataccatgtttcacactatatacaacgtttaatagtatataaatatttaatagtatatacaatagtatacataatttttaaaaatataagagtgaaataaatagaatggtgtggatattaccagtttctgcaatgccgatcatgtcacgaccgctgagagcgatgggccaggattgaacttggattggggtgggttctttaaatccggcagcttcaattgagcttaaaatatatctcgggaacgaagtgtactcaaatttaaccacaggtttaggcacatctctaccatgaactacggttatctccttcgctcttctaatctcatcagcctcttgttgtgtcatggccttaacttcagggtgctccacgtagaaattcttctcaaacttgaccaactcaatttggttccagttcacaggttgtaatccagctcctaagttctcactaccataagatcctccaaaactattgtgaccgggtctgccctggtgattatatcctctaccaccgtagccagaatcatgtgggtttgaactataagatctattcccactataagaagaatgagaataaggcgatctctgttctggatatctttcacctgatggcgcatatctggaatcttgagcatatcttggatccgctggaaacctttgatcctggggatatcttagtcctggcccgtttggtggttgagagtatggcgttggaggttgatgagccatgggtttatcgtaaggtttagtggcgtatttatcgtgatggttctcagaatgccgaccaaatgacttgtcacttttaacgtaaggcctgtatgaagaagaattcctggatggtccgtaaccctgtgccctataagaatatgaagagtcagtagcacgatctgacatttaacaaatttctcaaaaaacttattatattacaaaaccattaatatgttctcatattataaattattaaacagatttagatctggtaaaatatatcatccaaaattgcagaattttaagtctaaactaaagattcgtgtaaaataaatatttgtcacacgaaattaataagataattttgtaaataatttaattaatagcataatgtagagatattatatgaatggggtggaagatactaaataattattaatttttaacttccattgagaaatataattatgttaataaaaaattcataatattcgctttataattattaaatctttcagattccaaagttaaaaattaagattctttagacatttaaaacacttcagtctatacaattaatttattatattaaaatatttattattatttatcatttaattttttatcttatgtgtacaattcaatagttaatagaggttgattgactaatttctcctatgtttgatatatgacaaagagtcaaaattttttgaagattctttagttaattatgatctaaaatatatttaaatttatttggaatagaaattgttataataagacgttaatttgtaaaagtgtgttgatcttgttattttacccttttaagccctataaagttagaaacggattcaatggagtcagatttaataataatattttttactctagttcagtgattcttctttcatttattttgcatatattttcttgctcttacacattttttctctaaactataatttatacgatgttttgcttatatcaatgtatgtctttaatgattagagcgcttaatctctccactttcagctagttgatttttcaaatgattcactctgatctttagcaaattcctctcttttattactttgttgatcctattgaatatttttctagaatacttgacacagtttattgaaaaaaagtaacatatggcagccaatcgagtaacttacaacgtgggaacttctaataaattcgccgctttttatgacgacactgaccctgaaaagctaacacgtaactcctgcgcaggatctacaaaattctttccagcttccaaaggtgtgttgttttctagatctatacattttgtagcacattttttattttctatcttattatttttactcatcttgtaaatattccgtcacttttgttactgttaacctcattttttccattatctcattactttatcccactttatttccaatctttacaccatcttaacactgtactcttttcctactaaccataaatattcattactatttattaatattatatcgtattaatattatattgtattaatattatgtgattatcaatattttaggtcaaattcctgaggaactgtacgacgtgacagtaaatagcgttcaattgaatagtcacccggtgaatacaaatactactccggtagttcaaatgaactcaccaagcaccgtaaacagcttgaatactgtggtgagcactgtcaacagtgtgagtagtgtgaacgctaatagtgcggtgagtaacgctccagtgtatacggatgataacatatttgataccagggctaagggtaggaggccgagtcgtcgtttccgtggaaaccctaacgggccacgtcgttttgatcgcgttagtggcactggtcgcggtcgcgagctcaagaaacagggcgagggaggacacaactgggggagtgtttcaaaactatctaatgaacccctagaagacgatcaactcaacgagtcactcaataacctcactctaaacggtaataacaattctaaagggggtgacacaaaggtgcataaggacgaggagaaatccaagtctaagagagacgataagaagaagagtgacatgatggattatgaatcttataagttgttgcagcaatcgaagaggacgaacttgccaacgtttactgtgaatgatgacgtgaaggtttcaaccgaccaggagctccagaacgacggctacgtgaagtacgtcaagaaggttgaggacaacaagttggtggagaaggtcaaggtcatcaactctcacgcgaacagtaacccactcaacgtacttcccaaccacccctcctctttcagggatcgaaaatcatctaaacctaaacaaaaactcaccaaatccgtatctccatactattttaattatttttagggaggtagaatcagagtaaaggcgccagatttggcagatttaaaactttttccatgtctcgacttaaagtcctaatctcatatacatactcttatacattcattcacttaaattattactcttaattactcttaatcgattttactattttactcttatagtagattttactcatttactcttattttgagttttaagttacttttttgtaccgaccatagcagttaacgtattcagttgactcagccagtcatctaaaaatcattaatacgttaaaattaagtttaaaaattatataaaagtgagattataccgtttgattgttgtagtttatttgacgattgcgaaggttgtaattccgcgtttgtgacaataccaatgagcctaaacataatacaactaataatttatacgtcggagtgcttaatccttctggtaagtgtttatcgaaaagtggatttcccggagcgcaaatgtatatattatggtcatttcccaagggtgatacgccaatctgcaaaatcattaggtcaacagagtaaataattatttgcgtaccctatttttagatttgaagtagtcgatatattctttaaatggttcgattttaagattatttgaggagtgtatggaaaacactgccaagggcacgttctttgaagcttcctcccacttcagacgatgagttatgttaatagtctcaactgaagcatttaaaaacgtggaacattgaccgcttatctttatcgccaaagtctcagtcaacttcttaccattacgcgccaaattaccctgccataccaggttctacacaatcagttattcaataatattataaattatgttaataaatgataatattagatataaaataatataaatagtgtttacatacggttttgctgaagattgtttcgggagttgcggtttttggcggttccggttttggaggtggaaaaactagctcacgttgaggtggaactacgggtggttgaggtgggaaaggcgctgtagtagggaaagctggttgtaaaggcttgacaggtttactttgttgagttggcggtggctcagcaggcggagatctgggcttagagaagatatgaggagcgtggagcttcaactgctcacataaccttatcttagtctttggctgagaaaatcccatttaaataaattaaaacaacataaaatataaaatttaaaaatctcatcaccacagttacataacacagtaaataagattctactgtataatattaaattttgatgttaaaatttttaccaattttgaggattaaattggtgatttagaaaacttaataattgatagttcctcgccaagaaccttccttgtctctagaatctgaagaattatttgtgattccaaagttactctacagttgaaatttttttcctcgattaattttagaatttcatttattttatttctcttttccaacaactgatcaaataatttactttttttcttaccaaatacacatatcctccagcagatatatacccctaaacaatattattacgaagtatataatattatgttatactacataccgatacggagttaataaacttgacaatggtttctgagccgttaattccgccattccaggccctgtcaatcatgtcaatgctaccctccaaatctccaacaacataaggctacaaatgggttaattaactaactatgtatagtataagcttatttgttactggattgaagaggataatgtcaaatttgaagtttgtgaggttgttgaagaggtccatacaaatacactccgagtaattatttactttatttgacataatcatttgagatgtactcaaacaagccagaggatttatatcagttgatatacacatgggaataatatgccctggcttatttacatctgttagaaataggtttaggatataagttgaaatataaccacttccacaactgaaaacagaatgttttaatacgaaagttaccctaattctagtattaaaactggattgagtgttgaaatattgtgaaaatccttgtgtaaagtgtcaacaaagaagaaagtgtcttcacttggtatgtacacactcttcttatattcttcagtatatacaacagaataatctacgctatagaaatgttattatagtatacttagaatagtatttgtatgtattacatgttattcatggattaattatcttttaattttgtcggcgcttgtttcagcaaagttctatcaatttcatccttctaataattattatttgagtatatatttggtaaataattcaatagatggttacaatcatggaatggtgtagccaggtgaatcggtcagagatgatttcgtccatattcagcttcttcagcctcaacgtccaatataattcctaatccacaattaattaacattattaattaataatataaattatgtgaattcgattctactttggagtattcgtagagaaatggaaatgcaaggattccaacacataaagggcccaaataccttctcctactctttgccaacgtatttaacattatataacacagtaaattaaaattaatgtaaataaactaaataatgtaaataaattggaaaatggaatgtccacacaaatagcgtagatgtaaaatttgaggagattaatttaaatctattaattctatagaaggcttcttctgaatactttccgtgtctgtagtacgattaacagacatagaatttgcaggtgtcgactctgggtggttcagtactgttgaggaggactgagttcttgacactgatacgtacggcggtattggtattttagcctgagaatccactcttctagacactgaaccacctgcagtaccattctccaacactgtaccattaccaaatacaccgctattggaggtatcaaaaacggtactggtatgcagtagcggagttgtggtatcggaaaggtttggagaggctgggaaatctgattcgaaatgcgcttcattgaatcttcggtatcggttctgacctgtggctggtccatgtctaccagccatgttcaacactctcataaaataatgcacagggttaaacttgacaactccttttatgtatagtattgttagtattactacgaggagatgtatgattcccacggccatgcaggccttagaggccgttggaacacgctcaggctctaactctacgttaagtttcccaaacttcaaatgcacaaacaacgcctgaaataacacaaaattaaacccactactcaaacaaaatatatatccaagcttcttccacatttttacactatcaactattaagcggttttacggtataaaaattgctaagtgtgtgttagatgaaatccttgaagtatgagttgatttgttcgtcgaaaagtttggagcgtatgggcatgtcaactttgtggaagggacacttttgaacataatccgaatacaactcgtaaatataactcaacatcacattcaaatgacctttcgaaggtccattcaaatcacatatcataaatatacacagccctacgaattattaattatagaattttgttaatagtataattattactgagatcagtacctgttaaggtttccaggcactgtagacgaaaataatccgaatcaatatttgttattcctataacaattataacataacaattattacaataataagtaaaataatataataagtgtaaaagtataataaaagggggaattagggtgaagaacctttaggagagggaatgattgagttgttgtggttgttggagcacaatttgatggagatggttgacaagccgtgtaaagtacttgctaatcgaattatatcattagaattcaaagtatcgttaccactcaaacactaaaccaacattaaatcaatttattaattaataattgagttagatggtggaaatatgtgtaaaaaggtactttataataaattaaacacccgtgtttatttatcataaatagagataacattgctatttatagcatggtattcaggaaaccaatgagcttggttcaactgaataaacttacataaacatacgtaaaatgtgttcaaatcaacttaaaataatttatacacaataatattaacaaatttaataaacaaaataatgtaaatggaattatttatcattaatcagttgaatcaattccccactcaaactttcaaattataaccaaatctacaaactcaaagttgagattcatagtaatatttgagatgatatgagttatttagcctgttaaaatgcgaataatttggattcgaatacaacaaaataatattataaaattacagataaatattttcaacacatttggtttataattttttaaataattttatgaaattaaaattattaaatttagcattttaatattctcaaaatcgtaaaaatatgcgaaaatttttactatctgatgatactcctaagtgataagattcttctttatgttaacgctataattcatttttaataatcagactaacctaaaattaatatatttatgaaataaataatataataatcaaatgtgtatgagaatttatggtgtcgtatctattccaataattattaattaaaattaatatttaataattgtattatattttttattaaaaattttcattgtctaacacataaaaattttttccaattaatttcacttctgtacatttccgtgtgtctacaactaactcaataattgtattaataatattaccatttttctaatgtctgctggattaatttgggagcgttgtaggcttaatgatgaacttagtaagctcatagcagtcccaaattacaacacaaactcatacaatcacaactattactgtaataatttacaatatgacggcgtgagggacgaggcgagatgtgttttgggaagtacaaactgttttcggaatgatatttactcgttaccacctggcgtggattctaaagtcacaaatctctaccctctgttacaccaaatctatgatgaaagccatgcgttatctgagtacgatctacagaaattagcacacaatattttaaataataattacccccaaaatcaacttaattttacacagtaccgtgactctaatacacattatagagattcatatccgcagtatagagatagcacgtgttatcgtgagtatttggatggtatgggcggctataaaacgcccacatcagtgtttaggaatatattaaatgactatagaccttatgatactaatggtgtgagtgatcccagaggctcaaattttaccagctacaccaggccaactaaccttttcaacactaatttaacaaccattcaatcacaatctgagactcccgagtatcttaatcgtgttgataatgtaaatttggatattccagcggctatcccagtggatacaatggacgttaatcctaacactatggaaaatctatctgtggataaagttaataatatgttcaacacgccaaattatctcaattccgtcaattacacagataatctaccatatcacagaaataatgaatatagaccctatgaccagaggactaacgagtatagggggtatgaccagagaactgactatagagtgtatgataaaccggactatgggtatgagatgtataatagtgtggagagaagtgtggatgaatttaggaaggcgtttcagcctgggaacgagtatagaaatgagtatacaactgtggaaacaccaattgcagataccacaagggtaaatgagaactacaatgacgaatttgtctcgtcattcccctttgaaaagagcctaaacaactactttcacaatgactactacgatcatttccaggggtataacagagatatgagaatggatgcgggagtgaattttaacccgaattcaccgctaaaatcaatgatgaatgacgattatcagtacaactatcacacatacgtcacgcctcaaagaccattctactaattttttacactctacatttctatacacatatttaatgtattatttagtcattatttaagaatatttacgattattcaggagtaagggtaaattctgggtggaatggttgttttttggaaaaaattttataaatgataaattctagaaattcctgtggaatccagcaatttaattgatcttctattaaataatagaaaattaaatcaaattaattaatattctcgatagtaaaatgtaaaaattgaatgtcaatgcccgaccctactgagtaatataattaatatatttttataatttaagaatgaatttttaaatattttaaataataatttggaaggtaattagaaatttttaaaagtatagtcaaaatggcattttcatttaaaacgttgtttaaccgtataaggaggggaaatgtacctactacaggttctccagcaaaggtatacactttaggagtattaaattttcttttatttggatttggtaccgcaattagcggtatcactaacggctgcactgaggatatcatcatcggaatcatgcagtttatcatcccttttctaggctggatttggtctgtaatttggggcttcctcatgatatcagataagttcagggaatccaaatacccaggagctcactccaccctgatctacgatgaggtttaacaccgacttgtactataccgcacctaattctcttttccaccaatacttctaatttattactattttattctacacaattattttatacttttttagagttatttgtttatgttggattgggggatattttggggattttcttgtatttggccgtatagtgccacagctcatgccacatcactgtgatccaaatctttatatatttaatttttgtgtagattaatttaagcttcatccagagattttatatttttaacgccattttccagctttttgcaattttctcaatttttaacacaaattttcaatttagtacttttaatttggatttttcactgaatttttatagttatttccatattttcctgtgatttcaacatttttcaaatcatgtgtaatataacccctttttgacccttttaaacccttttaaacataatttatcataattttaacgtaattcatcactttttaaacatatttgaacataattttaacgatttcaagattatttcaggatatttcaagattatttcaggatatttcaagattatttaagataattttaacgaaatttaaaatttttaacgtttttgtaaaatatttattggctgaattttgattttaaaatgttagttttcatttcaaagtaatagtaaaatttgtaaaatgtcgtctgggtgtattcgaatctcccagcaaaactactacagcactcacaacgccctggtcgccagcgtcgatgatcagtctgtacgcttcgttctccatgaactcgaaggcaccagacatggagcgctacgcatctttccattctacgatattcaagtatttttacaccactcattctattttactagttatactattttactagttatactattttactagttatactattttactagttatactattttactagttatactattttactaattatactattttactaattatactattttactaattatactattttactaattatactattttactaattatagtatttactcaattatatactttcatggctaaattgtgtattttagatgataaagcgattattgataaagaagttatcgttgccgatgagtacaagggtgaaggacttgcgtatcctttacaagggccaggaattaccaaattatcgtaccatggactgttacattaataactccaaacgcgacgataaactctactggtgcctcaaacaatcaccccaaggatccggaatacgacccctcggtaattcttacccctatttatagttatactatagttaattagtatatatataattatatagtatacagtataaaaatgtgtaggaatgaagatgaatatgagaatgcaggagttgtttaacgaagttgcaatttcaatgaaaaacaacattaaacccaaactcaccctcgatggcaccggtacatctcatggagtttactcctctttacacactattacgcattcagtgttaaataactctttacactaaactctatactagttactaataatttacgtaatattaaatcgatttgataggaggtacatatgagattagtaatttgagtgggaagtgtgtgggtatatttaagccttgtgacgaggaggcgtttacgccgtataaccctcggggttacactgggactatgaaccagcagggcttcaggccaggcgtactctccggcgaaggcgccaccagagaagtggcagcctatctcttagacgcaacctataaaaattttgccaatgtcccaacgacgatcatggtggaaatcgcacaccagtcactcaataactcaaacaccaataacctcaccaataactacctctccttcaactccaacgccatcaccgataattccataggtacaatctatcctatttttcccctaattttactatagttatcttgtactatagttgagtattactatagttatcttgtactatagttatgtattactgtagttgtgtaaattgtgttaaaggataaaatctgtgtttttagggaggttggggagttttggcggtactggctccgtaaatgcattaaagtggaagattgggagtttgcaagagtttgtggtatcaaggggcacgagtggaaattacaattacaacttcttcagcgtggaagacgtgcacaaaatcgcaatcctagacatcagactcctcaacctcgatcgcaacgactgcaatatcctagtcaccagctcacaaaccaccaacagcaccagcaccgaaaatccataccctaacacataccctaactcaccataccctaacacataccctaactcaccataccctaacgcatacggtaatacatatggtaatacatatggtgagcaaattacacatgctgtggagggtacgcgtatggcgtctgaaacgcctgctagaactggtaacatagagaataagaaagatgagaaatataaattggtgccgattgatcacggattgatattgcctgacataattgacatttgtgacttggactgggtgtggtatcactggccgcagtgtaaggtgcccttcagtgcccaggaacttgagctgatcttctccttcaacgtggacaaagacattgagctgctgcggaagtatttacacattcgcgaggagtgcctcaggaccatcaaggtgacgacaaagttcctacaaatcgccgcctcaatgaatttaaacctcttccaaatcgccaccatcatcgtcagacatgacatcgacgttccctctgaactcgaaatcatcatcaccaaagccatcgaacaagtattttaacctagttatctgtagtagtcagggtagttattctagtagttatgtgtagttgtgtgtagtagttatgtgtagtagttagggtagttatggagtattttaggtatttagtactaaacccagacacgccctacacgggctcaaaaacacccttccccagccataaaccactaccaaacaactgtgaaaaatattataggcgtataagatgagtgataatacgagtataataagtaggaacaggttgggtaatataatagacttgatggaaaacaccattaatcccatcatcaccggcgaacacactgaacccactgtacagcctgtagcaccaaatgacactgaagatgactcgactcacgcagatttggacacttccgaactaccctcgtcaactttcttccactatccctcacaaaccgatactgatcacagagatactgataacactggtgataacactaacagatatactgataacacgggtgataacagaggtgacaacagtatgagagatgttgacatggataagataagaacaaagagtacgataagaagaataagaaagagtacggtgagtaataatacgtggacgatttcggattcgggcgggcatccaatcctgatcgagtgggatgaaaagtttaataatttattcttcaagattttggaggagatgctcgtgggaaacgtacagaggctgcacccaaattggaacacatacccctccaacggaaaccaacggcacattcaccaaaatacaacactcccctttaaaaccatttggttcaactaatatatacaatcatttacaatattatagttatacagtgtatatgacgtttggttgtttattgtatgttagttggattaggctgttaatgtattttccagtgaattcgctgtgtaatttagggtttatacgtatactaatgtgattttcaccgtcttttactcgttttctcaggctagtaatgacatttacaagctcgtcaaataattgatcggattcagtgtccacagtgtgtttaggccactgattgacaaaagtgtttagtttgaaggattgtacaaaagttggcgtaaatggatacattattgcggttaattctgtgaaatattgattaaaatgttgaatattctgagaattcatttggaaactgagtcttattagtggtatgaggaagtctgagaagattttaacgtattcgtttaaatttgttacacagtttgaaaagtcaaatttcgacaaattctcctccaatttaacacataatttagctaatctactacgaattagcttttccaccactggatctgagttactttcagtaacactatgactactgttaacactgtcacgtgtgtttttctgttggaacttgaagatttggtaatatttgaagagaatattttgataattaaaagtattatttaacggctgtgtaaagtccgaaaaactacaaattgaacataatcttaacctcaccatgttcgatcggatcatttcatcagtgttacgaatgtcatcagtgttagtagatgtgaataaatgaagatcgaaagagtttgtttgttctgattgtattaaatcttgtaggattaaagtgttttggtgtgatttggacattttcttcccgaacggatcgggcaccattccgtgcaaatatacttcactgaataacttattttcatcaatgttagaacaaattagtaacattttaacgatccaattctccaaaatatcataacacgtaaataaaatactgcgggtcacaggggtatttgtatgtgtaatcatgggccataacgatgatgtaaaccatgtatctaaaactctggtctcaaccgtgttatcagtattagtgaggtttggcgtaattccccaccaggcattcctggtaatgcaccaatctttaatattttttaacctattgtggatcatagattttctactctctgggtacacttttatcatatccaatacttctaacgccttgatagataaagttttagtttccagcacatattgtaactgtggtactatacacactttagcatttcggtcgtgggtgtatttgggcatatccaccgtaacattcgtcatgggtttcagtatgtcctgaagattccgtttcatattagccaaatttggacactcggaactagtgcccaggttaataatttctagatctggatcgtgataatcattgtaaccattggctaataatatgcccagattcatttccttgacactttgggacaagctggtattaacattattcatgcttatgatgggaactttcctattaatctttggtaaatctacaaatttcccctttaaacgtgtgaatatgtcatttggaacagctactgatgttgtagcgaggtaaaattctggaatctgtgtacacactttcagatcaatcaggtcaccatttacagcttcaatttccaaattcatagagtataaactaacattttcctgtgtataatatatgtcagctgaggaaactggtgtaaacttatcatttgtgtgtatggaaggagttggccagagtttctccttaagtaggccaagtgactggaaatgatttaatactttgttggccagtgattccacatctttatcaagtgtaaaatgtccgatttcccagtcaattccaagtctcctaatgtcatttacatgcctgtttcttatttctttacacatcaaattagccaattccagcttttcttgtgagtttcccgagtttaaagagtttccagaatttgccgaatcgtgtgaatttgccgaatttccagagttaattctattcccctgagactcaaagattttttgaaaagactggcccgcgtgatcgttggaaaagttaatactaactttaaatccctttaattttaagtaatttttatacacatcggaacatacaagattcagtaaattgccaacgtgcaaatcaccagttacattcggtggcggtgttattatcctcaccaacccattgttcacattattattacttagtttacagaggggattttgaggtaaattgaggggatttggtgataaactgagcgaatttaggggtgaatttaaagaatttatgggtaaatttgtggaatcttgaggtttgatggaatcttttatggtacaaaattttctgtttgtaaaggttaaattgtgaaaaaaatgactaataaaattatatttaacacagtaaataccagatattatacataaaaatattatattcatactaattacatccacttttccacacatctaacacgtgtataacatttacctagcaaaactctgtatattgtgtaaaactctgcacattgtataactctgtatattatgtaaaactctgtagaatgtgttaaatgagtggaaatttgaagttgtgtatttcttttcttttcctgatgattgagcagagcacggcgttttggtggtacatgtccttgaacagatccctgagcatgagtatttgtagtctcatttttatcaggagtttcagatttgggcccactgcgttgtgtagcaaactatgttcctggcacagcgctatgtaatctgtaggggtatagaagtctaacaccagcttattcttcaaggcgcaattggggtgaaatctgttcaaacagcctttcctaaaacatttaatcgttagtccttctcgttccaaacataaacaacagtgccctctggtctcactagttaccaaattaccaactttatcccgcaattccatcctgcgttgacaagtgttaaacttgttattgtaaagcgtatagcagacgatgtgatagtacgaggtgtgatttgtgtgtttgatgagaatgtcgtcactgtgatgacacaggaaacagcgcagattcgtgctcccagagacacacttaacacacttgaacgtattccccagcctaaagggataacagtgcctatgtaaaattatgccacagttaacgcagttgatctcacatcccgggcatttggcggatttagtaaatgtgccacaggtaccagaatgacatattgcacattctggtaacgttggaacgggcttaatagccgaaggatcgattctactaggccgcttcttatcacttatcacatccctgctcaagtaattacacggtctggcaagtaaattgtccaggttacaagtacacttgttacagcagacagtgagcgaattatcccctggagtaaagctaaatccctggaaataaccacaatacgcatggaattttataccacatccacaactcaacatcaacccaatcttcaatctacacactatacactccggtccatccgtactatttacactactctttacaccactattaacaatagtatttgtagtagaatttacagtggtaaaattgttggtacaattgttcttgtaccttgcaccgttacgggattgtacggtatagtagtgtagaatgaggcagagattatggaaccagaaatcggtgattttgatgaaaacgcccgagccgcgtttgcataaattgcagagaattgaaaacttcttaaacgtgatttggttctgtttcttctcgtgctcacagcggttacagagatattcagtgttactcttgcggtacacgttgtaacagtacttatgcacatacactaaacatctgacacacttgaacagggtgttaatgttactttcctccacattaaaacatatttgacagcgctttatcaagtccacgtcctctaactcgtagatattttgtacaccagtgggtaatcccgtgtgtggctgtgcactgttagatttcgggattaaacctttgacatcctttctaacttgtaacttaccaactgtggtattattgtctgagaacaacttcttgagactgtatagaagataatagttgtattcatttttgttatatttgttgattgtgttttgaagtgagaggagggagttctggttcatattcagtgtgatatcatttaaaatattatttgacaaattacgcttcaacattagtaactcgttgttcaactgatggatctcagtatttatcagtttaaactcatttacaagcaccttttcatccaccctcggaacctgatcggcagtgctgttcccgctcacgacgttgtactcgctgtatttaagaggcgtttcaccgttggtaatgttgaagttgataattttattccagtttattgtgtttaatccaatcacatcgttgagtctcatggtgcccataccgttaccactgccggagtttactccaacacagttgcccgaattaacgagtaatagtgagacgttatagtgtgtgagttgtagtattgagcgttttaggagttcgctttcaaattggtttatacttatgctcttgactaatcttaggcctagctcggtgttacagagttcagagttcagtgagctgaactctgagttattaataatatatttaatatcgtcgtggacgttgtagacatcgttaaatcgatccacgtagcataaatcagtcaactgattcatcgggtttagcaataaattggcactggtatcctcctccggaggtacaatttgatatatcagcacgtgattattaatattattttcaaataatatgtagacaaatttatcttcctgctcttctacgggcaggatacatttatccctgttcctagcgtttacagtgatgaactttagtaaactaatgacgttcgaacagttgtgtaacaattgctgctggaaacagtaatttaactcctcaacgttaaaaatgttatcaaacagcacagagttcagcgggagtaacgattcccgcttctgagggtttatcatctgacttatcaagtcaccctcaagtcgaggattattcccactaaatatgtccaacttgttccataacaccttttgcaccttcatatcaagctcatccacaacttctgcacccaccccttctcccttagcaccatttaccacattatttactatagtatttggtacattatttactatagtaccatttggtacaatatttggtataggagcattaactgtggtgactgttgtagtattatttgatgtaatgttagtatttaagcttgtgttagtgtttgtagtctcaattttgagctcatcatttggttctgtaggcgcgtttagaggtacttggtcacctgtgggatcaccagaagtatcctctgtgtgtctaattttctttacagagttactcgccaggggttcaattaactttcttttatccggaaatctatcccctgtaacgagatcactagtgtattgatgttgtagattgagtggtatggagttgggttcaggagtgtgtggcacgaaatgtgtaaattcatacggccgcgtatgaataaatttgtcaatcacactattaatgttatctttactattatgattactacagaatattcccttaaacagtactatagaactggatttacccccagtacccaatgtaccctgggtactatcactgagggtaatatatttataaactatggtatgcctttttttcttgagtttggtattgagaatgcatcttggatgtaggaattgtgtgcagttttcgttactacagcgtgtcaggatcccgtccgactcttcgcacaccacacactccagacccaatttctcattattttcattatttgacagcagaaacttgttaaactcgtttacactcgaggtgttaagttctgtggaactgttgaacattaaactggtggtaaaaaacttattcacctgctcataacagtaaagagcacaaaacggatgataaaacacttctccggaatttattatcccgttgtaattattacaaatcacacacctcacccttttaacagtgctcttcttcttattctttctattataacatattttacatatgtattcatagtccactgggtgatccgcagcatcctccagcacactgtcactctgtaccacaccattatctcctacagtattatctcccaatgtattatctcctacagtattagtgtgtggtagtgtagtatctcctaatgtattactatgtggcagtgtactgtgtgtagtagtgagaggagtgagatgggtgatgatattggtgaaattgagaaggcagtgggtgtgagatttgatgttacagtatttacatgtggagacagattgaatagaattattcaatttggtataacaaacatcacaatttttagtattctcacttaagtcctcctcagttacgtattccacagtaccatcagtaactgtggagatattctgagcatcgtttgaatcatctgctggataattatgtgacttgggaagtctgaagatgttgtgaaaaacggagtggtagaagttgaagtaattttgtgagaggaaagattcgtttaagttattatcaaatttataattatcgtagtgaattaacgctgtgacgtagtttgaacgctgttcgtttatgtttgtgttatctaactggacctttatctcctcatccagctccctcttaatcattataatttgtctatggaattagtaatttttagcattctagtttcagaatgttctagaacaaattttagtacaagatgaataaattattcattttataatacacaaaattaaaaataaaaatattatattaaatataaaatacaattataaaataaattatttttatttattgatgtcgtggtcccaatttgagtaatttgtgacagaaaatgacttttataatttttaaaaaatattataaattatttaatttaaatttatgtttaattttattttaatatttaattttttgaattatatttaatttatttgttataatgtgtcgaattttggattctttgaatattttttaaaaataacaatttatatatataataaatcagtttattaataattttaatcatatttttactatataaaatcaggaaaataatatttttggcatttatgagattatatctaactccgtctccctttttgtacgtgttttttctttaaatcttgattatagattaaatttattataatttacaactaatttatttgatttaaatacattagaatataaatttgttgatttgtgtgaaagtagtattttaccccgcaactgtactttttacccttgtaaaagccttgataatgagctctttaggcccttttagaagtgtgttcacttcccttatatacttctcaatcctacacattctcggctttacatcactattcaatttttacaccactgatagcactggtttcttctttgttgactcagcagtgaccggaaacataacccaatgtgttagaaatagcgataaactcttcgatgatcaaacttgtgtacaaagattgcacaccaacgtcgatgtctcacatggactcgtatcctcatccacacaatacttagttatccacacactgcttagttatgtcttatgtttagttatactattagtatagacattaaactctgagttcctggttatgacaattttgtagagggagtaccattacatatatagaagaaaagatgatttatctaagggattatacttggtgttaaagacctcaaacacttctctactctacactctcaattatcaaactgtaacatatcaaaatagttaaataataatttgtagatggtcccgttgtattatacggatcatacggagaggtggacgtatagtgagatttcaggtgagttgaagacctcgtgtaagagtgtgcaaaattctaaatgcactaaaaaaactcaagttccaccaggtattgatttcttacccagagtctgctgtatctgcggactgaacgtacataaaccaacgccaagagctgattttaaatgcggaggtaacatactacccagtttactatttacccgataatattatttactctaatattatttactctaatattatttactctaatattatttacttaatactataatgtgataatttggttaattttgtgatttaggatttctggctatgggaggtaggacagcgttgagtatgagttgtttggagataagtgagccctggtataagctttacaagaccagttacccaccagccataagcagaagtgttactgttaacatttacaaattcgattcatccactggaattatcccagacggtactcactatgaattattcagtcttgcacaattactctattatatataaaaataattgtataattagtgacattggaggatgaggataaatttgataattatgactttaagaagcgggagaagaaggacccggtgatcaagtcaccggagatcaaatcacgctccactaaagaaataacgggaaaaaaagatgaattacaccccaatttcagacgcatcatcatcgatgataccgtcaaagaagaacatatcagtatctcgaattagtcacagttactcagttaccctactacacaatagataaatatgtgttaatcttgtatcagatgatttggatgtgaagataacgctgttgtcgagtaatacgaaggatggctctgcgcccccgttatttgataaatacgtagccataccatcattcccaagaaccaatgaaaccgtcaaaggctcatcactcatggtaacacacaatattattaatattttgtaggacaaatgtcaagacagcacctggaaaaccaaacccgaatgtcccaaatgtatctcacccacataattacacatacttaaacactttttatacacttagttatagtattagttatagtattagttatacacatatggagtacaaattgtgtgtagatatgaatccatcgttgtgtgatatatggcgttgtacgttgaatatgaggactgtgaagatgagtgcggtggatacggatgggttgatgtgtgataaaatcggcttatcaatgaagaggtgggcaaaccaagaggaaatttgtaactcaagccccggctcatgcctcaaaaatcagctgaaacactacttcgatcaggaaaaagatgaggtaaaacacacgtaaataattatgttataggccaaattaccaaaattgtacggagtagagccaacgtttacagcggttaaaaaagatctgtcattaccagcagtaaaggaagcaaataaaacaactctggatgatccaaacagaattcacactctcacttatatccactctaaggacgatgttaccagacttaaaatcgataccttcgacgccacagtcaccgaaatcatctccgatttccccgggttcatcgtctccgcaaagtaatttttacacagttacactataccacagagttattagtacattttaagtattattactgagaggtaataattgtgttttaggatggacggagagtgtgaggtatcttcggagaaaggctgtaacatggaattggacgttaaaaacatgggtaaatttacacacaaaaatagtattttaggggttaagaagtcggaatttaccgttagagcgaattgttatgatgatcctgaccttaaaaatgaagttgctcagatttctgaaactacactcagtatcgacgggaataaaaataaaaccgtctctataccaatcaaactcacaggatcactcgctagtgaaaaaggatactgcaacatcattctcctttccggtaatcaacttaccctaccatactattcactattctcactacactattcacttttctgactagactatttagtattctcactagactattcacttttctgactagactatttagtattctcactagactatttacttacacctgaacgtaataaaattgtataggaaagaaggagatgttggatggtatgaagatggagataaaggtgaaggtgaagaaggagacgtttggtaaggatccggttaaggtccaggatatagtggctgctcctagtcctaaggataaattaaccgtaactcacaaactatgcttacatataattttatgattatttatcctcggtatgtccaaataataattatttttagactcctcaagtgattaacccgattgtcattaaccaacccgggtctaaaaatgacactaaaaaagaggaagagtcacaatgcaaatgcgcgtcctggaatatcttctgcatgctcatcaactgtaaacactatttagtccaatcagatacttcatagatactcttaccatgtaaataccctagtatagtattaatacttgtgtagttaagatatgtgtttcgtcttatgtgagtaaggtattattttacgtgttgattgcacttggaattttattgcttttgattttgttgccggtgttgattccgttaattgttagtctctttaaggctctcgctggactcatcaaaacaccactcgaagccctcgaacaaagaagattaaagaaaaaaaacaatacacaacttgaagtttaacccataaacttattacatttattttactcattctttcgtctagtacgtatattgtacatagtatacttccaattacatacaccatctacacttatgtatatacaatatctatactttgtgtatacagggtatgatacaaatgtgtatgtgtataatagttaatgtgtaaatgattatattacatttataaaaggctgcagcatttattcttgttgattttatctttattggcatcatctttgaggggtttggatgaggatttggagctgttggatgcagttttgtcccagcggaacgggtcctttgaaatctcctgtgccagcaactcgaacacgtaacttatgttcttgccagttttggcactggtttcaacaaatgaaattgactgctccctggcgtatgccttagcattcgctagagtttgtagggtctctggagtattcccgagtaaatcaactttattcccaaccaacacaattatcgtctcattgttattggcgacacggatttgattaacccaaaacgccgcgtgttgcagcgtaggtggtgaagagatatcaagaataacaatggcacaggcggcacctctgtagtatatcggagctatactcttaaaacgctcctgacccgccgtatcccaaatgtcaaacttaatcgttatattctcatcataacttgatcccaccggagttctaagatcagattgtgtatttctaagatcctgatttgttctaagatcaggagttatggttctgtctgactgggtgatggttctgtctgactgggtgatagttctgtctgtgtgagtgcttcggtcagactgggagattattgaagttcgtccagactgtgagattattgaactttgttgagattgcgatggtccatcagataatttatcggtaaatttcccgtcagaattgatatttagacgtttctgggggtctgagtagtcgttgtgtacggtgtaggtgaagaaagcggctccgattgtggagtttgtgttatctgagaattcgcccttggttagtcttactgcgaaacttgattttcctactgaagcgtcaccaagcaagacagtcttataactacgcttcatcacagaaatatccaacaacctcaatcatacattaaaagtataatattttacttattttccaacttttaacaaggagatttattataaaattgttattcttgaaattttcgggttaaagaactgagaaattttgagcctggatttggctaaaataaaaacaattgaaatgaatatattacactgaaaaatgtttaaaatatgagaaaaacagggtaaaaaagtgatagacaggttagtctcggaaattcgacataaaactaaagttactaaaaacgattaattagaaattacaaataatgataggataataatttaaaatggttagttaaagttggaagtaatgattagaattcacagtggtgcttctgatcctcggattgggtgttgttacaaaataattattataaattaaccttacacatttaattttcacaaatttgctaattaaattatttattctgtaaaatataataaattaactcagttgtgtaatgttatgattagaatcccaaatgcttcgcctgtgaatttgtttactaattttgagacgaattgtacttgctattttcatccaaatgtgttaatttacgcactcagaaatcgcatcgcatacctcgccagaaatcataaaatcttctacccacccaaaatccatcaaattaacaattcaacacataataataaagttaatgaaaattctctgtgttcatcggatgttccggggaatttgaggaatgaagtgaatcaaattttatactctctcctcagctgtattgattatattaatcctcaatccacctgcactattctactctctctcatcaaactcgtatcaacacaattacacaattacacatttatacacttaattccctatttacacacctacacatttacacacttagttccctatttacacacttagttacctaattacacacctacacatttacacagttcgctaattataagcttaatttgttaattacataattggtaaaattgtatagagatatgattctgaattgataaggcctttggtgaggaattttaagttttccgaggcgagtccaaagtcgatttcgctcttttttctctctgtctcgaagttatttattaacccacaaatactcgggaccatacttgagcatattaataacgctatagatattccatatggtaggagggatattatatgtatcctgtcctcaattaccagggtcgtcacccggaaagacttacaccttaaacgctctgaaacagatttactaacaaagttacacagtagactaatgaccaaattgtcaaatgagctggaaaattgtaatataaacgagctaacaattgtgctggagtctatgcactctatgaactacagctctcagcattatcaaacggtaatagaatgtattgtgaaacacaacgcactaattacttttgataatgtttatcaaatattccagatcatcaatagtgggaaaaagctcacgagtaacccggtaaaaagggataaacatggcgtgaataacaaactactgctgtattacctggacaaactaacaattaacgaaatcgtcaagattatcaatgactttagaatctacaccaccgatcaattcgtcctccaattctccaacctcattatcaacacaatacacaatcctactagtaacactgtaactggggatacagtaccaggggacactataactagtaacactgtaactgggaacactataactagtaacaatgtaacaagtgtaacacctatgaataatttgaatgtgttggaggtgttgaaatattataatagaagatatgagacgtcggtgacgagagaatattacgtgatgaaccagattaggaggggagtgagtgtggagtgtgacattgcgggcataaatgaggtgagtaacttgtgtgggtatatttaccagttactacacagtgaccatgacattcaacgctgtatcatcaataaacaactaatcctaaacaattatcaacatttcttccagtaatctacagcagttaatgcagagttttgctaccgctgtaggagtaacatgaacactcaccaccagacagcagtagatctcactaggtctaagaactagatctcagcagtagacatcagtagtagattacagtccaagacctcagcactggacagccctagatcacaccgctatacctcaccccgttacggaagtttcataaattttaacgtataaatccataatattctctaaattaactatacaacagtataatttattacgtgctttagattggtttgtcaagtcatctcggaactttataaagtcattatattcatcctaaaatattattacgtgtgtaagaatacgttgatggattgagtgagtgagagcagtttcattaaataagtttcatctccatttagtaattgagttgtcacaaaactaaatattatgtgtgtactaagtatagtatgttgtagctggctggagaatacgattcaatggagagaatggtggaaagtgaggtggatttaacaagttgtaagattacagataatgccaattgcgccggcgtatacaaaaacattaacctacaaattactctgtaatgtataaatagtgtggtgtatagatagtggtgtatacgtgggtgattcgaccatgatgagtgaggtaatttcagcttgtttaaacatgtataagataacgccaatgtattcatttatgccttccacctccaaactctcccttatatactaaagaaattattattcagtttgtcatagttaaggtatttcacgggtgtatccaggactaagtaaaccaaatattaactgtaaatatttagataatagttttcagagtatttaagggttataattaaggaattttatgtttattatcttaattagaggggaggttctaggatttaatagcttaaaaagatgttttataggacttaatttagggtaatttaatcgcaattttaaccaaatttatctatttttagggtaaataatggaaattctcgctctaatagctggataataatagttaaaagtggtatagtacagtagccaggtacctactaaaaccctaattttctatactaattaacaacttttagaaataaataaacgtattttgatgactaaaacgatgtggtaaatgtgttaaaattgtttaatttattagttaaaatttttgaaaaaaaattttttcaggaaccaaatgtcacttttgggtcgaccaaaatggccaaatttcgaaaatttttaaaaattttaaaatttcaaaatatcaacacaaaacaacagatttaacagtgttaagcatcagaaaattataataaagtgaaaattaactgtgtacactgagtaaatagccagtaaactacgtataactacaccatgtataactatgataagtataactatgctaagtagtagttacattgatgagaagttgtatgagaatgtggatggaatcgctgaggtgtaagatgttgaggttgaagttcaaaacgtcgcagactatcgcctccatctcaaacacttctaaaactaatttagtactgacagagttgaaaattgtacttgtgatgttgaggttattaatcttgtataaaagcttgtcaatgtacactgaacgccacatgtcctcaagcttagttgccaatgttatacacgtaaacctataccattagcactgttactccataagtaaatagttacatgataattctgggatcgtattgaagcagtgaacgtcgcaaataaaacctgttaaacaacaccaatgacgtttcctaacaatattttatcaccaaactattgtaaatatgtaaaattcgtgtaaatatgttaaattagtgtgaatatgtactttaactgaaggtttgagattattggcgtttacgaattgcgatagttgaagtgagtaatacttaatgagccataactcctcctcaaaactcggaatcctaacaccgtcacctcctacacatcaaataatcaacacaatctcaataattttcaccaaaaattaaataaacaatctgattccatgggtaaacaatgagtaaacattgtgaaaatatgagtggaaaatgtgaaaaaaagagtgtaaaatgagataaagatacgtttgaggagtttggcggcgtgttggtaagtgtttagttgtatggaattgagtttctgtgtggaatcaatgaaccaatttttataatgtgtggaattcttgactgaattaaactcaattccgcacacacaattctcttccattaataaaaattactattccaggttaattcatgataatattaataatttactgtaaattcctctaatgtatggggaaatggaataaataatttattttatttacagatggattcggtcggtattagagaattaaattatttaatacgtcatctcgacgacgattcccttaacaaaggtaccaacacccagccaacatgttattttagtcttgacggaattatctaaaagtagtaatgtttcaaacatcatcaaagaaacagccccggaaatttataataaatacgtaagtccataatttaccaaattttacataatttaacaaattttccaatttttaacttttttccataatttaccttgtttccataatttaccaaattttctttttttacacattttactacatttttaacattttttaccgttggaacactactggagtataataaccattaatcttatttacaggtgatagactctgagatggtgttgcatgaggctactgggttacagttgatggatgttgacgtttccagtgactctgctgacggtgacgtgcagcttgattcctgtgaccctgaggctgatttcgactacatcgcggtggctaaacttgtccccctgcggctcagtgtcattgagcggaagctgatgcgtttactggagagtactctcacaatctctgaatacacagataaagtcgatgtgatttcaaacacctccaagaaccgtgttatcctaagggaaaccaaggagatattcgcagtgctgactgcgttagcaattgcgtacaactatgacgccgggaagaagctattgaacgagcaagactactacagtaacagggagtttttttgtaatatttttgaaattgggcggaggtataagattttaaaccctgaccgcatgcgctcatcctacgggaagttaatttactttctaatggacacacaaaaacctgaaattaaagaaattcttaattttaacactgtggtacccgttaacactgtttacacttttctacaacgcaagaaaaacggacttaaactactcaacgatccaaacctcaaacacgccatacaatgtaacactagcattaattagttatgtatatagtataggggtatagttaggtattctacggttatagttagtggttaaggtactatggagggggtttctaggcccagtcaagctgtgctatagcactgtgtagacagtttatttacggtttattataattttctgatgattaacagtgttaaatttgttgaaatatgtggaatttagttaaaaataaaattttccaaaattttcgaaatttggccaaattaagctaaattttaagccaacaaatcctagaacctcccctataattaatataataaacataaaattccctaattataacccttaaatactctaaaaactctcaaataaatatctaaaattagttatatttactataaacatttgcttgacttgaccctgatagtatcccttgaccatagcttaactactacaatatacatatactttaaaaattgtaatgtgtaggtataatacctgagaataagagtcgtggtgagatagacatggagatccgtaagaaggaggacgcgataaaatatttggtgaataagtactcgacagtgcattccaccgctggcaggatgttaaacttctcattcctgcaccgtaacttctattccaagctttgttcccacaacagtgatgatgacagtacgtctgatgatccggaattaagtggcgaggatattgaaaagtgtctatactctttgaatgattataatacgaacattgttatatatatcttaccaattaataaaatgattcacctgctcaccacaaattatcatcctgtcaatcccaatcccttaaatccaaatgatccagacagcgctgaatactcagattaccccgtggacggtgctatcttaggatattcgggtgacgaatatgatttgagtataaggtatggcagagacgggagtaggctaaatcacacgcatgataagcagtataattacgtgtaccagactttactactgtggaaagagatttgcacacagttatacaatttatggtactgtgcagagctggatttactaagtgatagtaacagatatcaactcaagaacacaggacagggcctaaacaggatccaggaatgccataacgtatacaacatcatgaggaaaatactaaaaaaagtacaaactaaacttaattatattaactggatcggctcaagcactatacacctgggagaccataacgtccccaactcccttctattcatcgataaatatctacaagtaagtgccattagttgtgtttacctagtattacagtaattttacctagtattacaatactgaggaaaattttcctctcctttttctacccagttgtatacttaaaatattaatactatagttaattatgtccttgatagtctagtgtattgttactatttacttgtacctggaggtcccaggttcgaatcccacctctcacacactattcctaacactattctaagatatttcacattattctaagatattacagatgattatatgatattacaatactgtaaatatgtgtagatccctaggatattaatccctgtattgaattgtgtggatagtttacctcgtttatacacgtcaaacactaatattagatcatatattgacaatgagtttggttcgataactcgtttgaagatgacgattttgactgacttcttcagacatggctttgacggctcaggcgctgataatttcaacgacgccggcagctgcattgacggcagactcacatccgcctggaactggtgtaaccaaatcgaaaagaaaaactactacaacttcttcctcctcaccggcttcaacggattcgacggaagattcaacgaataatatcgtatcacacactattatacatattatacactagtatatattatatatattatacatattatccatattatatattatatattatatatattaagtggtattgtgttagagaagtttgaggaaagaggcgaggttgagtttgattgttggtaggtgtgagatgaggtttgagaattcggttttgttcatcatgagcatgggtttaagaccacagcagaagaccaacgtaggttcaaagtccttacctgtctccaatctcctattcatcacaaatacactcctacccaatggcccaaactatcacacatttttaatagtattgagtaaagtatacagttaaggtatttaggagtatatagttaaggtagtgaagtaagtagttaaaagagtatagtatatagttaaggtatttaggagtatatagttaagggagttaagtaagtagttaagagagttaggagtagttaaggtatggtatggtggagtgaacagtacatatctactatgaatgacaaagtcaagcagaaattggcccggatagtccagtcccgggggaccgccatagggagcttagttatatattactatactatagatatacccattcctatataactatactatagctaatactatagtttggtgtgaataactattgtggattacgttgtttgagatgggaatgtgtgaagttgggggccatccttcgtagatgagtttagatttagactgctccttaacaagttgattaaacttcaataatgaattttttacactttccaacttaattgtcattagaatttaatgaatcaagttgaggaatgattcgttgaatctggtgaactcagaaaaaataattgaacatgttggaccaaataaagtgtgtgataaacaataaaaatgtgaaaaattatgtaaagggtaaaaaaagtgatttgtacgaggaaataaaaaagtatcaatggattaaaatatttaaaagaaaaaagtcagactaagaaaatattaattaaattcttaaaattgtgtaactgagtgtatagaatgaagggattggaattggcgtgtatgatatggaaggttagggtagtgttggaataaatgagtaaaaatccaaaaattaagatgccaattttaaaaagtgtgaaataagataaattaagagtaaaaaaattaatttatggtgagatgtgattaaattgaaggaaatattagaataatggtaaaattgtggaaatctacggataagttgagatgaccctctaagagagtaaaattgatggtaaaaatggtgtggttgttggatagtgttgatgatttgggaaggtattgaatgttagtaatggtaaaccccattgtctatgataacgagtattttaaaagtaagattgtggttatttttcgagtgaaaagcttgggaatattagctaaaataaaaagtatacaaattattatcaaggaccttgtaatatatttacttgcccccctttcatctttttcaccctaataccctcagtaatatccgtgatccgcccgttttacaagttataatttgggaaattaggttaaaaattttgggtacagttgtgaatttccgagtgcgtggtttgtcattatgagtagagagagattggtaaaattttaccggataggttatggatgaagaactgcaaatagttgacgtgtggtctgacaacttagaagatgcatttgacaggatccgtgaccttctggagcagtacccgtacgtgtcaattgacacagagttcccaggaatcgtagtgagaccaacatcatacctcgaggattacaactatcaaactgtaaaatgtaacgtagaccttctcaacatcattcagttgggcttgacgtttgccgactctgatggctcctcaccaaacagtgcctcgacttggcaatttaacttcaaatttgacctccaccatgacatgtacgcccagaactccattgatttgctgaagaattctggcatagattttgaaagtcaccagcgcagaggaattgatttggtccactttggcgagctgatcatgtcatcgggacttgtaatgaacgaggaaattgtctggatttcgttccacggctcttacgatttcgcatatcttctgaagctcctgacctgtaccaacctaccctcgaaccagtcgttgtttttcgagctcttacacgacttcttcccctcactctatgatatcaagtttctcctggatgagaggagtattgagctctcgggcagattatcgctgcagaagctcgcagatcaccttgatgtgaagcgggtaggactccaacatcaagctgggagtgactctctagtaacctcacgcacattcttcaaactcatgcaaagatactttgaaaataaactcgacgatcaaaagtatcagggcattatctacggactgggaaagtctactccgccaacagataaagacgcctacaacagtaccggcacggagcaaaaaaaacccatacaggaactcaatggatacaatagcatactcaactacaacacacaactcaacttcaactccaacaatatcatcaacaacaactccaacaacatcatcaacaacgctctcaccgccaataacgctctcaccgccaataacgctccccccagcgccaacaacgtttctgtcagtgccaataataacgtcactggtactctaaacggtgtaactgctgccagtgtaaacaatataaatgtcagtagtattgggagtaatagcatcggaagtatgaacgggaaccacatgaacagcacactcggcgttaactttcccaactccaactctttcaccaataccaacacgttcaacactaacactttcaacagtaatacgttcaatagtaacacgtttaccaatagcaacacgttcaacagtagtagtacgtttagtaatacgtttggtggtacgtttggaaatggcacctttgggactagcacattcggaagcagtacctttgggactcccaacaccttcaacaacaataacactttcaacagtagtaacacatttggtagtggtaacaataacacatttagtaataacaacacattcaacaataacaacacttttaacagtagtaacaacacatttggtagtagtaacacatttaacagtggtagtaatagtacatttaatgggaatgcgtttggtagtggttatgtgggaaattatgtgtttgataaggaggagaatggttacaagtggaatatgcaaagtaatgttttatatgattcgccattcaccaagtcgagcaaggacaataacatactacccgacgtcacactctacgataagaaaaattactactaatctcacccagttcattttactccgtttgttggctcattgattgagtattttcattcaatttttcaattttcccagtgtttttcaattttctatagtgttcaatattgttatagagtttcaatttttctatagtgttaaatgttagtttgttgtgatgaagttggaagttggttgtagttggatagagttggtagtagtatagtgaggtttgatggagttggtgaggtttgatggagttgagtggatatcttgtcattttgtaatttctaagttggttttttcacagccatggtagtttatatataattaaaacatttcaaccacaggatgtaattttatactaatctcatacatgtcactctctacacatttatcataatacattaatacacacatactatactatactatatactatagatggtatatagatagtagtatagtaggtaaacaatgtgtgattataccctatctaatatacatatgattggctagttaagacacttcaaaacccagacacgacacaaattcaacattactccaaccctcaaacatttaaatcatttacccatgacttaattacacttaatacatcataccatacatgctatattatattatatactatttatattatatgtatagtatattatattatttcataatatactatatgtatactatctatagtatattatattatttcataatatactatatgtatactatctatagtatattatatattgtgtatatatgtgtagtatattagattttgccgatttctgagctatctttgggtctgatgacttcggcgagacgacatctttgaaggcactaaagcaagataaatgagtgtgaacgtactgaggttagtccgatatcttcagcggtgtgtcgagtggtggtgggattggcttcaaagaacttgatgttaccaaatttgctatgtgctttcttacagtagctagtacagtcgttcatgaactgtaaaaaatcacaacgagcaaacggagtataaaacgccgaaaccaccaacaacaaaaccttaaacaaattcatcttaaatattaaaattaactgcgattcaaatttaattaaaagtatcaaattgatgattaaatgataaaaattatattgaatcgaacgtcatcaagatccgataaatttcatagactcaaacgtacacaagatcttttcacctctcaaacacctctcaacacttctaaacacatcttaacacttatttacacattttaacacattttaacacataattacacgtttgtatacaaatttaattagtaaagatctacgatattggtctgaaagatgatgattttgaggccgttgttgataatatttgggtacagattggtatcgctaatgccagtggagtcggtgttgagttgtagaaaagggtacttcgactgcgaaagcaactgtgtggtcagattcaaggacgtgtcagcagtgctgacaacgatggtaacaagtacgtaaatttaatttatttcagtgtaaaatcggatgctcactaaggaattgcattatctaatctcgacattaatctaatacacacatttacacagtagtatacacctgtttacaccgtattagcacagtatacgtagaccatatagacatgggtcagatcttaaaaatctgagaaaagaggttgattgagtcagagtatacattggatctatgaattataaagattagtaaataaatttattaatattaaaatgaatattttcacgttgttaatcgggttttttactactttgctggttaaaactatgccagctgaggctatcaagtgtcacccgtacgtcagggtatgcattgaaaaatgtaaaaaggcacacgaaggctcatacatcctcagaaacatggtaatccacaatttacacaatttccatcacaatttatacaactttcatcatatttaaagaaatgataattatctacaagtctatataattatctacaaatttatataattgttcaaaatttggtggtaataatttgattagtgtatcggcgggtgtaagtttacgcaatgtgctttaaaaccaaaagactcgaaactttccatataaaatggaaaataagtacaccaacatctgatggaaaggcacagaatcacaagagcgaaatgatgtttgaattttaagatttaaaatgattaatttaattaaaaaataattaatttattaaaaaatagatttatttgttaaaatttgaaaatttggcgagttttgagaaatttccgtaattcacaaaaaacacactaaaacagctcaaaaacagcaaaatacgctatgaaaatacaataaaacagtgaaaagtgtgttaaaaagtcactgtgtgacgagaagcgaaatctgaaaatgtgagataatttacgggaaaatttctttaagtgctaccaaatcaaacaactacaaaaaaatcaaataaaataaatttaaataaaatttaaatcatagaaataaaatttaaatcggagaaataaaattttatctttaaaataattaattttaagtattaatagtaaaatgttgaaaaagtttgttgtgttgttggtgggagtgctgatgttgtatgtgaatccggtatcagcatcgttatttggctgttcagcggataggcagaggtgtttaaaccaatgtgcagaaaagaacagagtcggggctttcagcggaatcaaagccacgagcgtaagtaaattaatattaaatattttttagtgtaaagccagatgccttttatcggaatgtctgttttatcccagaaaggaaaagaaaagcgcccatccctcagatagactaagaggcttcgccatataatataataaccactaaatatataataatgtgatggtgtgtaagtgtgtggaatgttatatcattttgtataatcaatttattttaagattccattaaaaatatattttttttatacttattttttatatttattttttattttaattgataattattaattttctcgtggaatcttagttattttcatttgttaacatcagattatataattgtactatagaatgtttaaaagtattttaataatgaatatacaaatgttatataatgacatttacgagcatatttccctgtaactcacgaattgtcattttcctatttttttaccttgtaaatttatcttttagtttcattaaaaatgattttaataaatcttttattatctctcagaattttccgtctgacgactctccaaacaactttggcacatttaatgttactccgttgtgtgccaacaggtattctcggaatagtccagaaatggacttgttaatctcaagtataaacaatccttcgtggattcacgggccgttgtatagtaaccgtccctacacggagaaccaaattcacaagcttatggaatctctattgaagcgtaagatccacattaatgatcttaaacgtgtgttttacaggccagtgattagggaaggagattactatgacactgagcatattttcgttccgccgttcagacctgaccctcacacttcaacacccgttgatccattgggtaagcgaggttatttaagggacccgtttgataaaccttatttcgccaaggatccctttgctaagctcagaacaacgccgaagtcacgagacggtttagaaatagttggcagggacataccatttatcaaggacggcaaagtgtgcatagagaagcaaaagtacagtttagaagatgttttagcacagactttggtgtctgcactgctggaagcggaggagattaccaagttcaagtctaaaattgtaaaggtaccaacacaacatccgagggtactgagggactctgataactccaaattagtccgtggagactctgacgacttcaaattagtccgtggggactctgatgactccaaattagttcgtgagatcctgaatgacattgttgttttcaataaaggcacgccgttttatataccaaatgtcgataaggaaaagtttgaaacagcgccaggctatgattatcaaagcttcgataggaaactcgctcgtaacatgacactactacaagaacttgaaaataacacaaacttctccactctattcagagacatattaaaccttcaaggtattaattgtagtatttattcagctattctaacccatagttaggtatttacagtattatccaggcccagatactaccctctgttacctgtttacacctccaaatacttttaactactactaaactgtatactgttaaatatactcttaactgtgtgaatatgtagaggaaaggagtatggatctgtggactcagtacctgagtaaccctttactgtcatatttgtataaatattctaacgaggataagattagcaagttaccacctgatgaagtcatggctgatgacctgtacatgagcattcatctctacaaacataaatacctcaaatctctcgccattaaacgacaatacgaactcctcaaccaatacatcaaattcaagtaacacacaacaaattatcacccagttatatacttatatttatatacttatagttatatactatagttttacacatattatggtaatattagtatggtcatatacttggtattgttaaattagtgttgaatgatgtgaaaatgtgttagtttgaagaggaagagtactttgaaggtgatgccgtattggatatggcgtgagtattggtacgacagggaaaatttttacaattcgaatttgtatgaagtcttgagagaaatcgtgataactgacccgagaatcgacctgggtaaagtaactgagggaatatttgactatacaaatccagtaaaaaggctcaacactttcaacgtattatccaggccaagtgttaataatattaacaaatatatcaactacgccattgacaaatacggccaaatctcgcccaaaattgatcaaattaaacacctcatcaattcgtattccaaggataaattagaaccaattgatcccttttacaacacaaacactattaatatgaacgacatcatcgataaactcgttcaagactatacgaaaaacgatgttatgagtactgtagacagtctggatagacctgggagtggtggtgatcaagtgtcgaatgaccccgtgttagcacctgaccctgtgttatcacctgaccctgtgttatcacctgaccctgtgttatcacctgacaccgtaaaggaatccgtaacggaatccgtaaagctggataaaaacctgttaggctatgagtttagaaatatcttaagtagtaaaaactttgaagaagcgtataaaaagcataatatgaaatactttggtacgccagactacagtattaagctgggccaacttgttaaaggcaaagtgttcaaagtactcaaagataaagtaatcgtcgacatccacgcacacactctcgcagaattatcactacgtaacttcttccactcacccgccgaagttcccatgtaacaactacacagtttactctctctaattactttatctccaattagtcttgttatctttaattagtcatgttattacatatttgacactacagtattatttactcatcagtattatttcacagttgtatgtattgtttaggggtggatttacgatgttgtttaaggctggagatgagttaatttttgagattattgagttgtatgaccacaaaatcgaggtgtccctcaagaaaatcaggcagttccacaagtaccgaaaaatactcgaaaacaaacacaacgtcttcctcgccaaagtactacaacggtaccaaaacgggattctcgtacagtacactgagaatactattaatactattgacactgagaatactagtgccactactgacacggctgaatctggtaatactactgacaaaagtgctactgaaaacgtcacggtggatgtatcgaatacgggctttgtgaaactgaaggacttgttagataagtataagaataagagggacgtggttgacatgaacttggtgggccaggtgatcccagtaacattttcagaattttttcacgtgcacaacgtgccctcactgagtaataaagacgcccttaagaaattacaagttatttacctcagagaggatgatatcatcaaaggactcgtcatcaaatccacgccatactacctcattctcaaggtattattcacatttttatacagtagttttagtgtattactattacagtgtattacagtgtggtagttagaatagtgggatgaatctgatgaattgtgtagtttgggaatttgcggggatatttgtatgtgaatgacatgaatagtgagacgtacaaacaacacctcatcaccactcccagaaacatcatcgcccaagtcaaatacatcaactacgtaacaacatactataccactcaattttacccattatacaatactataccagttaatatatctagttatacaatattatagtagttaatacatctagttagtatatctagttatacaatattatagtagttaatacatctagttagaatatctatttatacagtactatactagttagtatatagttaaggtgggataagaaatgtgtagcgtgacggttatgtaatgttgagtaataatgacgtatatgagttgagtgaggataaattaatgaggacaaatgagtttttagcggagtttaacaagtactctcttgagcaaaacctcgaacattaccgaaaattcatggctaattacacacaccacaaaccaaccacaacctacaccgacaccgaacaactagtcgaatggtatctctactaatgttataattctattttacaattttacactgttatgcaaactcagtggttaccccagtagagtagtcaactttctagagtaagtcaacctataaatcaggttatcagagtatttcacattccagatgccatttatgtgtgttgatgactttgacgtgttgagtagttccgagatatgactctgggtcttttaaatttttaacaatgagtttgatgtaatatttattgtatcctacaagctggtcgccgttaatgtggttaaaataagctttaaactgctcattcaggaactttgagttgttttcgtacgacatgaacacattagtaacttccctactcctgttcttcttcacattattgtccaactccttcataccactactcaccgttcctacagtttacattgcgaatagctaaccaatgtaaatagttaataactatgttaaatgtaaatagtgttaataactgttaacaaatgtaaatagtgttaataactgttaactaatgtaaatagggtaataactgttaactaatgtaaatagggtaataactatgttaaatgtgaatagtgttaactatgggtagaattggtaggctcggagtccgtacctttccttgagtaatattgtgagatgttgatgacggagagtttgaggtcacgtagtgtgtctactgtcgcctgatggtcttcgtgggtctcagttgggaatccgcagatgatgtcagttgcgatggtgcagttggggactttctccttaataaccgagacgatgtgcagaaaatcctcgagtttatattctctgttcatcttttccagcacggagtcactgcaactctgcactgggatgtgaataaactcgaacacgttctcatgccttaatatctcacacacctcacttatatacttttttatatacggaggattacacattcccaacctatcacataatatttcagtgttaaacatgtataatgggtaaatgcgtagataatagctggtaaactagtaattcacacctgagcatgatgtctttgggaagaactgcgatgattgagtgtagtagagtgatgatattagtgcccagatcaatcccgtacgcgcccaaatcctccgatgttagccaaatctccttcacaccctctgaaatacacgactccacacggtccaatatcgactctatctcataactattcaacactcccctaatacacattagataataatttatatagtattatgtatagtatggtgagtaaggtgtggagttaatgtgaacagtacctcgagtgtttggttttgcagaaggtgcaagatccaaggcagccggtggatattggaataatttcaatgagcttgtttttcctgatttttggtaagtctaaactcggcaacttcttcttctccaacatcactaccctgttcccattcaacatattctcaatcacatacactatcttctctatctgcattattcctacacatattaattatattaactatattaagtattgttagtagttagggatagtattagtctataggtactaggtgtcaggatttagggaaccctggtagttccagacaaaaaatacaatactaaactactggaaaactgtaaagctgtataattaatacctagaagtgagatgttgttattgttgaagatggggtgtagtttatcagattgtggaatacagcccgtgactataatcttcttcccaagttttaggccttgatttatataatttatcattccgtgctcactcggattttttacggtacaactgttaattattactaagtcacacgagtccatggtgtcagttatggcgtagccggactctgagataattcctaacatgtactcactgtctgagatgttatgactacacccaaaattcttcaaatacaccacaacctctccaggatttatactcctattcaccgtatccaagccatcaactctgtctgtcgtgtcaactgtgtgatttgtggtatcaggcgtgtctgtcgtgtcaactaattgtgttgtgtcaactgcgtgatttgtggtgtgtgtggtggtagcttcgttaattaatgaaagaggttggcttttttgaaggtccacttcctctgaaaaaaaattattctaaatccaaaaagtataaaagtgttaagtcttaccgttttttcgacgtaggtgtactgttcacatgagccgtcaatgttagtgtaattgtccaacaccgtccactcatcattaatccccaaccgatcaaaatcactataatcattcagcctcgggagattatcgcgtttaccacgcacaggcgttctgtcacctcgactactattataagatctgtccttataggaagtgtccctataggcattatccttaccataggtatccctataggcattatccttaccataggtatccctatacacatccttaccataggacttatccaaattggtaagagtggaagtatccctacggtaggagttgtcaccattgggatagtgtgatttatctttagtatttctgtgattgagagtggagacggtgctattggtgttggaggttctggtgtttccaagtctcttgttagggttaaaaaccctaaataccttgtgagtgtccgatgccctgtcctcaataaactcaatctcctcataattcacatccatcaattcgtcatctgaacactcagttaactcgtgattcaaatgaattatactataaaataactgaataagttgaaaaaactgtgtaaaaagtaccgtgatcgaattcctcggaagattgtacgatgacgaaatcggagaaatcggaggtttctaggggttcctcttcgtgaacttcctcaggcgtgtaaaggtcaatttgtgacttgattagcgttttagcgtcaaaaaacctcttacgggaacgcctgtaaagataatatgcgatacagccgacacaggccacgcctaaaattatagagcccacaacaggtgagcgaagacgagttccagtcatttttaaccaaaaataataattaaatcattcaatcaattaattaattgtacaataaaatttttagttaaagaataaaaataaaaatttatttcaaaattatgttacaaaaaatgaaattaaacgggtgaaacggttaaaaaaatattttacagtagtgagaatgggaataatatgaactgatacgttattacgttatattctcatggggtgccagtaacggaatccattatttatacaatttccacagtttaatcttgtgttaaattttacacatttaaattatgtaatttttgtgagtggattattcaattttcaatggaatttgtcagtggaatttttcttgtgttttggtgttcaatcaccggaattctctgtaatataaaagcttctaatcttccaaaatttaataataatcatctaaaattaaataattatagaaaatataattataattatagttttgtaacttctcccgtaaatatcataacttctacgaaatcaagattaaacgcgttaaataatgagaatacagctgttttaaccgagaaatcagtaaataccgaggacactaatgtcatagtgactaaacactccgatagaaaaattttacctttaacattaaacttggtaaagccttcagataaactaaaatatataaaaacaaagtgtgaaaatattaaagttaaaatttatgatttattataccctaaagattgttctcctgaggtgttgaaatttataaattataaacactttgagcggttcttattatcattttattccgcaattactatgaatattaagttcaataatacgccagaaactgttgctaaatctctggaggaaaactctgtcaaaagtggtaacaaagtgctaacaatgttcacgagtttaatgtttaaggatttttttggtaaagttattaattactattggttcaataaggttaatctctcgagtttccccaggttctaccgtatctcgagtactgtgatctacagtgtcctgggccttttggactctgtgataaattacaaattactggagccgaaaactgtattatttgctataaataatgtttttaaacaactgtcactgctaacattgaataatctgaataacctctacactcaggagaaaaatctggttgtcagggataacaattacatttttgaccttttgggcatgtcgttggggcttctggtgtcacatttattgaataaatttgacacttttaaattcaccacagtgattaccaattttatcgcaaacaacttgacttcctactacataacaactttaaagtaatttaataacatatacacaaatatatattgatcatatgtttaaaagtaaatcccttcttaaatccttagtaaataaatctcttaaatggtttttactactgttacaagccattttagtccaatatccaaacgccttcagagatgacataccatcagttggccacctgagtggatcatgtcgcttgtatacatcaacgtatcctatactgtagaattctaaaaatacacttaacaatgctccggaaaattgagttggtaataggaaataattagctcctccattaccaataatgcctgtaaatccaacagccaataatatagaatgacacatatagaaaatggtggtcagtgttgtggtcattttaggtttattaatgattgatctggcaattcgagaatctctgtggtgaagtgaatagatgaaaataactgctagaaatatctttaaaggtatgaaaatgtcaaatatatgccaaaaccagccatttccagtccacttggacattgggtgccaatagtcaccgattttcaaatgctttagagtcgctattatagcgattggaacaggtgcaaataacattattatcattgcaattctatcaatcagatattcagacccaataagtccaggtacaatatttggataaatagcataaacaagtcccatgccaacaataaccataagaacaggagatatcaaatgtaatgtaggagtggtatcactatgaattggagtcttatagtctagaaatgccaatgtccaaactgttgctgctaatagtgaaataatgatagcaattgagatttccataaaaaagaagctgtaatgtgaatcatggtctttatgatggccaaacatagctgtagtaacatagtttattaacaatgttacaattggaaatgaattctcacccagaatataccagaccaagtatctataatcaactgcatacaccaaaaccaaattaataccacaaatgaaaccagaaattgaaatgacaacgtagtaacgagtgacattacccttctcaccaccagtaacgtaaactatcaacaatatcacaaaaattataaagtttaaccactgaccaattattgacggccaagtaataagtaatcttttataaactgatacagcatcagaatatttatcttcaacttgatcaacaaacttgataacttgggagtatgtgcctttagtagtattaccagccttatatgcatacgataatttttttagttgatcgattaagtcatggactgaattgtatttgttgatgaaagcattggccgattcaactactttatcattagaattcggttgaaccagtgtttttagtatcacttgaaggttattattattgccaccatcacctatagcaatagcaagattgtcagcagttttttgaccaagtttttctgcatccttaaacttttcgtcaaatgttttccagaggttgttaagggtttcaagaacatcttttgcatcaacatcgtggaatagtttttgctgttcttggactttgccgatggctagatcgattgattggtgttgcttgattaatacttggccagcttcagttatttcacaaggatccttagaattactgagatcatgcattttcttttcgagaccattttcaccttcacctacagcttctcgaagagtatttgtaagctctgtgatttgtttagcttctttttgagctttagaatacttttcattaagtttaccaatgttctcagtaacttgcgataagagatcacgagtgttacgatccgactcataatcatctttatgtgcagagagttgagtgatttggtggcctacttcttgtgttaaacgttttagtctttcactctctacatcagatctgagattattgagtttctcttctagtttaatagcttgttctccggtattagttaaaacacatttaagtttattagctgtggcttccgcttgtatttgaacttcttgatatcttttgttatatgtagtccagaccttctgagtgttttcaagttcagagtttgcaccaactgcttggtatatagatttctgattccttacttcttgaaaggctttctcggcttttccatgttgactgatcagtttcagatacatttgggaagagtcataaccactattgagtttagacaggcaatctttaagtcccgtccctttttgacttatagcttcatcaagttcttttgtaagtgcattgatttgttccgcttgttttttggtatcactgcacgttttctgaagattaccaatgttatcttcaagttgggacaaaagaatacgagtattaccatcagactcatatgcatatttaagtgcgttaactgcctggttggcgttttggactttccagaaatccaggccaaatgccctggtcatatcagttatactattttctgcttctcggagattattgattgagagttggaggccatgtttttcatcttcgcctatagctgtggcaagggttttgacggtggtttctgcaaggtttagagtctcagaatacttaacattaaaacatttccatgccttttcaactgatttatattgtacttggtaactaaggactctgtataagctttgttgatgttttactgcttgaagagcttgctggactattccgtgttgtgtgataacttccagatacttctgagttagatcctcatgacaatcggtagcagtggcaagtagtctgagcgcttttccaagaccatgttgaatttcataaccgataacttccttaagagttctggtacactgaagagttatggcatactcaggagttgtggcatagtgaggagttatgccatgccgtaagtggacgagaacgtatagatcccaggcttcactatagaatttccagcctagatctataagcttaccatcatcttcaccattgccaagggcagttttaaggattttggcattaacaacagtactttcattgactttataggctagagaactcgctccattgtgtgcttgtttggcttcagataacattacttcagcttccttttgaataagtttgccagtaagaaaaacggtgtcattaactttagtaaatagttggttcgaattttcatctagttcttctgcacaggttaacataactttagcttcattttgaaatacattggccttaataagattttgaccatcttgagataataattgttttacttgttcgtttagtgccttggtgccagatatcataccttctgctttcttttgaagcagtttggccaaaacaaggtcatttccattaactttatcatatagtttacccgcttgtgtttgtatttcattgacacctactagtagtcctgcagactgtttctttagtgtatgtgacttgacagcaatgtcatcccgggctttattggctagtagtctggttacaccatgtaggttgttgacaaaaactaaaatatcagaagcatacttttgaattagtgttgcgaagaattttgtattattgtgagtgttaatatagatttggtacaatatgttagctagtagcatgcttggaagacaccagaattccaatgaacttgccattcttcttacaaacatactgagcacgttataaggtaacttaaatctgatgagagcatacggagcagtactgtatactatttgaatattaaccatcatagacaaaccgacaagaaaatatgctactatattaagcggtttttcagggtctctattgtaacctttataaggatgatcatcagtagtcattgcgataaccaatacatactagtgactggtattttactatgttacaaaatattacttaaaattacaatgttctaaaaatcattaaactaaatcattttactaatatacaatcactctacgttctacaggtatattgtgagaatgtgtagatactaaaatgtgttactctgtttaaaaacgaacttttactttactggtgaataaaaataaacaggataaaaaggaaatacatctcacatatatacacattcttgaacctatgagtgaagcgaaagttataaatctcattaatagtgatataataaaagatttcaaaacgtttgtaacggctctgtcaattttggaccgaaataaaagtgtatcccagttagttatctctatattggttaaattagaaatatcgaactttgtgtatccagtaatgtgcggatcacacactgaaccaccagaaaccttggtcgggggttcgcaattatgaagcattggtaaaccaacgagctctaatatatgatgaaagatgtaataccgtggcaattctattgtatatcttggggttaactgtgatttatctgggaaatcgggattctggatagaggaataagcacacaaatacggtgaccagggaattatatatatcctgatagaacttgtaggacactcacacacgttattaagaaggtaaaatgaagatttaaatgatgaaaattgatgttcaggaagcatatagttcttacatttgttgtattcatgttgaacgggattatacatttttgatatattgatagggccagaatttagttttttcatataagtatcagtaggaataaatggatttttgaagcaaattctgggtgtttctatacttgaatcaccttctaatgtaacatgcttaagatcatagtaatgagcagcccttctggctcttttggccatagtatgtaatggatcggctttagcccacattttactatagtactcttggagtttcttggatattctgggttctttatcggcttaatttttatcaatagtccccataatgattctaatatccgttctttgaactattcaatgttacagaaaaacataactacccctttcaaagactctgaacctaatttactccaaattgaacctaaaatagttggtcaacccaccactataaaatctaggtatattatgcatacattatatccattgaaaaatatagcctgaaatcatcaactgataaccttataaacctatttattttgatttccagtattactttataactctgtcgttagcgactaccttctttaatattacacagtgatcagtcaaaattaccatacacagaaaacattaaactatgtggctatataccttgtaataatatacaaaatgttagaaactagttagtagaatagtattgatggtcttcccggtagtgataactgtttcatctcactcatcccctcagcttcatacaataccaaaacctctaaacaacagtgttaccagtgcgtataaaatgtaaatctgtatactccttaccctgtaatgatagtgtcagtttgagatatggaaccaggagtgtataaagtttaaattcgtcatagggtaatctgagttggaaagttgtatttccaagtaggtttagctgtttcaactgatatgacgcaaatgatagtattgagttcttctcctttttatcaagttttctcactgattcatcctcgtttaatagttttaacacttccttttcactcaaattgttctccaagatgttcatattattcattaaactcaatacgttccttatgttctccgggtagtcactaaatatatatacatatacatatataatgagtgtttagcttacactgagatgtatattttagctttagtgtatacggtttcatttgtggatttatttttctgtttaccagataatgatttatctttaattttcctaaactcttcaatatttctatacaacagcttcaacaatctgaagaattattatggaataattatcttacatgtgcaagtttccgttggtcggatatttgaattggggccataactgatgacttagaggttccttctcttttaatatataattccatatatattcacatatgtacggtattatcggattcgctattatacaaaatattcctaacccatagattaacacagtaagtagttaacacacagaatagtgccaggatagtgtaaataataaaaatagagtaaatgtacttacgataataattttgtagcgtttgatggttaatattattgtttgagagttgtatgtagtctaatctgacagtgatgtaatcatagaaaacgaattttaatgcgtcacggtaaatgaaattttcatacgccttcttcgccatgtcagttaaatattttaactcattttcaaacaccactttactaaataaatataaatctcccagctctattaatttatttatatactccagttcgtccaccataatacttggtttagtggttttagtatccaattctaacatatttattcccaatactacatcgtccaggtggtgatttacaccagtgttatttgtaccatcaactacacaactctcagtgttggatatactcaaatcctgaatagtggtttgtagaaaattgtataacttgagaatggaggattctgcggtatctttggagaagttggcgtcatctagagtatcaccggcatcagctaatgctattctagtcccgtcagctgtgtactgatttatcgactcttcaattgttaggaagttacccttagatttactcattttctcagaatttaccagtacatgcccgttacagaaatatgatctgggcatgtagtcattggactcccaaatcgcattatgtataaacaagctcattgtcaggtgattaaacaataaatcctttccactgcatctcacattcactggataccaataattaaactcttctctcatacggtttatcttgtccataacatcgtcacggtgattctccaggttaccctggccagtgtgggtcaaactcggtaaattatcggatattcggaaaatgtaatcaaagagtgagtagttgatttgttttgaggataaatttaaaagtcccgggttagtaccgaagatatccgactgtaagtaatgtgccactgtataatacgccatgtaaatagtactgtcagacaaactctcaatcagaatattcttattattctttatattctcccagggtagtaatgttcccagtccatatgatctactacaagcccagttatccaacctaaaacattcagtggttaatatcactgcaaatagtgtggaactgagtaactgggtgacagagtatagtgtggaactgaatactgtagaaaataccattgaataatgttgagtagttgattgtatgttgattcattgtagcatgtgaattgatttgaagtaacaaagttgagaatattttctttccattgtttatctccgaatttggtataccactggttacagatcccaaccacacattcatctcctaatctgctaactactcttttagaaggttcataatatacaaacgcttccttattctcaattaactcatctcttatcttattcttcacatcaacaacctatagattgtttataatattgagttgagaataagagtagtgtgagatttggcgtaagagtaactgtgtatgttagtaccttctgatttttgtatttgccgtatgtgatgatgccagtgtaaaacccttttttatatattaattcctttaattgttctaatttaacatctttggatgaggttacattattttcagtgcaaagtttctcagccatacaggtgccgtaatctggcacatcaattatcggaaacgggtcacacttgagatactccggggctacattatacttctcattgaagtagttaattttacgccttagttcggataatactacgtagtcatctggtgagtctgaaggtacacaggctacaattccagtacctttattcatatttgcagttaacataggaactatatgcactgatttatacacactaagaggtgttatcacagttagtcctatcagttccatccccttaaacttatgtacactataaagctcatccgtctcattcaacatcaccaacccctaaaatataattaactcaataatttataaaaataaaccatgtatgttgtacttgatgtattaaattggtggcagatcttcgtgaagtgacgtatatacactccgattcttccacggccttgttgagtgataatttattttctacaactccaacggagttgaaattaagtttaggcgattcataacctaaaaacgattcgtattctccttcgggtatcacgaataagttagtctgaccatagaaagtctctggtctcagcgttgcagctaataaatacacgttcttttgcaataatttttctttagaattttcaaactcaggagtaaaatttgtaaacgggttcttgtgtgtagtatcgagtttcattttaactactgtgtattcctgtgctgttgcaccttcaccttctgaacggtcatgatcagcacacggctgcattgtgattctactaagaattgatggtctacagccatataaaagtttattcaacttcttaagcctatcaaattgccattctacgaacaaattgaagtatgggtttctggcagttgttatgaaggaacgacgccagtccactgataatcctaataacttcatatcctgaattgctagaggtgaaaagtatgttaaccagtggtctgggtctgcaaactttggaatgtcctcatcacttatgttcatctgtttcattatctccatttgggtcatgttagtccccgatttagccttcaatttagaccttgacgaggtgaatttagtcacatctttaacattagattcttcattctcatgaacatagtttgccatatttttatgattattcatcaatccaatggaagactaaatattattttaacataaattaatattacctcgtgtaattcgtttttaattttatctgcacaggccataattggcattcctaaaatatatttttgataaaattatgtaaaaatttgtatacctgtgcagtgtaatccaaatggccacaaaacggcttttccttgagttctctgaaaccttgcttggaattcagctttagatacactaaatgcgtgtcctatatgtaaccttccattcatatacgggaatgggaatgtacagaagtacttatccttgttccgattacttggaaggttagcttcaaacacttttgtttcctgccaaagtgctctaattttagcttcattttctaacaattgtgctctcttggacatttttatcaagaattttatgtataagattaaaaataattaatttacagtaaggtgaggtgtaacccaattaaccaaacaaacatacaatttgttaattattttttacctaaataaattaaaattacatgtatattatttttatttaattgtaaaatatttatctagaaatgtacactattttctaattcctaatgaatgaaatcacactcaagaagggtgtggatggcaaaaatgatcgcaaaaacttcgttaaagagtacccgagtttatctgcagttttaaatggcttagctgctggcatgactaacattttaatccagccttttgccgttatgaggactacaattcagtcaatgaacatttacacgcatgggattaggcctgatcggagtagaattctcgagattctaaagagtttcagggccggaggaatccgtacaatgtatcgaggctgtgcttcctcagtgtgtatttccgctagcggctgggttattttcagattcctgtacgataaattagcgcactatgacttttttaaggataacaggctttcggttaatttagctcgtagcgccactagtagtcttatcacaagtgttattcttcatcctttttggaatgctagattagctattgaacttcagagcaggcaaactggtattgacggctggcctcaatatcgtggcgctttaaactacttaattcgtacattttatcagaaaaatggtctaaaagcttctttcagaggcctttcagtttccttatcttcagtttctcatcacacacttttaattgtaatatatgataaactctctcaacataagcttattagaatcgacggtcatgtatttgataaggttaatattttcctgaatggtatgatttccaggatggttccaactcttgtttgttaccccctctatgttagcagagttatgcagcagtgtcacaacactgagattaggagtttttccatttcccgcatctttttatggaacttaaagcataataatctcaagggtatgtattctggtcttcccgtccaggttgtcaaatctatgttatctggtggtatcatgttctcgctttatgaaattctcgtcagaataagtaatcgtgtactattaatgttataatttatggtatgtacgttactacttcctcttgcacatttatatattctttactcaccaaataatttatacgtaaccgaaccacctataaatattattaaaagagaattattgggatagtttaatgttatgagtgttattaaaaggtatgtatttctacacagattcttgaaaatacctccggatctattgattgctgtgatactaattcgatcaattctttcaaatttaacgttttcctatccttcattgtttttactattttacaatcaattgtactttcatcttgtaatctcatattagctccaagttcatcatttaacttagctaatgctccagactcgatctcactcaacactttgacaggatcacacgggttaatattaatattttcactcaaattatcactcaacattatggtattcatcgttagtgttaaaatgggcttacatgagtttacaagcttttcaacttgtttttctcgtatattcaattgctcacagacttcttccattttcaactcatcagtgtcattaaataacagtaaaagagtggcctgtattatattacactctattgtagtggttccgtattccagaataacatttgtgtatacatatctcaaatctttaaacttattattttccttgtaataagttcgataactctcaagttcatgggagaatattgggtttaattgcactccttcacttacttctattgttccaaatacacgaggtgttcccgatcttcttaagttttcacttggtgaattttcaacggattgtgaatctcccaaatatgattggggtttactattatccagaacatctgataggttaaaacttgagagaacatatatattcccagccacactagtggcactctggtaactcgtattcatcgattttgatctcttgaaatcgcctaatattgtgtttattaccgggtttctaagcacatttacttcattagtgatgtttattctatcatttaacattcttttcagtaaatacgccttgtaggaccttaggaaagactcgtcagtcacaatcacattattataatactttatataacagtttatatccaaaaattcactggaggcgtccaaatccattggatcttcaacatcaaatgccaattcagtgtcaaaattatccattaaaatcctgtgaagctgtgttacaatgtgtgttaagagttctgagttgttgtatttggtgaagatgctattatatgagtttaagaacatttcaaaacagctttttatcaattttaaatacttgttatatacaaatataacatcgtgcccaaccctagaggggtctgagattgtgccagaatttgccatactcgtcttaacaaggtgttcaacaaattgagtcaatgtgttagtaatgatttcatttacattttctagttttgacacatatttataaatcaacttcaagtcctacagattattaaggttaattttccatacctcaattctatattgctccaacaattcgcgtaactcattctgtaacttctctttaattctcgactgattattatagagtaagttatttatgataacatcgtggactttgttattattactgatgtgggtgttataatacttaacttcatccttcaaaattgactaaataataataattcaatgttaaagtacatcaattattgtgatgaaatctgacaatgcgaagtcgttgatatacacctttgacacggcattataataattactataattattaattatgtatggttccaaatcttctagaaactgtaatccgtttgtagagtccaattttttatacatgtcaattattagggtaacgtgtaagttatttatctcatcacctactcttcttctatccaataaatttaacagatatctcctcacacatcctttatatctctggaatatctaacacacaattaataattacaatattttataataataaataatgcaaaaaatacgtaaagctgaaatattgccagggagtattgataaatgtttggctgtaatgataattgcacgtagaagcggtttaggtatgaaaatatcccattgagtatttttatgaaattgttatatcttatccagtattcgatgatgaggagtgcgattttagcgtagtcttctgaggattcaaagtctgcagaatctgattcttgagccacaccttcctctccttcattggttcttaattgtaaattatttaatataaattgtgagattagtttagttatgttgctgtataataattcgcagtaattcgagtccttctgtatgcatatttcatagaccatcctaatcacattgtcactaaagtatacttacgtataatatttcatgtattcgcttcctttaattttaattaagctgatttcatcaacgtcggtaacaaaatcatcttcgttcagcacatcgttgaggtccttatttacgatttctctttcaatcctacagaattttgagtgggtaaatgaaacttttctatgaattgcgtttttatgagattccaaccattttcaaaagctagtaccctgttattatacataagaattaaaaataaattaaaatgtgtaacagcaatttccccacagttacatagaaaattaagcttaattacaagagtgtttagagccgtttatttaggttaattacagttgagttgacaaccgtttggactctaattaaagtagagtaatgaaggtgttattgaatgcaattatagcatagtctacaccttatgacgctaatgtagagtttacacctttttatgacactttagcagagttgatacttttttattgataatggagtgaattgtagaaaccttattagcctagttaaagtatagtggcgagcctttgtaaatattcaagacttgtaactgttcatttgtgaatgtgttgcagtaaatctgtttccagtcgtcgcaatgtaacttgaaaaaatcctgcaatgtactctctatcgtcgtcttattctctctattataatactttttcacctaaacatttttaaacacaatttaaatcaatgaatatcatattttatagctaaataagtaataattttaggattgaataggtggataattgaatgttaccaatgatagcaggagagttggtagccatttgggtatgttgtatttgatgctattaacgatacagatgatgacgtcgatgttatttaagcttttatcaattttaccgatgatcctattcagagtttcatcattcagtgatgagataacatttgttaagttcgatttcgcattcaacttgttaatataactgttgaacagtagtcttatagttttggtattaactatgtagaaaacgttatcgaagaaaatcatatcgagtagcttcagtcttttattatcaatatttcttaccaactgctttactacacagtgtattttatcccttggcacgtgagatataacgttgtaaatatcgtttgtcagtttttcattttgtatagtattaatatggcctgatattccttctacatccaagttgtacaggttcatcttgtagtaggtcgttacgaaaactgggtcgtctggcacttccaacttcatgccataaaatcctcttacataggctactattgtataaatctcatttcttatcttgaacgactttactccaatatctttcaacagtaactccatcttctttgataacacctgttcatcaattttgatattctcctgtaaaagcacttggaataacttcagctgctttatttcatcacacagtgctccattgtcactcgctgctccaacagtgtccatatggttcacgttacagtgtagtagaaagttgatgagtggttgaaagtcatttttaccttgtaacaccagtctcattgcgtccatataatgtaccatatactcaagtttaatctcactcagatgttttgacaaaaatgacataaacttaggaaatagatttccacacctgctccacaactctaatacacacttcaacactcctcccattatctccatcaggcctataataaagttaatcttggtaatggttaaagtatctaatagtttagctactctacagcctataagtgtgtaaagcatactcagatgatattcgatataatcactcgagatttgaatgaggttttgtaaaattgcttctagagactcgacgtgcttctcgggcgtttgggagttgatcattagaaacttgaagtaatgatatgataaaaagaagttgtacttggacaatatggttgaattgcttggaatcctattcctaggccatgacttgtcaaatttaatcacattcattactatactggacaggttattcgacgacagagtgtttacatcgtggttacagtatactaggccgttgaatatcctgcccatgacaccgagatctagcaactttttcttgatcacaggatcggccactctaccactattcagactcatgagtgtgatgagtatgtactgaaaggccacagactgcagatagttattattaacgtcgttcaacagacttaatacgtggaaaaagaacttgttttcatacaccacatacctgctgtatatcagcagtagagtgcagaaatacaagttaaatctccagttttccacgtcaactacactcatcaagctcctcaaaacactcaaaagtttatcgattttaactgtacatggcgtgtcgtgggtgtcaatattttccatgtctacattctcagaatcttcaaaatacgtttgttctattgaatccactcttcctatcctgtcacttgtagtatccagttctctttgattcaggaacagtataaacaaaacgtcgtacttgttaattagtgagtcgttattagttgagatgacctttaaaaagaaccacaggaacaactccaagagtgtaaaattgagtgaaatataagtcagagtgttagcatcaaatagcggtaaaatgttatggaaaagtgtgaaattgtcatctgcgcttgcaaccagctcctttaacacacttgatagaacataatacttcatgttcttatggatcatcgtcacactcttcaggatcattatgctgttgttaacaacatttttatagtttaattcacacatttttaccaccactaaatcgaccaaacctttaacctcggcgttattcaacttctttacttcaagtttgtcgtccagattcgttacttcatcagccttatccaactgctttagtccaaccctatttcgtaacatgttatagtttatctttctgaggttaatgaagttgtaatagtagtcctgtactattgtcatgtatgagctgaagttaatatccatgaggtatgaattctttgttagtccgcagtgaaatgatatgtatttgagcattggttttgtggttgtgattgacacattattctgcagcttcaaattgaatatgaagtcataattatttgaaatgtctgttgagaagtaatttttagaggctaaaaagttaatgaacttggtcaacttctcactcaccactgacccatcaacttttttatatattttactcaccactcccataatatatctctccactaatcctctcagtgtaaaattatccccaactcgtccattcaaacatttaacaactttgttgtagtcaaaaatcattcggtcttcagaatccacttccattccattctcactcacgtcctggctcatctgagagacattgttatgaaaaactttgtctttaatttctatgtcaaagagtactatggacttgactagatatttggatagtgttataatcttgagaatatcgtcatctgtagtgtcatcagtctgtttcttatcctttaacccattgtattttccattaattgaatccattaatagcaatacaagccgtttgtacatttcatattgggccattgtgggcacataccatccaatacaggcttctccattatccaccacaactccattcattgactcttttgttggtaagtttgatgtggtatatacgttatatattgactggttgagtctataaatgagttttacaactaatttgtaaacgtgtttgtccttgtactccaaacctttggtaattacttccacaatttcgctgaaataattactgttgaaattgtatctaattgctgaaatcaaacaatttaagtggaatcttaacctcttatcatcttccgataagccttgtacattattgatcatcaacttggttgtatgtccaataccttttaaatatgaaatacttgataaaattgacgtaacatgcttaattatgctcagtttataagaatattcgtcgataaacttcattaacttgttcaggattactgacatcgtctggtcatccaccactgacaggaggttgattattgtcgattttatcaatatgtaaattgacacgtctacgttattcatcagtgacattcccttcaaatccacctcatttatattctcgtataactctagaaccttgtccacgtacactatactgaactcgttcaactgcagcatcaactcttcatatacctccgaggcttcatttgatccttcaaatgcattttcttgtcccaaactatccttcggtgtcaacagactaatcttattatcctcacttaggcttttaaggttattcttaatactgaagagatactccagcatcagggatattagtaggagtatttgtatattaatgaacggctctgagagtgcaatgtacgaaattgccgtataaaacaaattcatgataatatgtggcatgtgctttacaatcagtggtattagttgtattatcacccttattgacgtgagtagcctgttatgttctgcgcactctgtcaggctttccgtaaaatactccacaaccctgattaaataatcttccttgttaatgtaacatatgttccttatgatgatttcataattattacatatcttcatattcttattatatattccaatcagactaattgtgtacaacatgtcacaaatgttatctcctccctccgcagactcgctcgcatccgtttctagtcctttattgatatacttgtgtcttaacaattttcttgaatgtgacactattaggtattttagaaatagtgatatactatgtgaccactttccgctacttgatgggtgtgcgtacgggtacagaatattaatcaagcgttttaaacttgtgaatatatcatccggatcatcatccacgaatgattcatcaaactctcccgtctcttccctcacactgtcagacaattctactccatttgacgttatggcatctgactcatggttaagtgatagtgatgatctaaacttactagtgcacaggtcattctcatgaagtattaaaatcaggagtttagctgtttttttaaatagtttaaacgtcttgggtaaaagacatgtgtattctcctggcatgatttcgttgtacttttcaagttttggcttatttggcaaaaggaacgaattgagtgtgatgttgaatattgtttgtattttacccttaaagtatgggcacacacactggtctgtagcccagccaaacttagctgctctgaagaaaaatgttaagaacactgggtgccatgatggtacaatatctccgttcaccacgtcccaccacttaaacagtaatccgttaactagtaaatcataaagcgtgctgttcggacacaacaatagtatgacacggatcttgtaaaatattacacaatttcccacatctatttcaatattacttaattctttaacaaattcctcactcattggttcatctggacttgaaacatctgacaaatgttcagagaaagtcaaatttgtatgattttgagtggactccaaatctgagaagtcctgattattatagcgcaaaatataattaattagaaagtttccgatatctcttctaaatatccaaattcttcttattagtgatgatagtctcaccaaggaggttatccaggaccttcttttattgtaactcactgccattctatgtgcatagtcggggctaaagtaattctccagtgccttaagaatcacttcaatccttacgaaatctaatatcttattaaagtgttcagctctatctttgcatccattttcccagatggagtataaaagctgtacgcagcattccaaaatagagtttaataatttacacgagcgtacttttagcttcaaagacagcttattctgaaatatcgatacttggtcaagttcagactcactataatacacatctaagttattactttttattatactatacattgatatgaaccacaattttcttccgattggtaccaaaatgttcattagttctagagtcggttggctattttcgccgcaggtatactgtagatacttgtcgatgcaggtaagcattgacgacaattctgcatttttccaacgttcttcgatgaaatctaaaaatatgctacaatctgtgtcgtactgctgtttgacaaaggctggaagcgcctttgaaacgctagaagatatttcgaagcaaatatcttccatatccaggaatttaataaattactacatttgaatcattttatacaaagtaagttctggtttaaatctcgtctctttcaagatcaatttgatatcattgtagggtcgcataaatacttattatttgttcacacatttaattattttttattcattccaacttataataattttattttttattactttaacttgtaaactgattaagttcagaaattttgttctcctaacttaacacctatgatggctcattgatcttcttacatttcattttcatataacaattatttaatatatctatcatattatattaatttttatatattcatatgcaattatttgattattcataacacatctcgacatttatgttctcatgaattagtgaatttacttcaccaaattttgtaaaatatatccaaaatgataatgaatgacacaatgataaggggtttgaggaggaaaaaatccaacaagattaaatccttctttaaggggatgagttgtaccaagaacgataaaatgggttaaattaaaaacaattaatccacattttattatattatatttgttattttttattttattaatatttatttcttattaatataattagttgtttttaaaatatttttagtgtcgagaaatttcgacattgactatgatgaagaattcacgagttacagaccaaataatgatttaaaaaataaaattgtaaaagtttcttcaaaatctactcaaactgaaaataaaaatcaaaaaaatgaaattacacaaactgcattggattccaatgttaggctttcagaatacgatatagaatattttaaaaacttagttgataataatttgaaaatacatcaaagggatattttaattgagaataggagattagctattactcgcgttgttggtatcattcttcttaaaattaactccaatttcaatcatttcattgcaaaatctgaacttaaacatttgaatcaaaaattgtacaataattttgtcagaactttaactagaattgtgtattataacatttctaccaacttaaggtacttttaccaattttcatttctttcagattctatttaaatttgttattgttaaacaataacattgttgattcaactaattacagttattacaataaaaacaagtcacacatttcaaactcgataaataagtttccaacattttcttgccctttaaattactattcgttttgttgtatgttcctatgcaagacattaaaaaacttgatattctgtacaaagttaagatattttaatgaaatttacagaaactgtataaagaaaggtacaacttgtgtcatttttagacctcgagatgacacaatagctcctctggatttctttttataatttatattttaaaatgattaaattgttaaacataacaagcaatgccctaagaagacttaaaagtttaaaggaaatgaataaacacttgcatataaatgtaactggaggaggttgttcaggtttccagtaccactttaatgttttaaacgggttcgataataatagcttgttaatatatgataacgacattaaaatatttagtaacaatgaatccatagagctcattaaatcttgtacattagatttccaggaggaattgattggttctaaatttactttggatataccaaattccactaggaaatgttcgtgtggtaactcctttgaaattgaatagtttacacaccacacatcatacagtcatagtcattgtcaatagagaagagacaaagacccacatcttttaattcgtatgatttacacttttctaaatttcgttcacatttctctacacattcttcattcctatccttatttatactaaatgccctgttacagtcaatttgagaattcccttgtcctataatatatttagaataattgtttttaccttctaggaataacagtcttgagtatactttattatcgaatttcacattaatcttctttgttacaccgttactgagtcttgataacttctgaggcacatatccatatcttactctgcttgtattcttatttatcttcacatttagtacaactaataatattttctgataacatgtgtttgttacctgcatattcaaaaacatttccattgcagtttccaggtccatcctaaagtcaatttatcattttatattaaattaccatatctagtctgaagtttcctttatcgccccaatttggtccccagctgttccgaattaaccaatatctccggttttcattatactcattcacatagttaccatatccaattataaccatcgaatgggttctaaacaatattgtgactattaaaatttttaattagatacccgtttccataatgacagagattaagaacttttgtgccatcgtgatctggttttagtactgatttccctttcatgctgatcactacactacccttttcctttatcatatcctttaccaagtttataaactcgtttttatcaccatactcttcccttttaatctaaaaaatattaattcagatatatatttcattaccagtatgaatcctttgaacgagttcaatttattagttttcggtgacagtaattctattctaggcttctggtttatccaaccgtaatcccactttgggcatgtgttcaacaccggaacatcatacttcacattgtccttactcggtataactaaaatcaaatgaaagcgtataatttacattcaaattgtgagatgatttggctgaagtcgtatgtgtttcctcccttgcaaggatctctgttacctatgcttaggcatgacgcaatatacatctcagagaatcttctcacttgttttgtagcactttccatacacagcaaaatctccaaatggagtgtgtttgcaaatatccaacaacttccactaagaaaatgttagatatttattctttagattaaatagtcttataataaattcttagtaaaaattttttaccatccaaactgattctgtggatatagtcttgatatacaactatttctatcttttaatcttatacattcataatcgttacagtatggatctctgggattcaaatggttctgaatttaataaattctataaaaatgctctcaccttatcatatgaatataacaaatcgtgcactgatactttaggcttaatgtttaatggtctcaagccttccagattcaagtcagttgcttcagcctctagttctagcagtgaatttccagcactattttttccataagtagtctttgaaaacaatgataacagtgataaaggctcatatttgttgcagttggaccctgaatatatagcgtttgcacatgataaacagtgttccaacttctctccattagctccagacagtgcacagtttatattattcattatacacggtcttgcatttctattattgtacatttgaggactcctgttattggttgcaggtggtgtcggttgtggactcactggagttctttgttgatattgattctgattcctcgtattatatctcggatgcacttcattactctgcctctgattattatcattatatccaccctgtgcgttatttattttatttggttgtggattttcgtgctgatttttatcatctgacagtttaatgtcattaatttgtatagctccgttatcatcttctagtgtcaaattaatatgaaaattacgtttatagccttgtataagtacaagattcagcagaatgagtaggattttcatttttcatgcaattttttaaataattcaggtagttcgcattcatatgaatcgttcatgtactcttaggtataatagcgaatcacgtaaatgttatttttactacattaaactcatttattttcaattagtatatctaatttaaagcaatttatttgtttatctacatacattcttttattatcaaattccaacacttctggttcattactctcttttgaatcatacaattcattgtatatttctaccagattctctggtatcaccatcggtattgcattagtcattgaaactctctctgttaagtcactttcttcatacacttttccgtcttctaaattatagtaaattggaaacgattgaagatacacattattcatcaggagtgtgtagaaaaacttgaacttcctcagcatacttggtgacgacttgatatatgttaaatggcgtattaaattctccatacaatttaataccagttcttccttccaataacttctatttagcctatttttaaccttctttaacaatatttctcgtgtctcaatctccttgtccatactattatgccttgaattctccttgtcataccaattattatcataattttcatagtagtttaatagttttaatatggtactaacttcacttgctggtatcttttttgtcttattacttgtgtttaacttgcattcttcatttaattgataattattaaaacaaatattagtgaatgacagaaggtacatgagtatgttagtagactttaattcatgtagtatagggttaattatatccttaatgatgaacagtatattaaggctatattctgtataatattctaaccccgtgatcgcgtcacaaatcagtattaaattatttggctcaacagattgtagttttttgcatgtttgttgatagttaaatggtggctttggtaggtaactgaatgcgtatagattttttggttttttctctgccaccacttcatctcgggtactattattcggtattgtatttactagttttgataaatatgttactttcctaaaatttaacttgttaagcgtgtttaatactatacttatctgaaccacattcaactgatccaagtaatttttacagattattttcagtatataattaaccagtttataattgtatttgtacagtttattcttcttttcagctgaaactatacacatgttagtacctatatcgtctaatttgcattcatcttcagtctccaattctttacataaactatcctcagaatcgtctgttttaccactagtatcctctgaatcaactctagtgtcattgtgttcatttgaaattgtatcatgtattttagaaatcgtgtttaacagttgtattgttgtttgaagtgtcatgtgtgatagtgacttactaattattctatatatgtgtagtatcaagtcaatgttgaaatagttaagctttaccattgagctaagtgatattgttattgagttgacattgaagttattatccttcttatatcttttcactacttctgagagaaattcatagtttacataatgtagtctctggaacccataaacaattgaagagaaatgagattctgacacgttatcaagtttaactaaatgttcacacgttttatcaaaaaaatcactcagagtttccaattgaaagtctgctggctgaattctacctaaattttgtataagcagtgccagcgttcccacgtgtaagtccgagggtttagattgctgtaacttcaaaatcaaagcctcaattagattctggctataataattcttcaatgttagttgtaaaaggttactgatatccgaaatgctgaaactgtccaaatctttcaaaatacacttgtcaatcttttcaaatatgtattcatccatatctttgaagccttcatttatgagagttttcaacacactatcctccaacccatttatattctcaacagaattttgtttctcagctaaattattcaggttagaatcccgatccttctgggctgaatcatctccaaagtcatttgttttatccttaattagaaaattcttattttccgagagaagattctcagtattatttcgtctttcattaagggagtcagaaattgagctacaattgcgattttcttcatttgataatgagtaataccatcgtttattaaatttattataattgttatatgttttattgtacaaagttcgatataatgttacattgttgttaaaaaatgaaacagaataataaaaacaattgagattaactaaagtggtataagaatttgagatgatatttctatttcgaattaatttattcgaatataaatacataaatataaataaacataattaaaaataatgattaatatagggtgatatcattattaatttactaatataatttattatttatattataataattaatttatttttgttttatatttattttaattttatatactaattttttgtattaattgtttttatttttactacacattaatgtttgttatacttacacattaggattccctggtttattgaaatttaaaacactctcaattcaatcatggatcttataagatttccattatcaaataaaaataatggagattaaatcgttatattattatattttgtatagaataatttatttatgtgtgataacaatgaacattggatgcacgactgatataaacccttataaagatatacaaaaaatattaagtgaagattttaacccacatttaccacaagttgaacataacgtaatgccctggaaaatgaactactcatttaagaacaagaaaattttagagtttaagaatatatcagtaagagtattggttaattattatgtttaggatttccctttggatggaatctgcaagtgtaccctggaaggtgtgtttaataccttaataattcattgcagaggtcaacgaggaagaatccaacatcatttttggttcagatttaatttgacatttggaaatacttttttaatttttataatagtatttaagacttagattttatatgtgtttattttatatatgattttccaaaattttcaaatatcatatttgggtcgggctacatagtttattaaattatcacataattatatgctgtaaaaatggtttttggaagtcctttttcagataaatattctaaacgtattttagaaagtttaaaaaagagcagaaagggcaaagatgtgttcgcctctttatacaactttgtcaacagtacaaggtgatataattatataattattaattttaattcatttaggatatatgaacatgttttaaaacatacacatcgatattggttgtttactatttttggaggctgtatttcttgtttctgtctgagctcggtttgtgactgtatttggaaacatgttaacaaaggggtatgtattacgttttaattcttctttagaggctttacattgatttaaaaaatgatgaagttcaagtagaatctgaagaataattttgtaattcctattgttaatttattgtgaaaattttggtataaataattttttattattaatgtgaattgatatgtgataaaacattagtaattattgaacatttggtgttggttaaagaaccaggggttatccatggtacttcctaccttgttgttaaaatccataacttcactgctacgattgaaattttgaccatttctaggcataaactcaccattgtaacccatttgactttctagagtttgactataatttattaaattttgtccactgtgattgcagttcatcatcgagttcatgtactcgtgttggtaagcattgtcattttgagcggaaaagtacattttcctaattagtgatttgttctgtttgcctttgggcggtccttcagtacgtctacaaaatggatttccaggactagtattttgtatctttccaactgatgcgttcagaaattcgagataatatttggctcttttatgagcaccgaggaacccatagcgcgttcctgagaagtatttgtatactctcctgttagtaataggattatcccatcttacaacccactttttactcttactcttccacttcaaaccgctaatggctgtgtagatagggtcacttctgttagcaggaggatttgttccgtcagtacaatcaacatcagatacgctatcgttttcaatagtgctgttgctgaatttatctgcatctttcaaattcattaacttagtttcgttgatcatattatcgggtaaattactaatagtgaccatagtgttagggttctgtatgttaggcatgttatacatgactggataattcatatagtactgatattgatcataataacaagcatctttattagcactatcaactccacatgtcgtacttacactatcaacatagtttttgtttgagtatccttgtatgtttccattagcaaccattttatcgttaccgtttacacactttgtgttatctggtaatgtgtacccatttactccattgtagccataattataatccaaattataattatccaacttgtaattattaaattcctcatccattttataattagtcattatattttcatcaatatttgaactgttactgtttttgtaattttcgtaaccgtttgagggtgtatattcttcgcctttgtttacatttggatattcttgataacaattttcctcaagaaattggtcagaattcatgaaattttcatagttgtgacccttcaaggagtcgtaattctgattctgtaagacacactgataatcttgtgtgtttaagacattatccattttaataagtgtatgcttattataatataaaatttatattattaattttaaagcgattaaagttgaaagagtaaatacaaaagtttttagttggacctttatatttatttacttaataaaacattaacaaaataaatattaatttgaatgcttaattcattgcgattaaaaattttctttggcgattttcacaaacttaatgaacatttgtcagagttagttaactgactcaaaatttcagcgattttttttctcatctaaaagtgtcgttatgctgctgctcagattaaatagcacatctcgctactacatttataggtctgttctttagatataatttaagggaaatattttacaaaacaattgtattcggaaacattaaagatccaaatgcagaaatggtcgtaaaggcgaaaatcacgcaaaaatgtgtaccagataataagttagtgtcaggatgtgtttcatctaattatcataaaaacatattagatctaatatgaatcgtgatataacacaaattcgacttggttatattagtacaaaatttggtaattggtatttacggtataaagtggcccacaatgattatttatatgaatacaacgttaaaaataaaaataaaaattaataaatcagtaattatgtaaatgtgttttcgtaattgataataatagtaataaaacttaaatggacgaaataaatgcagtttggagactaaaaataaaatttaaacattcaaaatatcaaaaacaaatttaaattttaaaattttgaacaattaaacaaaaaacagcagaataaaaatgatgaagatattttattacctcatcacgctgatacctgattgctcactaaattatgagggatttaaattgtcatttactttttttattttatactttatgtatgatatttttgtaaatggaagatcatctcttgactctatctcaagagtataaagtcgcaagtgaggtgtatcgtcatgtcgatcctttgaacttttacgataattttttaaaggaaggaatcagacctgatggcaggaaattgtgttcttatcgcaaaacttcagtgaaggacttgttaaattcaacgctttcttctgatgattactcatctaacacaagatcgttaaaacacacattgaattcaaacaaacactgtttaaagagtttgaagaaagtattaatttcttccatatacttaacttgtggaaattcccattacaactgtaaattaataggtgatttaatactactggaggatctaccaactcttttccaaaacactgatgtattctcagttaacgtaattttaccaaaacacgtagtaaacgaagtttatgacattaatggaccatgtattaacatcacacatctcgtgtctgatcttattgagaaggtgcttaactcatcggaagtagtgcctaatgatcaattttgctatgacattttaacatcatctctatttgaatcgcaacaaaatgatccaatattaaaatatttaagcaaaaataagcttagatggaaactgagtatggagatcacctgcgatgaatatgacgggaatttactggatatgtgtttccttgcatgctcatactgtttactcttttctaaatttccatttgtaatactatatcctgattctaatgacttttatccttcattattaactaaattgaattttaaagatgtggtatctcaggtaattgtacactaagattaatatatatatttctctagcctcattaaccccttttcaggataaggaggtattaactatgaacaatagtttactagagtgtcaatttggcctcgatttttcacttgataagcttcaaaaattcctgttaaacgatgataaaaagagaatattcatcaattatgtaccatatactgtgactttttgtaaatgtttaaactactacctcttggacccaacaagagaagatgagcaaataagtgttaacttttcaatttactgtttgaggaaaattggctctgaagaagttcagttacagcctttgaacctcatgggacttactggtgtatcagatgatgatttaaataaaatgtacgatatcgcacttataatagtaaaatccctccaatagtaatatacacactatgtatattatgcagtgtatattatactacattaatgttgtatatattacatgttgcatcaaatatcgttaaatattggaagtgagtttataaccttatggaactttgatctatccaactttgatacaagttcgtcgaatgtacaccatgcaaagtcttcaacaccatcagttactaagtctccaatctcggtagaagagatatgcctagctctatagtaaaaaatctataaataattttaaaaatttgtaaattaaccttttctccttctatttctgattcttttgatgaaaatcttgagtttctgtgtgttggcaaaggcaactgctgatatgtgaagggtgagtagcccagaaagtagggcctgtaagtgttagaaatttgttcatcacatagacggaaaagggtctaaattacaaattagtgagttaattgtggtttaaagataaaaattctcacctctctaattgaatcaccatagtaaaggtcagtaactggtaatgaccagggtgagtccttgtattttattagaaaaaataaccaacttttggggaatctttttaaattatgcaaatcatcatctgattgtactttagaaaccttttcagtctaacacattatatctataaagttgaaacttactttatctttgtccaacactcttctggacctcctaggtaacaaatttaaatctaattctgagcttagtaaagactccaaatcatcttcttgagttatttccttctttgattcaggtgtatctgtaacaggtgactttgttggcgattctttagatctctcaagtttgtgtgttattttacgttcaattgttgaaagtgatggaatcctgagcgtatttttagttttaaaagcccataattctgagaattctctaaatagtttatcgatttcattttctgtgtattggagaggttgcctttccaaacacagtgatacttttaaatgccatccagaatgctcactaaggaatttggttgtaaaatacctatttctatctctaagaatatttattttatacaattttaataatgtttgagaaaacattatctattcaacatcaatgattccaatgtgtagatggggaaatgtaataaaataaaaataattaaaatgaattattaatcttaaaatattattttcttattgaaattattattcaagtttctctacaagttcttcggctaatttccaaagtttttcctcacgctcaaagtcatcagcatattttgatacaaaagccagccttctattatcatagtatgctccgggtacaagatcctttgcgttagttgtacacaaatgcctataaataaccattaattatattaaactcacaatgatgttgctgctccatcaacaggtttcctcagagtaagcaggttcacatacattggtaccatataacggtgtgctctttgtacttgtaacaccatttttgtttgtactactcccggtgccaaactgactgtaaaagccttactattttcagctctcaacctaatgaaattgagtgttatggtgtgtttattacctcctctgtaatgcgtgtgtaaaccaaataacatacagtttagatcttccatagtatccatttaatgtactacatttaagagaagttgtagatttagtttcaaaaatcgggtctgtatctggattatacttgaagtgagccacactggaaacgtttagtattcttccttgcgatttttttacaacatccaataacagctttgtcaaataaaatagcccaagaaagtttgtagaaaaattcgactcgagtttaaatttagtagttttaagtccagaagtgtaaactcccgcgttattaattaaaaaatcaagcctatcaaacatattcaaaaaagtgttagctgcattctttactgaggttaagttatccaaatccatttcaacaaaatttacattatttctgaacaatcaataaattattttgaacttacacatcaaatgatttggttgacttcattctttcaatggcattagttgctctagtcttatcccttcccaatataactactttgcaattccatttaagcaattgatatacaatttcaagaccgattccgctgtatccacctaaaatattaatatctttaatatttccagtacctgtaacaattgcgactttcccctttaaatttgtgtttgataatacatgtgctggcaatcttgaaccggatgcaacaaaatgatatatgaaaagtaccaccatcgatgttaacattgagaattgaaagaacaaacatgaaaacaggagtttcttcgatttattgttcaattcaaacaatgctaccaagaagcagttttttgccagtgagtataaatcaaacttgactaggtacaactttaccaacaaataaaatacgtataagtaaagcaatatactagactgtacagctggctcaaataaaagagccagccttctaggaaggactggatttaactttgcattcctcctaagtgacgctgttttcatatctcaatgattctactaattatcaaattaaaaacacagaaacatacaaaaatttttttaaatttaattttacaaaaaacaataaatttaatattccttccagttgttacgaaacttaaacataacactagtttgagtagtggtatgtgtataaaagttatttaacaaaataaaatatacaaataactacaaaacaaatttaaaaatgatacaaatattgaatttgaatattcatttaaacatttaatttgaatattcatttaaacatttaatttgaatattaatttaaatttaaaattttaaaaatgaaattttaaggtttcatgacttatttgtttttgaccatttcttctgctaaattccatagtttttcttcatattcctcgttatgagcagtccttctaacaagacctagattcacttcacagtaatatgctcccggtatcaatgtatttgatggagccgcacacagatatctgcgaacaattatcacacactcaacttacaatgctgttgccgatgccgaagcagggtccttcatcaaatatggtaaaaaccgtttaggaatataaaatttatgtttttttatcgatttcaccatcaacttggtccaaactttgcctgggtttacagccaaacacaacaccttactattttcagcctttagcctaaataacgtttattatttatgtgattattctatattaccttctctgtaatgcgtgtgtgaaccatatcacaaacagcttagatctcccgtaatatgtattcctcttatcaactttaagtgaggttgtggatttagtttcaaaaagcctgtcgttcttagggtcatacaaataatgcataatactggaaacacttattactcttccttccgacttttttaaaacgtcaattaacagttttgttaaataaaaatgacctagaaagttggaagagaaataagtttctaatccatgcgaatctttcaaaggctcaccaagccctactcctgcgttattaatcagaaaatctaatctgtcgttatcctttaaaaacgtttcaacagcctttttcacagattttaagtcatccaaatccatttcaacaaagtgtacattatctctgaacaatcaataaattattttaaacctactcatcaaatgatttagataacttcaacttctcaattgcgtttgttgcctcagttttatttcttccaaatataaacactttacaattccatttaagtaattgacgtactgtttcaagtccaattccactatatccacctaaacgataagcatcagtcgtctatgtagtacctgtaacaatggcaactttgcctttcaaatttgtaagtttaactagccgtcttggtaatctagctcctcgcgataagtaaaagtttaaaaacataaacaacaatagcaaaaacaccgtggcttgagtaaaatatgtcaatagaacaaaccgccgtcccctactttcaagccgcataaaaaacactacaagtgatcttttagcaagtctatagatgctgaaacgacattttaagaactcaattgcgaagtataagacccaactgtagaggaacaatgtacatctcatgaatggatccatgatatatgccaattcataaacagcttctggattcgttgtttgtcttttctcctgggtttcaagttcatttttgttacaagaatccttaggttgattccctctattttggcttgaagaagtcgtatttctcagcattttaacaatatatgtgggacaacaacaagaattctgagttgagtagttaaatcacaactatgaaacaataaatattacaaaatacatgtttattaacatacaacaatttaattaaatttaatttaaaaaacatataattcagtattcatatataatacaattaggaagaattatggtgtgttttagtcaacaatattcttacttttatcaaacaacaaataacatattccattattatacttttaaatttattttataacataaaatgaatctataaatacattaatctaagggatttttacaactttaatgaggtctgatgaccccgacacattttccctggctccgtgcacaactacaattaaatcatccttgcgtaacatatctctcagtttcgcatggttgattgcgcgttctacattcttatccgtgtcttccaggctgtcaacaagtactgaaatcacagctctgctaatgctcagcgacttgacgacgtgtatgtcctcagacagtgagagtatcaagcatctgggcctatattttgacaccagacggcttgctcttcctgtttgtgtgaacaccaagatcatctttgcctcaatatctattgacagaaacactgctgatcttgcaatggattcctgtactgtgaactgagaggagttcagcaacaaactttcagccatcaaatctcttgttgagaggcaattttctgcctcaaagcacagtttcgccattattttaacacactcgactgggaactttcctcctgctgtttctcctgacaacatcacacaatctgacccatccaatactgcgttaatgacatctgctgactctgctcttgttggtctcgggttatttaccatcgattctaacatttgtgttgctgttattatcggcttcccgcacatattcgccctaaatcattatgaatccataattaatagttaatacaggtataccaattaaaacactattgtattaataactaaacaatgtttaataccttttgatcatcattttttgtgctaggcaaactttttcaattggcatttccatacccaagtcaccacgggctaccatgattccatctgaagcttcaagaatttcatcatagtttgctagtccttcaatgttttcgattttggggatgattttaatgtgtttccccttttctcccagcaactctctcacataccttacctcgtcggcggtctgagtgaatgagagtgcaatgaaatccatctggtttgggattccaaagttgagaatgtagtccttgtcactatcagttagcactggtagctcaaccttgacgcctggcaggttcatgttcttgtactctcctatcttagcgttgttgagaactttgacctcaatgtaatcgtcgaacacggctagaacctcgcatgaaagtgatccgtcagcaattaggatgatatttccaacctttacagactgaggcaatttcttgtatgaacatgaaatgatgctctcatcaccttcaattgtgtagtctgttgtgattttcagggtttttcctgcctccagggtaattggagtatgatttttaaggaatccagtcctgatttcaggccccttggtatccaacataagtccaatgttagcctctggtacagactttaaggcctccttgaccaaattcagcgttttagtgtgagtttcatggttcccgtgtgagaagttgaatcggcaaatgttcattcctaaaatttaattaaatattacgagatcttacctgatttgatcatcttcacgattgtttctacatttccacaagcgggtcccattgtacaaacaatgtgtgttcttttatctcttatgtcgctataagagatttctctcatcactttttgtaatgagatgtttgagtgttggtgtatggaatctcctgaggagcttgacatgacccttttgaaagacattttcgttatcgcaaggttacaatagttaacaatttatggaagattatttacttttttattatatattgtgtgaactgcattaaattagtaaagatcgaaaaacaatataatgaaaactatttcgcgcagcggtcagcaccattactcggatttatgaggtaattaaagtacctttatggtcactaaatcccctaaaaatattttacaatcatacaaatccgacctttaaatacattatacgatccaattatcatgtgatccctgttcaattctttatctatccttattaatgtgtctctttttagtacttttctttttttatccaacacttctcatgaattgatattttctctcctcattaaattttcactattgatctagatcttttacttattatgtttattcttagaatcttcactgtttattcattaatcttctaaatcatcttccgtgtcctcgtaagaatcaccttcgtcggatccatacatttcttctgtttcttcaccactatcttcatccatttcctcttcgatttcttcatcactttcgtctgattctatttgattattgtacaactgttcattttcatagccctcatctatacacttccactcgttcctactatttattatccatatttccccctaccttttaagatccagtgcccagcaatcactctctgtgatttccacatctttaacctcaactattcctccaaatatataaaatgtgtcattgtatactactccgttggagttcattctcggggtaggatgtgaccttgacaatgataactgtgagaatcccaggttatcttctttattttcttggtcaaatactatttcagttggattatatttcctaaatccaattactatactgttggttacctttggtttaaatttaacttaaagcacttatttgagaatgtggactttacatgtagtcctttatactcgtcgttaactcctccaaacaaaacagcgtactcagaacttgtggcatatgataagcctaattttaaacaataagttagcttaaatacctgtagaaaactcgggttcacagccttttactttcgaccatactagaacatttccattgtttgacaacaacaaattcatgtcaataagccatgaatcctaaaaatacgatagttatttatggctgataccttgtaactcaatccaaccacatcatttgatgagtcctttttactgaatcccccatgcatcatcaggtgtttacctgtgttcatatatgtgaataatcaagtaccatcattcaatgacagtaatacacagcctgctctcggctccggtagtgatgccgtaaatagtttctggttaacttgatgccatcgattattatccaagtcaaagtaatacaggtcattgtagtatgtcgattcctttccgttatcgtggaacccaccaaataatacccagtaatgtttccataatacctaaatttaattaattgataaataacagtttaataccattctatgaccgcttctaggagtaggtaattgacatggtacatccagcttattccaccttagtgttgataaacacagataactaatgtcattgaagtgatggaattcatccagtgtgttatattctccaccaaatatgtaaatgcgattactaaatcatcttaaaatttgtggactaacttgtagtatgttgcttgatgtgaacatcttggaagtggcactgatggagtatccaaaaccttccatttatttgtacttaaattatataggaatgtatcgttatacaagttaaccttacaaccgtcaaaaaactctcctccaaacatcacgcaaaggggtctaagaaaacaatatcaagtgtgaatacccaatttattattatagtaaaaattacccttcaattaatgttagagttgagtgtgctcttggcgatggcctttcagaatccaaatcaacccatcttccatgactcggatcaacacttctttttaaaatttgttcacttaaagcttttattgcattagatattttacactctttactaatacttttcttagtcttctttcccgaagattccttggaatcctcacctaagcctgatcttccagtattctttaccattatttatattattacaaatttataaaatacatattttattcacagtgtgtaattatacaagttacttcaccataaacttacacaacacatttaatcacatagctatataaaattatataattatataaggatgtttgattaaaacattatgtgccattttgttcctgaggtgataaaaacacgtctaatttacccattttatagtaatttaggtaatataaaaggttcttgtggtttaaatcctcgattgtgtaatctgcggttcctgatttcagaaatgtcagcactatattctcgtttcttgttctgatggcggtcattactggcgtttctccataagagtactcctttatattcagactagctccataatctagtagaagatttaccactagaggcttgttttccattactgccaagtggagtggcgttcttccaaacacatcttgtgcatcggggtttgctgatttctctagcaacagcgttatcacgtcaaggttcgactcctcacacgctgcgtggagtgctgttgttccaaacgagtcaaatgtattcacattcgcacctcttttaagtaacatttcaaccagttggatcttattgagtttagataatgctattaatggctttgaccatatttcatgttctctctcaactaagtctgggaatctactcaccaacatttcaatggtttcactatcattcttgactatagcacatgccagtacctggaccagaacccacctcttgtcacttgatttccctgctccatattcaatgaatgtctctagtattttcgagtcctgctggtatcctaataacgtcggtgttgacctgtgcctatacttccagttcggatctgctccatattccaacaacagctctatgatttcacggttatagtgctcacacgccacatacaagggcgacttgtagttcatgatactcggacacttgtaatttatttcaaagttttcttgtaggagcattttaaccacctctacatttgagttcgttattgccactatcagtggtatgttattgatgttatcgtagggtattggtggtaatctgaacttaagaactttctcaacaaagttatttaacgacagctcacacgctattagtaacggcgacttgttcatgctgtcccaaacattaagccttgctcctctctttatcagcaacaaaaacaaatccatattctgttgctgtatcactagtattattggcaaggtccaaatacctaaattattgttcgagcgatctgtgactgtgattgggcagttgaccagaagttcacttcccctgttcctaactgaatataggcagttgttagtcttcatgtttggctggttactcaaggacagcagttggtgctgtagcttcttggttagttttgagcacatgttatagttgttcgtcttgagtgcgtttgtaaatgcagtaaagtatatcccaaaccctaacttatccaacagctttctacttgccagagatccgtatatttcaaactcaatttcactttcttcgtactttggctcatttagcttatcttgttggagcagacttgctaaatctacgtatgaccctttgtaattaagctggtttggcgtcaactcaagatttaatgtaggatctgtttcctcatttggtgttcgaggtcttataaaatctgctaccgattgtatgggctctaacaatatattcgagaatgaacatctaaatttgttaaatttgggccagtttgtacttgagagatgccgtacgaatggatttcctgtaaaatgttcatttctacagcacgttaagctgagtctttccaggtttggcagctttgttgttagtagaacttcaagactcttgtcagttatctggttacagaaatcaaatatcaactcctttatgtttttagcgtactgcctcatctcaaacgttgtgcttatcatgttacttttaagtaggtagacagttgcgatgtccttcagtagtatgcaccccgtgaagtcaaacctcagtttacagttttctggcaaatccagcacatggtgtattaatggaacaattgtgttaaatatagacttggaatcaaatcctccgaagcctctaaatgataacgtcgagtgtgatctcagtttatacttatggtagtacaaagtcttacaggtctgccttaacatcagtattgagtacacatccagaaatggttccactctcttaactatatgcttccagacatcgttgctatcagacagtattctcaggtttatgaaactaacatttctgttaaagtgcgtttcgccttttttcttctcagattccatttggtatgccagatttaaatcataaaaggatgctgaactcaggttaggcttcctcttcgacaaatttacttcgtaaaaatacggtgaatttatcgttgatctacttaaactgatatccttgtcaaagctagggtatccacttgacagagccgtaaagtcttttgacgcagaaccgttcaatcccagcttcgatggactcctattcgccgagcctaatttaaaatgagaatctccagtgttttgaaagtgtttagatgttatttgatccaacatttccggttttatgtttctcagattatctaacgagtgtaatttatggaggtttacttggtttttcaaaaaattagcagtgtttttatgattttcttcatttctataattcgttttatctgcactatggacattatttgtgtacatttttgatttttctgattcccctggatgttcttctaacatactatcgccggtccgagactcaaggctcattggaggttcatcagattcattactgtttgaattactgtcatctttagatgaattatcattctctgttgacaaatgattacaattatcactttttgttgtcatgactatattatttatatccaaaagcggtcccaggtgctaacaatgcgattaaactgttacaaaaattcactgatttaaattttaacattgctttaaaaaataaaatacacttcaggttttaaataacctttttgagaatttggatttcattattaatgaatggaacaaagatttattgtatgttattataacaaaggggcttcaaataaaacaattatttgattaaaatattaaatgaaatgacccgtactttaaaatctacaaataatgttttcgatctatgttccagcctcaccatattaccacaaatgctcgttcatgtatatgtatagtacaacttcattttgtgtatagtttcttattatttttatttttatatatttatgtagattagtttttattaatattattattgtttccgttattatatcaattttagctttataaaaatatgtgttattctctatcttcttctattaactattcttgattatttcctttcttcctacttttcctgatatgctaatttactttttaaaggatttgttaaaaagaaggcccgctcacattggatccttccttccttatcatacttctaatattagtttcccagattccacctacatttcaaattttcccctaaatcctgcaaattttataaacattaggcacactaataacattaatggtaatcgcataatgaggtctccaatgaacttcattaatcgcaagttctcaacagtcactaaggctgttattcccgaatcatactctgacgaggacatagaaaccgttgaaagcataaagattctcattgataaacggatccgacctgtgattcagcaggacggtggggacgtttctttcgtttcttacgacccttcaaccggtttgtaatatttgttctagttttgataaatatcaaatcatattaattttaggttatgtttacgttaggctcagcggcgcttgtgttggatgcatacagagcgacgtgactctgaagcacatgatccagggcatgctgtgtcactatctcgaggagattactgcggtgtacaatgtcgacgaagagaacaatgtaatcaaaggaaattctgaaaacgattattaatatagtttccattttataacactatgatacttaatttaactaatgtagtacactagctactgtaatacttaatttaactaatgtagtacaccagttatcctattaaataagtgtggacttacaaataatgatagaggtgtgaaaaaatgtcttctcttacggctgggtatgtttgtgacttggtttttcttgaggttgaaaacaactttctttttcctaaaagacattaaaagtttaaaactcacttctttttcagtcttctatcattggttgttcgtttcctgagcgatgatttgccgggcttcgcgtactttatgttatagaaagcctgcttcaagttaatttttaatttagagcgtttgagcttgtccaagttgtaaatcctgtaaagattattcttcttaaacttgtgtatgatcttcagtcgcctaagccttatcagagagtaatagaagagttggtttttgacactagtacggtcgagtttctcgaggaattttctgttttcctcgtcggtttcatttagcctgagaagatagttctttgtggagttgactatgcggaggtttttgagtctagacttactcagacgtctagttttaatgttagataaagttaaatagtgctcagctctgaacatgtactcgttccccagcgattctcttttagtgttgctaagattcttaccatcatctttaaaaaatattcttccgtttacctggtctgacccgccaaatgagtcgttggattcactatccatggttgcaattgtaaatatcgagtacagaagctgttctaaatgtaaattttcggctggagttagggtctcgctcaaattacttttatataactttagtgtgtttctgataaatttcttgttgattcctttcacaacgtcgatttccgttcctggtccggtttctcctgaagtgttcagtatggcatctagtaggtgcactatcacgtttatgcttgtaattttcgataacttctcgaggtccttaaatatatagtcatataaggtcttgactaggagtacatccttactggttacaaacatcaaaatgaaaggttttaaaacgtataaaagtttaacgctatctatgttgttacacaggttcatctgtagtgtgttaagcttagtctttgaatcttcagaagacttatcatctgtgttagagtttgtaggagactcgctaggtgagtcaccagaacccattaactgttcatagttatataataactcggtggtgaaaacttgaataacgtggaccaggagccccaatgtgtccctgccaaatatattcttgttgaggaatatttcacttaatttattcaggaccaggagatcccagtttaattcatgcatatagtatagtatttctgacacgtaaattcttgtaaataagagaaccttgtcaactctgtttttatccaacaatagccactctcgactgataccctccatcaaaaactttaagtaccgcaatctggcgtcaacttcgttatggtccaacaaaagcggttcgtcaagaccattaacaggagtaggatttagcttgatactcttgtatagttgaatcatgtccaacgacagtatgcgtgtttgtatgggatcgtctgacatccataggcaatagtacaaacccttgcaaattttagtcaaggacatgtcatccaagtttgggtttttcttaaacaattctcgaacggaccgaaaccccttctttctcagggttttatctgtgttcgccaggttatgacaaatggatctaatgacagtggtcatcattggaaaggcacactcgtaaaaaaataaagtagtatatcagtatttaaaaggttaaatgtggaggaacaacaatgtgaaataaagatttaataaaacaaacgtaatcttatataaagattctacaattatacgaaattatgcgatagatctagaggttagatagtaaaaaacagttaacatgaaaatattggatgtaaagaaacaagaggctggttatggtataaatttttaaggattcaatcaaagattgtatctgggatttattaaatgataaaaaataaacgagtaaaaacaaaaatacaaatcttcctaagtgagtaaattgaaaactgaataaaaatccgtttgatgaatcaaaaattgactcattagataagaagagtataattattcactttatgtgtatactatttagggggtagttgatacgtaataaacatctattaaaatctgtaaaatagattaacacgtattatgacaactattttaattgcaatttcttatttttcttcttcttactcaattctctatcggcaactaaatgattataatattatttttaagaaatgccgacagtaagaagaataaagtctgtgaagtgggatgaagacgacctcaacgactattattcagatgattattctgactctgatgatgaagattacgaaaacttgaaaatacataccaaacctaaatcattacccaagaagaatctggttcagagaggggaatctaagcccgcccctcatgaaactaaacaagtttcaaataaaactaatactctcaacttttctaactgtaaaacacaggctaataagaacattaacactcaagattcaactcctaatagataccctttaaacgttgtagttctcggagctgtggacgctggaaagtcaactttactgggacattttttaactctaacaaactgtgtagataagaaattgaagaatgttaaacatttgtcatggattttggaccagggcgacgacgagcgtgacagaggaataacaattgatccaacaaagtgccagtttaaccttgatcttaaaaatataaagaacctcaataatcacaatagtgaacatcaaactaaaattgaaactccaatatatgattctataaaggtcaatgtcattgacacgccaggtcatcatgacctcatccagaacctggttatgggagcagtctttgcgaacagcgcagttataattgtggactccaatgacgtgcttaagtctgacttttttggagtgtatttcagtgagcacatgctacttttgtaccttttgggaattaggtacataattatatgcgtgaacaaaattgacaggttcgaatactcggagtccatgtacagtaaagttgtccacatcatacgtaaactggttggagtttacgaaaattctgtcaaactgatctttttacctgtttcaggacttcgcggagataatctcgtagataaatcgagcaatttaagctggtatcaaggcccaacccttatagagtcactccaagttagttttgtatctatatatacatgaattccatgattatatttataatttaggttatatctctggatttgataaagaggcccgtggttgtatatgataaaataatttgtcacatttttgacctctgggagtcaggaaagacagttagttgctcatgtttcgttgaaggtaataagataaaggttccagttgatatgaatacgctcccaaactcagttcaagttaagtgcgtgtcactggagtatcaagttctcaatctagtcactccatcctctgcatcaaatgacactaattctacaaattccaacacgtgctatgtgaatgatttcgtcgactgccttgaaatgaaaggcacggaaatcagtaatttaatgttctcgaaaataatgatcgatccacacacatactcaagtaactacccaactaatataataatgtttagagattaaaaataacacgagcagcatagtcatacacaacacattcatcggactaatatatctaaacggcatgagtaaagtaaagttgacgataggccaaaatgtggaactgtttgtaggatactcaaaacagtccgccttcataagggcgattcaagtaattgataattttaacacgctgggctcaaagaagatatactcgctgtctccaggccagtttgcctttttagagttcggatctcaatcaccaattctagtagagcccatttcgagaaattcaaagtttatacaaaacatgattgcccaattcaccacaaaacccgccagtctcagtgaggatgacgttgagcatgtgggaatcctgagcaggctgttgttgagaagttcggggagtttcgtcgcaggcggtgtcgtagtaaatcgataattttaaaataatttaataataaattatatatgaatatttatcgtatcgtgtatttattgatcttgagtgtttgaggtgtcggtgtacgggtgggacttcagtcatatttaacggtcaattcatgaataaaattgagagataaatagtaaaataattacacattatagattaaatgataattagaggtggtaaataaatatatgggaacagccgagaggatagagatagagataaataggggcaatttaaaatgtgtaaaaaaaggaaaataaaaaattaaaacataaaattaactgaacaaaattttataatacacactggagttgatattgaacaaagcaggaaatgtgcaaaaacgacattacacaaatacggaataattgggaagaagaagaacagaaagtgcttaaggcagaagcagcgtcaaaaaggagcttctacaacgaaaattaaaccaattcaaagacatttagaccccatccgtgcctctagagagtcgattccccactgtgacacccgaatgattgaatacacaattattttaaaagggaacccttgtataaagattttagatggtttattatagatatatcaacctttctagctcgtttgaccctctaagaaagcttggaaggctctggaataatatgttacctctaacttattaatttattatttttaaactcgctcatagattgaaattttaatggctcccacatttatttttattgcagatcagcgtatttccattttgttatttgtattccgcctaccagaagaggttaaataaaatttcttgcagaaaagatcagttcagattttaaatgtagtatttttggtcctaattgtatagtaaattgaaattcgtgccgaatcttgctttttggattctcgcaaactccacacatttatttcatgatctacaaattaatatttttcattacctcaaattccgaaaacgtgattttaacatttttcatgtaatctttcactttccgcactttataaatggcgcctaaaagaggatggtgcaaatattgtctcgatgactaccgtcaaggagatatcattgttagatgtaagttctacgcccaatagatttatttttttcccataattttaacgttagatttacaattatttttaggctcgagctgcccgcgcacatttcaccgcgagtgtctggaccacgaactcctgacaaatacatctggctctgcctattatcagaataattatgacaacccggtggatctgtcggatttcacctgcgactcgtgccagcagtacgcgcaggaggttgagatagtgaatgatgagaggtgtaaaatttgcaaagagaggaacagagacgagtcggacattctgctgctgtgtgacggctgtcccaacagctatcacatgtcctgcctggatttgcacgtagagcccgactcagaaaagtggtattgcccaatgtgcaaacccgagtcgtttgaaggggtcaacgttagagcccacagaagaaacccgcttctagacacgagtgagcacgtcaactcttcgatctgttacgtgtgccagagacatgggaaactcctgggatgtgatttctgctcaaactcattccactacgactgtttaccagaatttgatataggtattttttagaataatacgagttacactttgttagatagtgaatatattgaacaatttcttaaattgactgtagatactattgccgatgtgtgggaatgcccttgttgcagaggagaggacccgtttatcaaccagatgcataagagatggacgatatcacaaattgaaaagaatagtaaaacaaggcgtaaatccatactaacgtggaaaggagtcataacaagatatagaaatcgcttcattttagcacatcgtcaagaattagcaccttttgtaaccactaaaattatcgaccaactcattcgatcattcatctccaataaaagtattgctttagttatttattattgttaataattattactaataattaatattgttaattagttacaaattatataattttctatagataagaataagaaggaaaagatgaaggatgttgagagtcagttggatcagctgcaagaagaacagcttatagagtcgaataaatttgtgattaaggctaggaaaagctgtttttaccctagtggacgcagaagagacagtcgtccaatgagaaacggagtttcactcaaacctcaccaggaagatggagttgactggctcctcaaatcatttctaaccggaggagctatcttagcagatgaaatgggtactcacctattcaatcacattttgagatagttggctttattttacaactcaattgactatttataacccaactcatttacaattttatatttatggattcataacttcttttatcttatttgtttgtaggattggggaaaacgatacagacattgtgttttttaagttatttgaaaatgatgaacattgaaggaccacacttgatagttgtgcctttaagtacagtgggaaattggctcagagaaattcacagatttacacctcacctgacagtggttaagatatgtgggtctaagaccgaaagactccacgcaatgtctgaccgcctggcatacaacggactttatgacctcttcgtaacaacgtacgaaacagtgaagtgtgaagaagccttctttgtggaaactgtaccccgttggcagtgcctcatcctagacgaagcacacagaatcaagaaccagtctggagcactaagacattcaatggatcgcattgtggcaaacatgagattactactgacaggtatttttcacgctattaattactgatttaggaacaccgttgcaaaataatgcacaagagctgttcacactaatcaacttcatgtttccagaattattcagagactcacaaatcatggaacaggtagatttttaggactgctatcactattaactccctaagtggattttatttaacactatcagtattaaattttgatgtcaatcttattcattaaacgcgttttattaattttattcattattaagcgctttttatcaattttattcattagattaacaatattataaccgcttgatataattggtttaggcatttaatgtgaagaagaggattagaaacgaagatgagatgaatttcacagtggaggagttggagtcgataaagacgttgttgtcgaagatcatgttaaggaggttgaaggaacaggcgataagtttgccgaagaagatattccacgacgtgtggttgccgctgagtgaagaaacactaaagtggtacagaacattgatgaacatcaggaccctgatgagagaaaacctgtcaataaagaagctgctgggaatcgtgataaagatgagaataatatgtggacacccgagaggaattgtaagtagaccccaacagcgagagaagcttttggagttttttaaacaggatttgaatttccagaaacaaatcgagtcagaggccaatgaactgaacgaccttaagggatacacgcatatacaggcgtctgcaaaactaacattcctggacaaactgctgaaccaactccactatgaaaactgcgcaatcataccgaattatctcaaaatgtacaaccagcacctaaagtctctagatcagtcactatatcgtcagtttatcaacaataatccagatccacttgtgaccgcaacagatacccagtttttgggacccttaaagatggacgcagtgaccgatgacttcattaaggggaagattttcaagatcgacccggacaaatcgggacctagcaagataaccgatgacgatctaaagaacctgttgatggtgaaaacggaactgcccaagtttgaacccaacgttttgaaagaattaaccctgaagtctgaactcactttaaacccggaaaacatttttaaaggtgagcttaacctaaagagagaagtagtggataaggcggaatcggaaacgagctcatttaaaagagagttggaagctgaagaccaggatcagaatggattaaaggacggcaaaggagataagggatcaaagaagaagaggaagaagatctcgaaggatgagtttttgagcacagttgagaaccagtatgtgagagtgcccaaaaacactagtgaaaataaaatgtacctcagtgactgcctgcacgaggttaacctgactcaaaactgcccgtacgtgtcaatgaagatctatgagaatgctctggagcaggaagcgaagtataagaagagcaagaagaaagttttgtacaagtttgagagcacaaacctgattgaagccgccgttggttcaacagagtcgctctcaaactacatcaatgacccaaaccgcaaaacttccagagtgatagaatcggatgacgaggatgatttaccagagacaaatggggataagaatgtattaaatggcgatggcacaccttcaagtgataatttgttaaatggtggtaaagatggagttggtgctgataaatcagttggcggtgataagtcgggagttaaaagtgaaaaaactgcagcgagtggtcagaataacggagttagtgttgaagcagaggacagtaaagtgtatatgcataaggtactgatatttacgcaatttcaattggtgttggatgagttggaaacgtattgcataaatagaggttggaagtatatgaggctggatggtagtacaaataaattaatccgtgagctggatatacgcgagttcaacagcaacaacagtaactattttgtatatttgataagtacgagagcgggaggtctggggattaatttgacagcagcgaatcatgtggtcttgtatgacgaggattggaacccgttcattgatctccaggcgatagacagagcacacagaattggtcagaagaggaatgtacatatttggaagttaatttcagagtggacagtcgaggaaagaatggccctgattcgtgagaagaaattacaacttgacaagctgattttgcataacaagaccacaaaagcaggtgccgatgaaggtgattcaagtttcacgaatagtgtgacaaacggtgaaagtggtaaaatcctggatgaagaggatgtgataataagtctatcgcacgcagcaatgttgaagatgatgatgcatgggaacaaggctctaaaatgccttgaagctgaacccataacggatttgaagctgaatgagatcgtcgataggaagcgcagagcaccacctgaacaccttgatgacacaaatgacattgatgacgtgattataggctcaagcaaccaggtgcaaggtgaagacagagtaattatccagctagtgaaggaggaagatgaaatggatataacccaagaagatccagcaaaccaccccaaaaagaaagtttctggactcctagtaaatgatctaattaatgaagaagataccacagattacggagttaaccaacccaacgaaggtagtagttattacggagttaaccaacctaacgaaggtagtagttattacggagttaaccaacccaacgaagttagtagtgattacggacctgaaggagttagtggcgattcagtagattacagaggcaatgaagatggtggagattatggaaatactggagatagtagtgactatggagcaacgggagacactggtgattacagacttaataatgatggattagtgaatggcgcaagtgaagtgaatgcaggaacatcagaaacatcacagacacaagaagaaacgcctgtgaaaaaaagaggaagaaagaggaaaatggtaatggagttggaacaggcaggattattgtggagaagtgtaagagaaaagaagaagccaaatatgatatacacaccaatggagtggcagaagaaaggtgaaggcagagttttaagacacgagaccaagtgtttttgctgctcaaagcctaagaactttagaactacatataaagacaaggaagggaatgaggttgaagtggactacggagagttgatcaagtgttttagatgcccgaagagttatcataagttttgtgagagagtgtctaacattaagaagacttggagttgtaggtggcatgagtgctgtttgtgtttcaggaagagctctcagtgtggaaacttgttgatacattgttctagttgcccgacatcgttttgctacgactgtttcccaccagattacacacggcattacgtcagtgacgactactactataacctaaaccagagaggtctggtggcaaactctacaaattggatatttttcctatgttcaaagtgcaagatagagtctgaacgtaagcgtaggagtatatccggcgaggaacgcgacaagcacaagaaggaacagaaggagctgcgttctgagctattaagtacaatcaagagtaaggctgacaacatcagttcacgtgaaaccaagagactccagtcaataattaaccgtgaagataagaaacgtatcgaagccatgaaaatacaggaaagtgaacttgaggaaagacacaggcaactataccaaagtctattccccatcaacctcatcgctgagattaaaaatcgcatcaactctgatattctcaatgattccactccagataaaagtaacatcgataagtttgatcacgcagataatcaatacaaaggcgataacatggatagagttggcgggattaagggagacgcagatgatctggacagtatagaaaaacgggataaatctgatagatatgacgaggattggggggtaggaatgagaagtaagagacgcggattaaacttttcaaatgttagactgccaagtagaatgttacagttctgtgataactgcagaataccactgcataacatttataaataccgagaaccatgtccgttcccaaaagaatacattaaactagatctcgaaatcaatgtaaaaaaaccaaaatctgaagaaactccaaatcatacacctgacgttaataccaccgccactaattcctccatttccaccaatagtactcctgtgaccactaatcgtagccctattactgctactaatagcacaaatgaaacggaatcgtcggataagtataagaagataataaagaaatgttattgtagtttatgttatgagaagaagggaaagcgaagtgtacattttagaaggcattgtgatttattaactgacgaagataaggaagagtataaagttaggaatgagaaagttgagaaggcaatggagttacttactaaacttataccttctacaccaaacgctattgactatactcagttcaataacattaaacttaaagcgctttacaatcacatgctggaccagtgcgactcactatatctcaaggctctgatcaatgttggactactacctagggaagctgatagtgacactgttgttaagtatccaccacaacctaccaccggtgcttcagagtctacaaacaccaaggaaaagccatctgaaggcactgcacccgatgaagctagtggacttgtcaaaaactatattcgctcatttaacaacatttataaactgcaaaacagcctcatgctaccaatcatttacaaaaataatccagacaatatttaaaatcattaatgttttgtaccacaaatttttatactattatgttattttattattattgttgtattatactattttagtatagtattatagtatttgtatggtattgtaaacttatacttattggtattatggtattactatattattaacatggtacaataatagtaatatacaagtatagtaatgtgtatggtgggttcagtatagcattgacaggctacatttaatgagattttcgaaacttttcgagaaattagtcaacagagaaagcgttgatatagctgtaggaggaaagaaaggaccaaaatggtacatggacgcgagattgagtttggtaaaacttcatattgttcataaccttaaaaggcgtaagagcaatgcaacatttactaaaaaatgtttaaaaatttgaaacttacgatttgaaaaacatcataaaaagtgaaaagatgctggtatatttagaaataatattgagagattgaaggtaaaaaaccttcaaaaaatccaactccttactggcaagtctaaaaaatatattaattaacacaattaatgtggaatgtgtaagaatctgatggaattcctagtttaacaattgtgtttggagtctattaattaagttttggatgtaaaaaattacttggccgtttcataggtggatatgtggttaggatgaccggaaacaccgtgaccatcaaaagtaaacagaacccttaggctgtggtcattaataaatttttttacatgaggtaaggcgtgctcagggtcccatttcgtgtcgccgtcctgaagcagaggatcattgatgacagtgcacgagtacccataataatcacaaaggctagctaattcagcctctcgtagctcacctttgccctcagagttacctaaaaaattattataacggggaattttaggtaattttggaaaattaaaaggtgtgcatgacgaaccgttggaaaggtataagaagtgtagtttaaaagtggattcctcgccgggtttgggaatgcttttcaaagctccgagagtagggaggaaaaacatggattcatcatcgggatgtgcaaggaggaagccgagacttggatttccggaaggagaatctgaggttgcatatttgagtgcctcgaagatgtgagagagcatgtgaacatttctaaactctgcaaacccacgtaataaaagtggaataaaggcaattaacctaaacttcatgtataacagagaacacgaataaaaacataaaatgaggtttaaaatggtggaaatagctaaaatgtaattgaggtgtaaaaaattatatatgcaatgaattataaataaaaattctagatcctgttatagataatgtttgtgggaatggtatagatcattttgataattataccatagtagaaggcggtacagaagaggccgcaagtgaataccgaaaaggcgatattcttcctcaacatctaaaaataattaataacaaaattataaaatagtaataaaattgaaaaataacaattatatcagagtgttatagtaaaataggtcataagtaaaattaaggtttaagtaactactgtattgtaatcttacggttctatcttgagagaagaacaacatgacggagccaagaacaagagcaatgagtgaagtgaagacagcgatgatgaatccgatgtagttgtgaggcttaattaccataacatagaccgatgctaaagaaacataagagtttgtaaacataccgctgaatgctccagccaaaacggaagccggaatcagagacttttgagagtgtttcctaacaaaagcagtgataccagatacaaagaaaaagattgagcagatagctgcaggtaaggtttccaagcaaggcatttttactgtatctagagaataagaatttcaaaaattaaatttgaagagttgtaactgatctgaagaaattttagtctgaatattgagtgaatttaacagcaaaaactgtctatagatatacagatggggtaaataatatatatattcaataccacacaacctaattaataacccttccaatcctccgtttcaacacctaactctgttcctaattactagttgtcgtgttaaatatcgcatttcaccttttttaatattcatgcatatactgattttacaaaattctaattacacattaaatttgcttcgattgatttatttcgctttttatttctttattttaaggttaatttaataaatttaaaagttttttgcttataatgttaatggaatctcacatattgtaacatttcatgtatttatatatctaatgcacatttactgatttactttcatttatcgtttttgccataattttatttttttcttaatttttataatttttatccgattttcaaaataacttgttttaaacactctctacattatttctttatattatataatcatatattttttcttattttttattctgttatttttattttatattattttatttattatatatattatcactttttaataaaattttgtaatttggctcttttgtgttaccctccacatatataattatgattccatctgctgattccctcttataatttatgtttttgtgttaaatatatttatgtgtttattttaatttattatgtaaaattattgatatgtaaataagtgagttttgtcatcgccataaaagccatatttatgagttctagcaaaactcaaagaaggagattatctcccagattaattggcaaaaaacagccaaactatagtgacctttcaacatctgtgtctttaaatacttgcgagtcctccacatcaacctgtgactcaataaattctaagaggaatcttccacaatctaataaaagacttaattacagtattaaaaatgatgactatttaaacagtgacacggaatcagacgatattccaccatcaacagtaccttccttacatatactcatactctgactcatcctattgataatttttaggaaaatgtagtaaaagaccctaacatatgtagacgctgtgatcaacttacagctgaactgacacaactcaggatccagtcatttgacaagtgggtatccgagataaaatcactccaggatatgttaataatgaaggaatcaataatagaggattttaacagtaagtggtctggcaaggaaagagatttaaggaggttaaaagctgacctaacaaatgctcagaaaaccatttctcagctccagaatgacataaattacctcaaaagcgataacgatttcaaaaataccagaattgaagagctggaatatatgatcgaggtaacactttaaatatcaagttatttaccttttcataattaattttagggtaaaaatgataagataagtcagcagaagaagattattgagaaaatggagaaaatggcacgcgaagatagtaaaataataaagaggctgagggtgtaacaactaacgacacataacttcatacactgtaaattaatgtttttataaattcttattccactttaaataattttatttgtttttatagcgttaaattactattaattaataccaatcacgtgattccaataacatggtgttattgaaaattatttcatataatttaagttacaccagtttttttagtttcatttattcacattaaatgttgttttactaaatataattctacttttttaattaatcattcgttaatatggttaggacattattaatttttccatatagtttattttatttaatattccacatttttaccaagctattgtaattattatggtatatacaattaattcgataatttatgtaatgtatattttagggtgatataacatcgtataatggcggcgccgtggttgccatgatgggagaaggatgtgtagcaatcgcatgtgataagagactggggttgaaccagcaggttacggttagttcaaacttcccaaaggcgtttaaagtaacggaatcctgtttttttgcagcatcaggactcgcaacagacgttcaaacactgtaaattccattaatatcatttattaaatataggaaggaggaaattatgttcaaggttaatatgtataaactgagaggagataaggaaatgagtgttaaaacactttcaaacatggttggagcaatgttgtattcaaggcgttttgggccttggtttgtggactcagtgattgctggattagataatgacagttcaccttacattacatgttttgatcttgttggtgctccatgtactccttcagactttgtagttgctggcacttgttccgaacaactttacggtgtttgcgaagctcttttcaagccgggaatggtatacaacacatatatactattgattacaatcttataggatcctgaacaactttttgagactgtttcacaatgtttaatggctggaattgatcgagattgtctttcaggttggggcgctgaagtacatgttatcacgcctgatcgagtgatttcaagatcattgaaaaccagaatggactaattttcttaatatttcaatgataattgttaaacatgttaaataaaacattttattcttgtttatgtgaattttctccattattttcatttatgtcgagtggtacccgattctagtggattctgtgtagaataactttattttaaataatatatataatcgcaattttttctacattgataatgttaaattttgtacaatgtttttaaattgtcaaattaattgtttcgttaactttatttgttatcttcataggattccttatataaataatattataaatctataattgttataaaatttagtgtttttgtcgcaaaatcagtttattcttgtaatatatggttttttattgaataatgtgctttatttgaggtaattgttttgtattattatcatgagattcctacaatgttcgattgtagaaaggtacagattttgtgtttttacgggttacagattcttaacaatttccactcagaaatcagtaacggattccacatccggttctaatgtaactaacttaaacgtaaaagaccctttgaaggttaaaaaacctaaaaatgctacaacaaaggctaaaaaacagtctgtacctgaggagttttttacacctccagacttatcagacgctcaggagaagtctgtagtccttaggaagccaattcccaagaactttataagggaaactttactccctcatctcgaacataatgttgcctacaactgtatgaagtttccacctgatgttgtgcttcaaataggaattgcctactctaaattaccgcatttcatcagacaaaggagtattgaggatgctctggttgaggctttcaggttcagaatgacagattattccgcaccagattgtattcagctccttaacacctgtttaacccttcaaggactcaggtgtttagctgtatacgatgatatagtcacaagacttgaagttccatatatatttaatagtatcaactcacttaacagattaggtatttgtagtagtgtttcaaggatcctaaaacactcacagatgatcacagactctgacattactacgagtactgagtatacaaatggtgaaaacagtgataataatcctaattcaaacactgaaactagcggcaatccaggtgaaaaacctgaaaatcttagtgaaagaaactttgttaaacttaacatgtataatgataattataatgacaagtatcatgtgtccctaataaggccttggagttatatagtaaaggggtaccgtgacaggaagattgcaagtttggttgaaaggctgttgaatttttgcgaggagagaatactacctcagttggagtatgatcttaagtcttttgacgctgatgagcttactgatttgttgggtgttctggcccagagaagcgaacgtgacggagccactttggacttcccaataatttcaattttgatgagtaatatcattaggctatatccatcaacttcacttctaaacagtcttagtaacctttcaagtctttgtaggctaagaattaggcatgataagtttttatctttggttttagaggatctcagaaaccccctaaaggtaactaacatttaccacaagcaccttagcaggtgtgtatggtccctggctagatttgaccttctgaatgatgtactctcagacttaatgccgcacatttcaagaaatgtaccaaaatttgagcctagctgttttgcaaggcttgcccaggtttccaggttctacaccttcaaagacgagaagacccataaagaatttaataaccagctaatgaagattactctgtttcttctcactaaacttgatgctttcagtcctaaggagttgactttctttattgcaggactcttttgcatgcgacttctaccagacgaaaaaacctttacagctagaaccccatcagagataaagccaaagttcgagaaggacgagaggtatttgaccaaagctaacaagagttcaaacagtttgatagttctttcaaaggtgttggaggctcttaggaggttagattcagaatttgacctgcttgagattgagaggctcatctccaccactcgctcctttgaagagtatgagtatctccttcagaagttcccggaatcctgggccaacattataaacccaccagaagacatgaattaatgttattttacaattttatataatattgagtatatacatttcattatatacaatggatttataaattgtatattcatgtgtgtaagttgtaacactattgtgaatatacacaagtatataaatgtgagccaaagcatacacaaagtgtatatatactgaatgatattaggaaagagaatcaggagtgtaaaaattctagaactttgtcaatgtactgatcagtgttcaggtaatcgttttcagtggctttagggtttctggcgagcgcgaggtccttggtcatgaaaccagcgtcgatggcttcaacacaagacctttcgagtttttgagcaaattgaactagttcttgatttgcgtcaagctttcctctcctctcaagagccttagcccatgctacgataattgcaacaggattagtgctagtaaccactccctaaaataagattaacaaatgtaaaggtaagaatgtggggagtaccttttggtattgtctgtaatggcgagtgactgtgccgtgagcggcttcagataagaagcatttaccatcagaagaaaagagaacagaagacattaagccgagagaaccgtacctaaataagaattatacaattgtacagactggtgtaaggtgtgaatagtaacatacgcttgagctacgatatcagactgaacatcaccatcgtaatttttgcaggcccaaacaaaaccaccttctgactttagcgcaaaggctaccatatcgtcaattagcctgtgctgataagttaaacccttttcctcgaacttggccttgaattcctcgtcgtacaccttctgaaacaggtccttaaacctgccgtcgtagtacttaaggatagtattcttagttgaaaagtacaagggcaagttttggcttaaagcgtagttaaatgaagcccttgcaaatcccagtattgacttgtccaggttaaacattccaatagcaaccccaggacctttaaactcatgaacaactacattctttggttctccaccttctggagtgaaacgaagctccaacttcccaggctctgtcacaacaaagtcctggcagttgtactggtctccaaatgcgtgccttcctattactataggcttcttccatcctggaaccagcagtggaactgattttgtaattattgggaccctgaaaacagtcccgtccagaatattccttatcgttccatttggtgatttgtacattcgcttcaagttaaactctaaacatattagtaaaagagtaataaaaatatgatttaccctttagtctggcctcgtcaggtgtaattgttgcacacttaactccaactccatatttctgaattgcagccgcagcatccaaagtaacctaagaaacaaataaatacaacacataagatgtgtatagtggataattttataccttgtcatcagtagaatccctctgttgtattgacaagtcaaagtacttcaaatccaaatcaaggtgtggaaaaatcaactaaaaataatttgataagatgttgataaatctggtgaaatataaaatatataagttagggtaaaattagttactttgttcttaactttatcccacatgattcgggtcatttcatcaccgtcgatttcaacgaccggatttttaacaacaattttatttttaaggttcattttattagaagcaaacgaagaaaaatgattctttgaggttaaggcgtgaaggatgttgtcatttacagataaacaattgaaagcgtatcctaatgtaacaaatgatctatgaaaagataggaatctggccccaactttacaatgttgtgacaaaaacatgggtatttactaataacgaaaccatgtacaattatctagggatttaaactaataccattttacataaattcatcgatggggtctacaaaattcctatttggatagtctggacaactggaaaaggttatttaaatttagaaataacaatactacagattttcatttaattaaatggttaaagaagtaaatcaggatcaatttatgtataaataataaattcatattttaataaaaaatttgcctacacattaatcttatttttaatcttccaatgatattatagctatttaaacaaattgacgttgttttacatgatttataataagttttatttaattacgattccaacttctttttatcacccaagaattcttcattatatatcagatacacattttaattttctttattgtttctgttgtattttttaaattaattttattttaaattgtgtttagtaattttaattttgtttttaatttctttaccatatttaattttacaatgtgtacactatattaccaattattttttaatcttccaaaaatacaatgactcctaaatcagtttcctttaagtctgtttgggacaagatctcttgtaaaaacgacaccagccttgacccattagacgtatccctatctcatgttcctatagttaacacttcaccagtaattcacgacgttagttctcctattttaaatccgaaaaggtttttgattgacagacctttaaaaatctcatcagaatttgtcgtttcaggtaatttataattttatttactattatcataatacacatcaattctttaataatattttcatagagtttgatactgagattaaggaattttgcacagataacatagatgagttgattacacccggaccatatgatagaagatctagggattccaacgattccggagtatccaccgtcgtctttagtgataaaataaaacttaaccagtctgactcgaggagctctgaatatagcccgaatcctctatcaaacccagagcgctcagactcgataaatacgacttttgaagaagttaattgtccagagaattatggctattccgattcaaatcctgatcacatctatcacacaccagtccagaagtacagaaacgcaaacaagtcttatgagaatttcactattagctctaacttatctgaaagtgataagatattcggagaaattaagtcagatgactcgttcttctataaactcctcgataaatcttggcccctttcatccggcaaaggttctttcgatcttgaaaacccagaggtttctgacgatcttatcgtaaatgagcagaatgagcctccaatacagttggatttagacactccaaaggagattgagattaaagattctggggaactaagtcaggatgacaacgttataaagattttggtatttactgatacacacttgggatttaaggaagacgactctttcaggggtaacgactctctaaacacttttgaagagcttctcttcattgcaaaacacttggaagttgaccttattctacattccggagatttcttcgataaaaacatgccaagcagaaccacaatgttattttacatatcattaattatcgatatagttaattagttgtgaaatagttaattaattatgaaatagttggttaatgtattttgatgattgtatgaattggcttaggtatcgcaccatggatttgttgtcgaaatatttattaagtagtatgagtaagttaaaagttaatacgtcgggagttgaaagtgcaaagctgattagctttgagaagggtgttgcaaataaccctttgggtgatttgtcatatttcagtaatgtttccaaggaatatttaacaccttttttcgtaatacacggaaatcacggtaaatttcgtacatcatatttgctttcagataatccgacatatcaacactcattgtcaccaattgacatcttagacgttgctggattggtacttataactctactcatattttttaggtaacgtatttcggacggggttttgacctggataatgttttaataaggcctataaaaatctctaagggggatgttaagatcgccctttatgggataggatggataaaggatgaacggttggtggagatgttcaacaacaacaaaattaaattcgagcaatgtgaagactttgacaaatactacaagatactattgttacaccagaacaggtaccctcggagaggagtcaatgaccacgattacataaccacgagtatgatcccggagtggtttgaccttgtaatctggggccatgaacacgagagtattaagtttcctcagaaaagctcttttgaaaactttcaaatactacaactaggatctacaattcaaacatgcctagtaccagcagaattgccaccaaagcacacatgcctcatacatgtttcgtcagaaagcgttaatttctacccaatttcactcaaaaccaccaggaaattcatctcagacgaacttcccaatctcaacaaggacgagctctctcatatggaccatgaaagtttacatgagtacttgaagaaggtaatttttatagtataactgtgtatcaggctgttgagaaggtactggagaactcggaggccaatttcacaacggagttgaactcgttatcattgagtgaggagttggatcttccatacatatcaaagataaaggcactcataaataaggcgtcatgtccactggtcaggtatctaacacattctcacatgatgtttaacaaattcaaacagttctccacgttctgaaataacgttttaggataaaggttgatccgtctgttttcgagatgattaacccgaagttgtttggcagttcatttataggtttgtttagtgagattaaaatttttagggaaagtggcaaacccaaatgatatattaaagatgaagaaagtagaggttgaagagggttcaaagatgaagtcagataacattaaaaagaatatgaaacagcaagtgttatcctcaattggggataattgccaattgtcactcttacttgagagtgaattgagtgaggctgttggcagatttgcaaacgccatggtaatgtaaatattttaaattgattgtaggaatcacaaactatattggaatatgtaagaagaagagttgctttgattcaggaatatctaaagactagaatgaaagaaacagtttcagaccagctctcagaggatgtttattcagatttaatagataaattcttacaagtattgagtatttggatcataatgtttaggataaaacgagggccgatagacttgaagctggaacaaaaagagatctaaatgggtcaggtgtaaagaactatgaatcatacctaaaccatataatggaagaatataataaaccacctcaagaaatggcaaatggaaggttagagtaaattaaactcatatgtgtagtgatgaaacggctgaaaatgagaaagaaacaaactgtaaaaagagaacaaatcagagaaattcaaaatgtgtaaagttgacatggtatttaaaccaaaatggagataaaaaataaccaatcacccaactgttttatctcataaccttgacactatatttaatttatatcacccctgtttaatgttaattttgtatttataatatattgtaagtgtatttatattaaaatggatgaaattaatatttgctgtaaatataactagtgaaatatgtgtagtaaggaggaggaactgaaccttctcctgagtaaattagatttagcatttgaaaaacattcaaaaaagaatgaatttaatgatagtaagccgtttgtatcaacatttgatgttgaatatgaccatgataaggttttgagcggagtaaagagtttaatgtcaaagggctacttaacccttgaagaaaacaaatcaaacacatatatgttgaccaaagagggtgaaaaatactccaaaaacaattcacctgagtacattctggtccagaaggtcaaggaatctaatgtacctcaactttaaaccaattatttatcttgtttttaactttgttaattaattgttaggttttaaccgttgacgaggctctcaaatctgttgaaaatgcggatattggcttgaagaagtgtatgaagaataagtatcttaaacttgaggataaggtgttatccctcggattaaactccttggattctgatttaactcagagtttactgttagtagttggaaattatggaaaatgtgagccttctatgatgttggagctttcgaaattgattcctgataagaagaaattggacgaagaattgggtgatttgaagaagagaaagctggtgacatctaggattacggtgtgctataacgtacggaagaccgatgagtacaagtcctcggtaaggcctcaaattactgatttgactatggagttactggagagtgggaagtgggaggaagcaggtaactttaacaatattgaccatttttagaaattaaaaagtacaacttcttctcaagtggtaaaaaagcacttaatggagatttacaccctttgatacatacaatgcaggaatttagaagaattttaatatcgatgggatttgaggtataactcagattagttcattttggtttaggagttggatactagtagatatttggagtctagtttttggtgttttgatagtctttacataccacaacagcacccagcaagggatatccaggacacattcttccttgatgtaacttaaacctaatctcaaaatgtttgtagaaccctgaaaaaattgatcctaagtttctagatgaggcgcatgttaaaaacgtgtcagtagcccatggagatgccagggtgtataacagctttggatggcaatataactggtagtgccttaattttaacttgttttagggaccttgatgaatcgcttaagacaattttaagaacacatgtaactccatgcactgcaaggaaacttaaacaaatggcagatgattaccagaaggtaaattcaaaaattatataaatattgttaggggaagcctattgttccttgtaaattctttgcaattgataaagtcttcagaaatgaagccactgactctacacatctctgtgaattccatcaggttagttttattaacaccaatattgttagattgaggggtttgttgtgggttttgacctcggactaggagatttgatgggtgttatggaaacattctacggagcgataggaatagatcctctgaggttcaaaccagcttttaacccttatacggagccctcaatggagatattcggcttccataagtcacttaatacctggatagaagttggaaacagtggtattttcaggcccgaaatgctccttcccatgggactcccagagaatctgacagtaattgcatggggactctctttagaaaggccaacaatgctaagccataacattaaaaacattagagacttaatcggctgtaaatactaatgtagaattattttttacaaattttaatctaaatgtgtggtctagttaatcattttcaagattccacatttttactacctacacatgtgcatataagatcacttgatattattaaattttatttaaactaatgtttaaaaaatatttcttcaactttcaatagatatcatattaatgtttattaaaatatatttcattttgggtaaattgtacgacatctaaatttgttgttaggagtattgtttttatctgttaaaaactcaaattcacaggatcgtgttatgaatgaagatggacctcaacaggattattctcaaatgcacttgattgatgttgacaagatatccctgtcagatgacttgtcgaagtacacgatgtgtaaggatgtgttttacccggacagtgaaataatgaaaatttgcaaaaacaactcgatttgcagactacttccaggacacgaaggctatttgcaggttttctgtgactgctcaaacaccgtcacggaaacacattactttatgggaccacaatgtgaaacaagtaagacagtagactatctaaacgtatatgagaagctcacaattttatagaaatggtcatatattacaatcaaaatggtaagtttgtgaataatttaaatctttagtgtatggaattgttaacacgtcatggcttgaagatattttctcactaaactcttggaaaaacgatttttcaagagttggcccattgttttaggctcttaatatagtttttaaaatttaagtcaattgtgcttctgttttttgaccacttttaaagtcaatttcaggatgtgttttggttagctcctcaatggccgttttacactccaaaaacatcgacttaagcatccttggggcacttgggtccttgacaagtggcttcattttttccctcatgaactggtcgaggtcagaggcgaagccggttagcctctttttagtatcctcgagcactgcggttgtttcatttaccaaattctgggcccatttaacttcgtgttcatcaccagtagcctaaaatatgatttagtgcgttattagtataggaatctaatgtgtataaattacctttatggattccaacttagattgggcctctacaagctctttcttgtataagctatactccttcattgtccttacaatggatccctttttaatctctaacatttgttttggttccatttcgcggatcctactatcacgttttaaaattggtaaattaagactattgtacagaaaattaaaatttatttaaaattataatagattaaaattgtagtataaaaatataaatatgttacatggaaattgatatactacattatttaacacagtatcattaagtacacagaatggggaaatgattttaataaaccagggttttgcgcatttcaaatgcgtcgtcagtatcatcataataattgggtattgtaacatgaacgtaataatcaagtttcttgtaaaattctatggccgttgtgttgcgatggttcacgaatagattcacgtatttgcattttagattcttgctattctcctcaaactcggtcataagtttagctccaaatccgcatcttctaaaacctttgcttatgaaaatcgatgttatatgaccgtaatgtacaccctcactagttgtattactacctacgaaattattagcaaacttgaaccaatcaacctaataaaactctatataattgtttataattaatatttaaaaaattctataattcggcgctacctataatgaatccttccatattgtcgtcgacttcaagtaccagagataagtttgggaagtttttaacaaatcggtggtatatttgatcagggtaaataattgtaaattcatcggattttatattatcaatagtttttatatcatttactgtcattttcctaattttgtaggtggaatataagttctccatcattgatgccaataatcgataaacgggcgggatctacatgtataaatcatgaaaaagtgtgaaaacaaatatagttgtaggtgtgaattgtataatacaacattcagcaaaatataaaaataaaaaatatataatgatcacaattcctgatttctaacataaacggggttgacggttgttgttgagtaatttttatattttcttgcgacaaacaattccttttgtcttacgactgtcaattcttcaaggactaaaaagcagtaaaaaataacaaaataccgggagcagttggcggtgataaattttctgctcctccaacggttgattggctaacacgagacgcagatccaacatcggctgaggatatacctaaaattttaattaaaggtcgaacaagagtcttatttaaatagatggcaatgtgtacaaatataattatataataaaaacaactaacttggaagtgagaaattaaatataaagaaaaaaaatcccagaatcagaaaaaacttcattgagtatagatttaagtgataaaatattaattgggataaataaatatgacatttattgcagatcataaagcctgacattaggctaaacatttcatgatatttattgataaattacataatattgtgttattattatttactcataaaaattaaaaataattttaaattttagatgatttagtttttagttcgagagtcaagttcccagttccaacttctttactttcctcggatgcgttaaaagaacatctaactctgaatccattagtacaatcggcgatctaaacttcacattcatttagttctatttattaaataaaaacttaaatgtgcaaagacatttgagttttactttactgaataacagtaacaacttgcctttaaatcttcaacgtctgttggcttcttaaaactttcagttggacaagttttaactccacatttagtaaaacatgaatatccctttggatataccagagctgattcatcatcacattcaccttcattgctctaaaacacatttacatcactcattaataccttgtatggaacacatttaaaccttctctggcccggtttacaacctaattccattcatcaataatcaattacaacacagaatcaacttttatataacaaaatttacctccagtttcaaagtatgttgatgttctatccactttaagtcttattttccaagctataatgcgattagtgtttaaaaataaaagaaataagttaaagaataagaataaattgttactttcagcttgtggattacactttaaaccctcgtccatgtatgtagtcccacattgagacatacagaatgtattcatattgacagattcaggctagagacatattaagcaacaaattatatataaatgggataataactatgtataattagttacaggtaaattttcgcaaagtaaaaacgtgttatacattttgcctagttctgaaaagctcctacacattatcattaaaacattataaatgtttaaaattgttagtttaaataaaattacctaatttgagcgaatttatattgtttacaagtaataatatcaatttttgcgataacatacaaacaagtatgtatattcaatattaatcttatataatcaataactttcattttagaaaactacaaaattaaaattttttactaaagataatatacacatgttataaaatatagatttatttattactatcgatattctgtgcccaatgtgtaaaacgacatcaagtagaattttgattcaaaaaaaattgaatataaaatgtagtaaaattacaacaaattaaaattattatatcccatcaatcagttgataagtatgatattttgaatctgcttaaaaggtgtggaagagatcccagcgataacccgaattcgggattgtaaaagtcatataaaggaacaaattttaaactataacctttaggtacactaattttacaactttcttgaagtacaacctatatatttttaatttatctagatttacactagtgtaagtacaattattcttatgataaataaatttcatgtttattatacttaaattatagttattaagaacctggtataatgaaatcttttcttttggtctatttgtatgtaatggaaggtacggtagtggttcagtgttgaagtcacatcgccagaaatccgccaacaattctcccacttgtatagtttcaatagtctctttgatgtttaattgatgtttgtgcttagttgatgttatgaatctggctaatttagaagataaaacttctttaggattctcgaagcttttacatttaccgcctaataatccaacacttttatccaaatctctctttagtaaaagaacgaatggaaatccctttctgtgagataaaattacaccgcatacagtgattctcatgccactaacggcgtaagtctttactcttttttcgaggatatcatccgatagcctaaaaatcaaccctcttccaactttagttgtgttgtgttcaaatttgaacattgtttgtggataaacatcccactctgatctgtcatctacctgcggcacgtaggattcttcctcctccaacactccattctcactcattattaattatttaagttttatttacaatattttattcattataaaaataaacatttaaaacgaaagaatacaaatatatattaaaaatttaaaaataatattaatcatattgtgctctacagctgctcaacagaaaccatctgtaacacagttccagtttcagggcaattatcagtcttacaagttgatgtcaacttaattctcttattcttaaccttgacttttttgactattgtgtaaaatgtgtcatttctaaacccttctcctgttaaaagcggtgttccattcacctccaagtatgcttcagtatcattatttgacttgcaaactgatcctaaaatgacttcaagcttatattctccatcttcaggcagttctatcgaccagtaattcccagaacatttctgaacagttatatgtggtctaaacttacctctttttgaacgcagtctaaagactcttttggtggtggaaatctaattcctccgccatataaaggattatcatttgaatgacaaaactctccatgtgcttctcgaaaccatcctataacattcattcaatatataaaaatgtgtgagtgtatatagagtgtattaccgtatgataaatcttccaagtctgatttaacttgtccattgtctattaagtaaccctgagtaggtgttttatcaggttgttttctgaagaggatttccaattttttcatccttttcttctgtttatggtgcgatttggaaagaaggtatcctgaggagtcattagatttaatgacattaacttgaacaacacatgacccagagtcctctgaacagtatttatttgacacagcaattggacaaatagggtcgttttcagaaaacatcttttctccatttccagaattgaaattcttttcaaatttggagtccgtaaccaaacattcttgctggcattcagcgagaaatttatcatcgtttttgaagatatatatgttctctaaatccttcagtgtctcagaacacctgagaatctctacaaacctcatggtttctgagaatttgcaaggtattccaatgataccaaatgaccccccagtctcggaaccacttacatacatttcatctatcgtgagcttcacctgtaaataattataaaactttgtctaaccgatgttgtaatcttaggaactgaaagcctgtatgaatgatgttccaggtcattagagtggaatacactgaaagtttcaccccctccctctaattcgaatattaaaagacaagataattaccatgaaatgatagagttatctttgatggccacgtgtaggatgagtctctaggcctgaatttgaactcagttaccaaaactggctctctaaaaacaacagtcatgttttctccagtccctatttattttatcaatttaacaaaaatacctccactggttctccaaactgattttctttgatcaagatacttcccacttaaggacgcgttacagtcgtagtctttagaatgcgatgaactctcagaacatgacatgaaataattacctcctggcaaactaagtagggtctcagctccaactaaagttgataaatatattcagatgacttactgcatttgttttgtttagaattaatgttatctgagaggaacattatgaaactcacatccgggtttgttgtaacaaatttgtaaattacacctctaactagagatatctgtttcagctcaacttccaccagtgtgctttcgttgttaaacttgaaaattctattcaattttccaataatgtctcctggtgttgaagatgatgatctttctccagagtcatataggtctaaatattccagactatcttcctgtatccattgtagttcttcctttgggtttaatgggaaggggaacccctttttgtatgcaacatacagatttgagtcctgattaacactcatattgaatgagcctatgttatgcttttcatcacaccttatcagctgagcattaattagcccgtttgtcaaatttgcgataaagaatttgttattgtttctgaaggcactctctccgttcaatgatgtaacaatctcaaaacttgaagcaggtaggctaaataaaggttattttacaaggaactcactggctaattgaagtgtgtgtcttcttaaactgtgaataaaagttacttgagggaatcacttccttaggaattctatgacttgaccatagtaacctgtgaataaagttattatgaagtttaaattttacttgaagtatgattctgagccatcagtgtatttatattgctgagaatgcgacatttctacttttatttgataaaacttccccccaattagctgctgactttgcgaagctttgaggtcattcctctgtataacaggatcgatgaagaacttgtatccgatttcgtcattcccatcaactcttataccaagatttataatctcagacccgttcagttcaactcttccatatgaatcagtatctacacaaagatgataatgtgggataaataccaagttcaaagacataatttcctgagtgaggcactttcaagtatccttcccaccctaaaacactaataattgttttaaagcttacgaattgagaatttataagggcttataccaatgattggcattttatttacaaacaataagttaatttgaggatcaattcttgtagaaactgctgggaattcaaaggtgttattggagtaatatgtcccaattaagccatcagaaacgttgtatatatcactaaataatttagtaatatgattaaaatacttgtctgggtaatactgagtggaatgagatttcctgacctcgttatgtacgcactgtatctttttaatctcgttcttgatcttgtcgatttcatttttgagttttgcaacttcttcaatcttcttttctgaatcatcaaacattgattcgattttcaacagtgagtcacttattagcttatgacccatcccacaaactgtggacaatctagataattataatctgttgtagttaacaaacctcctttcagactcctttataagtttcctatatatgttcagtgatcgtagcatttcatccacttgagaaactttttgtgagatatgattaagcgttgcatttcttatttcctctgaaaataagttagtaattcaattttaaattaaaatgtcacataccataatttaatggagtttcacaaaatccccaatccttctctaccttaccaatgagttgcgattcaaggtaacaccattctttccctgaaatgattatattttaataataaagagttatggtaccctcggttccatctggagcaacctcgactgtacagtcagtataaatctggtctctctgaacaaacgccgcagcacacaaatgaccatcgacagttctgcgagctctattacgatattgagtcaaatagtacatcaagtcattatcattctcttccatgttattttcttcattttcgtcagttgtaacggcaggaacgttgctattatcatagttattatctttagcattattctgagataaattatacatagcagtgttatgtgttatattatttgcgatttcattattattaaaattattattgtattgattttggggtaaattgtcattattgttgttaggtttgtttatatttggcatatagttagggttgatgtcgtttggtgtagcattttctggaactatttgctgaatttgagaattaggaacattgttatttatgttatcaaaaggtattgggttgtttttaagaaaaaaagagttacagaagactaaatgtgtacagaacagtccgatgtataatatgtaataagtgaatttacacatttaggtaaaaataaagatttagataaaaattaatttaataaattgaaatgatcataattaaatcgatttccaagtaattttaagaaaatatgaaaaggatgttggtagaggatgggggtgtttaaatcaactaaaatatttatttaactaatcatttacttgctcttctccacaaacttctacactatcacaatccttgtcaaatgcgttgctccattcactagcacaatctcctggttttcttctcctaaatatcgaccttccagactgtagtggtattcttttgaatgccgcatttgaagaaaaaaaactaggtgttaagtttacaaattttcgctcatcgctaataccctaaaagcgtgattaatatgtcacatggaggataagtattattatacctctggtaatacttctgttccattaacttcaaagtactcctttcccacattttgagtgttcccttcagtgtaaacattgttttcacaatcttttaggtcagaattgttttcatggttgatatttgggcattggttaaagttgtatccatcagaaaagttgtagtcgtttgcaaaattgatgttccgagcatagtttaagtcgttgttgttgtagtaataagaatcacccataaaatgattgttgtttatgttacaacaaggatctatggagtaaccttctgaaaagtggtagttgtttccaacgacataccctccttgttgacatggaacataagaataacagttcatacagccttgattcccattcgtttcaaagttatttggaaatgattgttgcggtgtgatcaaagatgagttataatggtcacatacaactcctgtcatcttacttactagaactgagccttgataaattataatattttgtcgaattttctcgttcaaatatttatatcaaagggcttaaaattaaatctatttttcgatttaaaaaatattgtacagctaaatatttatggtccttcctctgactcactaggatactagtgaatttaggtgcacatgtatcatttattcatttattgttcattatagtttctaatattttacagctagtattctaaaataatttatggtactatttaagtgagtttgtaggctcatggataacaattattggcggaggtataataaactgggccctattatattgtcatttattatatatccataattatattacaggtatattagtcagcgaattgagagttaaactcttgtatttgacttgtcacaagtttatccctcaggtgtatgagtcctattgtcactaccatctgcgtgaaaatgcttatccaaggcatctgcctaaatatgtttactgagctttcttctatacaaaaaccatctatctttgatccacaccgtctgattaatgaaaattgattcaaaacagactgtgaaattgatagtacaactgggacagactgctcaaacattggacttaggtaaaagtctgataccaaggtcctttgaacaaaccgattaaagtgttttattatatattttataatgtttgatagaagatggtacgaaaatcctctatatagagataacagaccgtcaacacttagtgtgtgtttaaataataaatgaaaggacactggcccatatccgtcataaattatcattctagaaattatagttagagcgggatacgttattaattcaacaatgaatgatgttacaatcttattcaattcagattccacttggttgaagtaaaagttaaaaaacttgcttgttgtagcttgactatttttgtccaaaaatcctatataacgaagtctaatattattatttgtatctaaaatgttataaaattttattttattaggaagaggtccgaaaatttttgggaaaataggtaatagaaagttaggaaccaaatatcttaataaatccttcgttaaatgatatgcgatatactccggtaaacatttaaagaatcctaatattccttcatttttataaatcgatactgctaaatcctttacgaagaataagctgtaagcagccgggaatgctccgactgcttcagtatctaattccctcaaaaacccattactagtagaataagggtcacaaagcgatctttggaatcttaaaactgaaattttattccctagaacagtaagcggatgattaaagaaaaaggaaggagtgagtgttattatgatcttcctgggcctatccgaaaatagactatcagaagtcatattttattataaaatttataaaaataaaatttgtataatatacataataaaaaataattaacaaattatatatcttgacctacaacacaagtgttgtaccgtatttgtgttacaacatacacaataattggtggtggaagtataattaattattatatgtattattttaatatttttaatttatgtgtatatttattgtaaattggtttgtttccattcatatgtactatatttgttatatatctgttcctgagttcagttgaacattttaaattattatctacagatcattatttttaaaggaatacttttatattatgaacataaaaactgtattcaaatctggattgttgatctttatttccaacgatttttctgggagaagcgagatctttttattgtaatattaagatgatcttataattaaatcatctgattgtataatatttctaaacgtttatttttagcaaaacctttttaacatttattattttaaaaccttctgtccatttttttacgttcaagtacacatatgttcttatcgctttttttattatttttactctcaaacgataataatatagcaaattttagttttaattaaatttaattatggttacttccaaaacttaaatctaaaattgatgattctgtaacatacaaaaatgaactcctctttgatacttgaccctaaggttaaatcgcaagaaatcagtgattctcctccagatttggtcattgatgttgattatccccttcccttcaccatagatgcttcaacttctatggaaattgaaatgaagtcagcgttgaagcaatgcatgagtatgctgaaaagttacctttttaggatctttataataattatagccctcattgcggtgttgtactttcaaggattgctaatgttaatgagtgatacctactatatgaagactaataggattcccctcctcgatagagttcatgaacttttggaaggtgtcaaccacccattttcaccagcattgtgtaacacactcatgtttattatagtgtgggtaggtatactaagaatagtatttttcacacccttgttttatctatttcagatggcattgaggtatatttttttgttcggaagcgcttatttcattaggggcttttatatatttgcaacaactgtaccctcatgttatctgaattgtaatccggatctaaaaaagagatctttcttcccactcttaatcaggataattgcaggttatatgggtctcgtaacaaactgtacagacttaattgtgtccggccacactgtgttcacagttattacagccatactcttcgtcgaaaattctaaatatctcgtaactaagattatcattacactatacactgggttcgtattgtttcttatcgttgcttgcaaatatcattacacagtggatgttttattaggattaacgatttctgtgctcctacactatttctattacactagagtcgatgattttggtacatacattcacaacaaaatattcaactccggctcagaaatctttctcggtgccaggaaaactaaattacattacagcttgataacaaaattcattgttaaaatggaactgttagaagaacgattaattttgggtcagaagttgaggactttgtacctgagagtcaatgaccaaaaaaatctgatagacaagaatctcctgaaaaaattcaaccacatggttcggctctttggcgcagatgaatctgatgatcttttgactctgttcagaggaactagaagaatgaacttttactattggaagtatttatatcgtaagatgttcaagaagaagaagatagtagaggttatataaatgaacccattcgcgatgtgtcacttgtgagctgattgagactattgttaagatgatgtaatataataatgtagtataattaatatacacgtgtttagatatttacagggatatgatatagatttattatatttataagttgataaattaatagaggaatttaaatgatattatgaattaatacgaaagtataattttgataatggatggggagtgtagaagtaaatatatttataagtataaaatcttagcttttgttaaattttaattagtattcatattgtttgtattattttaatatttgtgtttaaattaggggtcctggcttaattttttaatttcaatatttttcatttcataatttaatcaattactaatataaaaatgattttctgacttttgtttttgttgtttgactaaatgtattttaatgtttttgtattatagattttaaagctaatattgatttgggttaagtaccatcctcaatctcacccttgtgttctatgaatttaacttttgttttttgatatgttctcttcctacagttttgatagatatgctgatgataaaaacttaaatgatacaaccgacgattacggagaagttcattctcctgcatttgcctatgatggagtttgtaacttctcttgaggaaaggatacttaaaattttaaaagaatcgaaatcgatcttgtacggatatttatataggatttttttatcatttatatgtttcttgctgtttttctatttctacagaggaatgatttttataaatgatgtgtatttttatgatgataaaatcgaaacgtttagagatagaatacacgaaatgatagatgataaacatttggagtttttaaggagattcacagactggctgttttatccgtatgttttaatttttattttaaagtttcttctcttctgtccacctgtgtttaatattcagattttcctcagattctcaagtatatacatcttcacgtacttgataagaggaatcaatgtaatattctcatcaattccaccccctcatacagagtgtatgccgtatgcaattgaatcgacaaagtttaaaacgttgttaaaatttttatttagagaaaagagacaaataccatgcacaggcgtattgttttcaggccacgtgtattttgtaattctagcattcatcatcctctcacaaaactcaggattcttgttcaatatgactatgtttgtgtatgcggcactcatatcagtttcaattgtagcctcgaagtatcattattcaattgacgcaatgttttctattcttttcgctccctttatttacaatgtatacttttctagcattgattcgtacggagtacaattcttcaacaaactcaataataagtaccaaaaacctagcaaaacctttaaacgtacaatattacagaacagttcacttgtaaaatgcatttcatgggtcgaacaaatatcacaactgctagcattagggaataaagttaaaagtttggacaaacttgtcaatgaaaacgagttggttgatccagaattagtaaggaaattcaacctagtctcatatatcttcggatttagtgaaactgacgatttacttgatctatacagaggcgccaataagtataacttcacatactggaagatattgaaatgtaaattcaccagaagatgtaaaatataatatttttaaaataattttttgcttctttaatatattttatgattatatcttttattaattccccattcatctacacattttttctactaataaatttaacacttatcttttttataaattaacaaatgtgttgaattaaaatttattctataaactgttgtccaatatgacaattgaaattataaaggaaggtaggtgattgttaaaattagcatactttagatgaatataacacattggatatacttaacgatatctatggagataaactcgaagaagacacagcatttgattttgtaacccacgatttcttcagtaagaaggattctgcaggacaagatggtgaaatacaagaaccagaacctgcacatccagtaacaacaaagaaagctctacaattttaccctttaaacctgttctcaagtgcaggatacagcgcaatagatttgttggacttgtctaagatatcttatacatcagggagtgatttcaatttacagaaaacacaattttataaaacatgtattcaagaccagagcaaactgtttaaatctaccgataatcttgatgcaggagaagaattcgctattagatcatcatgtatttcagaaacaaaccccccggtctacatgaaatattatattaaagatgatcaaaatgacgaggaggtgcaaacgtcactccttgctgaaccaatacactcactgttcaagtaatttagtcactatataaattcatttaggaaaatatttgataaagaaactcacaatttcaatgcaaaagggggaaaccaagaaagactctttagaagaaagagaaaaaggagtaaatcaaatgctgagactactgatagaagtgagaactgggtatctaaatataagccagaatatttttccgatcttctaacgagtgaaaacgtaaatttagaggtattctaatttaattattaaaatttttagtgcttgaggtggctctcgagttggaaatgctcctcaaactatctggataagtacgaggaaccagaacacaagatactcttgataggaggcccaccaggagtcggtaaaaccagtttagttaacgtgattgcgaaacattgtggctacaatgttgtggagattaattctagcgatgacagaactaaagggagagcgattccaataataaacggagtcatttcagcaggatcagttgttcctaataaaccaaatctctgtttacttgaagatgtggatacactatttggatcagaactacagataatctcatatcttaagcaaattagttctaaaaaacacccaaaaggaggtcatttcattaagaggtatgttacacagaataatagtgttgtaggccaataatttgcacatgcattgatgtgtattctagacaattgaaggaacttagagacgtttcaaaggttgtcattatcgatacctgtgatccctcagtgctgcaaagcagaattgaatgggtactagatgaggaggggatatatatggcggatgaattgataaaggaaatactggaaacatacagatatgatataagatcatgtttaacttcaatggaatttataacaacgtatttttatttttccaaaatatatttatgtttcaactatcagtaattgatatttttttagttactctggtaaatatggaactttatcactatcgcatttaacaaaggacgggaatgaaggagtatcatctctactgaatacagtcttcagttaccacaaatcgcactttaaagatttagagactaaactaacatctacagtaaacaccattggatataactacactgcttcagctatttgtgaaaatgtgactacgatgccaatgaagagatttgaccatttgttcaaactttccgtatttgaaggtattttactctctttaaaattaatttaaattaataaatttgtagatataatggctcaaagcgatgttgtgtacaacaggcctggaaatgcactcaaaaaaacaaacctcttaaacgttggttgttccttcctgaacaagtttatatgtaatcggacagtaatatcaactaagtttgtgtacccacagaaaaccggctaccatacttttaatatgagatttacaaaatcaaaaaatttaataaattctatacaaaaaggctcaatgccaatgatagctcaaggtaattaaacataattagtaaattaactttttgctaattattgatttatattaatatcattttttaggaactttgtcaagtaactttggttgtgaccttttaccattcatcctttcattcctttcaacaggaaataaatccattaataaccactcattaccatttgttcttagagtaattaaaggtatttatcattttattatataatatttaattaattaatattatacttgattagttaatactgtagtttattcaatggaaatgatataggattggatggcagttttgagggtttgtttccctatgggtcaatcaagtttccaatgtcgatttatccacttcttcactgcacccagatattagtcttatacggaatttcaatagttacggtactgacaatatttatatcatttatttatatatactctgtaaataatactactcatttagataagtttatgaaatccatttaggttaaccaatcaataacatttgatccgccagtgtttgatttatatttgaaaactaaagatgattacttccaccaaattccggagagattctcacaactcatgttaaatttcatggagttctttaagtctggaaataaaagttacttcgttgacgacacacacttcacaggctcatcgcacttcaaagacagcaaatttgttaatttctttgaagccgttaagtttatatacaataacgggtttgaggcgtttagaaacctaaaaactcaaacagagaaggaagaaataaaagtaaataaggagattctgtgtaaaagaactcatcagaatgtcattccaatactcttttcacaaattttgctgaatgattcctcaatgttgaaggaatttgcaagtaaaaagaagaaactgaacccgaaaacttggggaaattataaataccaagatcaaaactgctcagcagtacgatatgttataaaccagctctgataactattgtgtaatataggtggagcatagtataaatgatatacagatttattttattgcgatttatatttgattagtttgctattattccgatttattcacagtgttttgtaatttctctccagattcaggtgaatttgaagattttttaaatctcggagaagattcaaagcgtagaataatctcctcgttggaagtagtaaggtcagatttaactgagtacgattttattaaactacagattgaggttaacaaattcaaaagaatcaaagaacttgaaggtagaaaaatacacctagggagaagtttgttaattgttaaaatgtaattgtataatccaagtaaaatatagcagctcataagagtgtataaaccagaaatcatggaataatcaccaattatgagcgctccagtaactccgacgacagcgaataatagtccaacaaagcccctaaaaaacagataaaattaaactaatacctagagtttgcaaggagtgaggtgtttccaaatttagaaatgctaaaagcaagataacttgaagaaatccaagaaagagtcattgaagaaagtttgaattgatgagatagtaagttgacgtaggcaggactcgaaggtgagaataaagaaagtccagaggggattagaaggaagaatccaagtgcatagtaagaaatcttactacttctaaagaaattttaatttaatttttaaagcaataccttgataaacgtttataatcatcttcgatatcaaaatagaaatcatgaatgaaacgtcttctgagctttttaataaaaggcgatggttttaagtcattagaggattccgttaaattagatttaaagcgtaagcccctgaaacagtaaagaaggtttttaaacctcattatatgtaggacattttatataaccttatattatatattaaaacacatttttaattaataaatgtaaaataaagatattacgtttaacatgtgtggtacagtcaagtgtgttaaaatgattaaaaataaaaataaaatttattctttcctgatttcatcgattttggatttaaaatcaaatagtttggatatttcttgttcaatgtattcaattctcgataatattttagattcttgattttcttgtttttctaataaaacgttatatcttgacctcctaaaaggatataaagttgaaattaaaaataccttaagtatatactataacacattgtagaaaccatagtcgttaataaaagaaactctgccagaatctcagtgcctatctaacaaaaaatttagtttttattttttataacatacatctatcgcaacactatcctctataggttttataataacttcaactctggatgttgcatcagtgaagctcttttttaaaaatggtagtttccaaagactaccccaaagtaataaattaaccttagtcttgtgccgagaagttccaattttgattactagagatctgattctaagattcaatattatatgtttagagtgtttactaacaatttactgtgatttactgatgttttaattactgaagttgtgtgtttactcaaatttgcagtcaaagtcctcagaaattcaactaaaatctccattgggaaaatcaaacacaagaatacaacattttaaagattaaaatttccgtagaatccttatatttagcatattttacaagttaaatattatccatattgattaaattattcggtattacacattgggtttattaataaaattttactcaaaacaaatacaatacaccaattttaacatgatttattttttacaaatatattgaataattaaatatatgtttacatttgtaatatattacagtacccaacaccatgtataaatttacacaaatatcctcatttcattttaactattgtagttactatgtcgtttatatttatagaaaatctacagccatgcgtgtagaactttatagtttcactcattcaagtgtttgtgttttaactatataatttatatttttatacttattccttctaaacttaaatttttattaattattttgaaatgggcctctcattatttacaagttttcgtagaagcttaaattatcggttaggaaggttttacaactcgttttactacgcacagagtaataacaaatatgttatgttgttcgcattcccagctttcatttggtatgtaaggtatagagccgatactaaactgggttacagactgtatatatcacctactgctggtggaccattagattaccttgaactatctgatattccatcaactaccaaagatgataacaaggatcaatcatttttaacatcctcttatgaattccttgtagataaatatgattggctttctaaaaaggttttgaaatcgggaccgcccattaaacactggaaaaatggcaaaaaaatatatctttcagatgatctgactgttaaggagttaaagaggattatttacggagacagcgtttcttctaaggacgtactagttgggtgtaaaggcagagtaatgaacgatgatgataacctggctctagcaacaagagctttctgcaaacgtgacccaaggctcgtactatggagggagccacaacaactttaataaatttacatttaatatgttttgtatttttagtatttgttatttttacgattttaaataatttttagcacttgatagtaaattatgataaccacatccgccattcatactaatgttcactggattctttcggaatgtagttttgtcttacagaaatgtttttaaaagtaaatgttacaatagatattattcaaaggatttaactaagaaaatatttccctcagaagttctaaattccaggagaaaactcaagaaagatatcgtatctctttctcaaaacgctttaaatcgcctatatgagattatcgcagacagtaagttttattatattatgatatttagtattttctattattattttcttattctaacacaattttcagctgataaaattgtatacttgtcactaagagtcaagggctgtaacggatatgtgtatgaaatgagcctagttgaggattcatatttaaaggaaatggacgaaagaatatatgacactaacggcaaacttattttagggattgaaaacaaagctgccttctacttactgggaagttatgtagactactctaaggatgacctgtcggagggtttcacatttgataaccctaatgtaacatctaaatgtggttgtggtatgagttttagattttaacagtccaccacaacaaatcacacctcacttaatgttaatgtataataaatttaaataatatattaagtaagtatttttgcgagttcttccacgtcctccgagcagaagctgtacagcttgtgccttgacaacttgttagaagacattaccacgaatgctatgttgccgtagtagtcaatttttatggattcgtcatgagtgaagggcgttcttgaggttgcatactcataaatctggtcccatgtaaatataatttcactgttgaagttgaaggggacgatgttcattatgtaaatctcatctgtcctgttaaggatgtacaaatcgactacaaagttggatagattctcaggtataaggtggataagcttatggttagagaactccagtattcttctgattagtttgtgagaatgcttattactgatcagtgaatcgtaaacgtggttcaggaacagctgtgatataataatgatctctctgtcatagtagaagagcttaaactgggtggaatgattctgattgattactttatacaaaaataacttcaatattgagtctgaatcaccgtgccatttcgtggaactcttcaatagtagaatcacgtccctacatccagtgttttataaaaaaagtacctcagatcagtgcaaaccgtcgtgttgtttattatccaagaaccatcttgtaaatatgagccatttaggtacggtaaaactaatcctccgaaactctaaaaacatttaacacgattaaacacaccttaatcgattcagaaattgctgaaaagaaatctaaaaactctggcgaattgaaatcaaatctgatttcacattcatcataatcggaatattccgaaaagtctgagtactcttccacattggaaaattttgttgactttaggtcatcaggcattaccataacgtcagactttaggtattcatataccgtctgagacaactcaattgaataattattcaaccaatacttcttatacttgtcaaagggaacggtcagactgaataaataaagttctcggttcgtcaataatcctataggtgcccatatattatgaataaatgagcttaaggcattgtttccagagattagggagttaaaatcattcttaaacgtgaatgaatctaaaacgacactgatttctaaatcgtctgtgtcaagcgatagacttccaaatgacttagaatccaagccattttcattgtgcttttgaaaatttgcgtactgatgcgataaatcttctagcgagcaagatgtcaacgagtgagattccagaggtgtaatgtagtacaatcgttcagtttcgttaaacttaatgtttactaaatatattataataaaatttgggaacaaacctttaattattgataggtggtagtgatatatataatttgagccggacaattgttttatcaaaattaatgaaaagtgaccatcaatcttagttaaattagacctattgtacaaaattccattatttgaaagtttattatatgttatgtttttgaacttttcacaaagtttcagatgcaatttgtttcctccgatggaatttggataaattctaaagttcaataaatgataaaactcattgaacaatgaatctaatttgatcggagcatttggtgtatattgtagtttcataatttaatattttcttatatccttacaccataacatattatgacagatttgtcatacatttgtttttattttcttgactttctagtgttttttatggaatccaagacaaacggtgtattttctgaattcgatggatttccatggcataatttacctaaaaaggatcgcatttgtaatatattaagacattattcggatcttagatctcacgctgacaaagaaaaggtcggtcctattatttaaattaattttttagttttattcttttctaaaagatgctgctgaaaaacttgagtcttcgagcaatgacgcgaactaattatagatttatcaattataaattttaattcgccttagcccagattaatcactttgttgtaaataaatacctgttcttaattgtgtaaaattgtttaatgtctgtttaaaatagattatattacatgttagttagtttaatggagttaacgatgtcagttgcaaggacaacgaagctggacttgttgaaggagttaattagcgagactgaggcgacttctccgatagttattccaccaatataacatatcaaacagtgttcaataggatcatcgatgtattcatttggttgactttcatttaacgatgattttctactatttgttgaaggggtattaatgttacaatgggaactagatgttattggtttctgtttagttgaaactatttgacaatttagaagcccaaactcagtacttaagggagcagagtcgttagaaacgctaagcaactgaacaattctaatgcttagaggtgcatagcctccgaagatacctgagcaatctgtctttgaaagttcagaatccactaaaaggttaaacttcccgtaaatcttctgccacctcgagctttcaaccacattgttaattttaattaaccctgatttagtaaagttctggattgttttaaggtactgaaacccgtattgataaattatggccttcttgattgtgtcaaagtctgactgctttagaccgtccatggtctgagataacagaattagtaacctaaatattgtggattcatctatgttccagaaaattagatccaaaatttgagctataaatggatctcctgacttcttggtccataattttgaaaagttagccaacttcgaatcgtctttgttcccgtcagtgctcccttgtaaaatacagtcttcaatgttttgtaccagctgaaacctctcggactttacaaaagagttcaagtaacccatgatattaacatgtgttgaaagcgtaacatgttcttgttgcagtgacttgaatttttttacaaattctcccatttccccaattgtttgcatgcctcctccctcatagccttttttaaccctcaaggctttttcgtgtaggtatgatcctacctttgagaaatctaaccaccttatctcctcgtacaattgcgattttagtgaaacttgctttttgttaaaattcattaactgtttatttttgtgaaaatccactatcaagtccaacgagtttaccaactttccgtcaagagcttgagagtccacattcagcatgttacagtttaggccaaaaactgagtctagcaagccttcgtatgtgaaatttgtacacattggtgttattaagtctaccttcctgtcaattattatcgatgatttgaaagatggtgagttggtaagtaggatcctggagtccaaatccttgagtttgttggtctttttagactcataaatgatgttgaagttgttaatatcagttaacatactatcgtgatagttttgaagtagctttattgggatgaaacacttttcattttgtattttatccatgccttcaactatcatgtttggagctatgtccctcctattcttcaacaaaagctcaactacatatttcgacaacgttcccacgcctgtaatattcaatattgaaccccctaggtgtcttctctgtaagtaatcaagtgccttggcaaagaaccatgctgtgctcgggtctccgtttagataaaagtctgtaaagcagttcgacatgaacattgataaaatgccatctacaggaaccatatgtatagaacactgatacaattcaactaagttagtcgtataaggcgtgtttgaaccatacttgcaaacggtgaaattcttacccaggaggtgggacaaaacctctgggtacatttcacaaatctcaggaaggcaaacaactctgataacatttgtatgtctcgtttgcagaagcgaagccaatttctgtgagtccctaaatgttggacggatcacgaagacttcattcactttactcacattataatcctcaactatacccttggattgtcttgcgatgacattttcaatgcggttaaagttaaggaatcccaactccaaaactgagtcattaaacagcacgtttaacaaatcatatacatcgtaggaacaaaccaagcttatattgtttttgataatgcgggtggtaattgcgtcgtcgtggtttttgtcaccattaattaaattaaattcatttgaagaatttggaggagcattttcatttgagtttgtaggattttcagatttaactggacctgcagattgcctaaagcttttgtaatcttcatatttacttattgatgcgataatatcaatgaaggttctataaaaattattttttgagtctaatgatacttgttcaagaagaaacattaactttaaaaatattttgacatggaatataaataatatacaaatgatacatactaagaaattagcaacacactgtagtttcagaaatcagtatattttgtctgtatattatggattttgagattaaagtatttgtatccgttttgtcgtgttattctttatttggtaggtttattaaaatattatttttaattgtttagtaatatacgttgtttgggcttacgttccagatcgattctttaataaaattgggatcatttactacccctcgaagtttaatagttattaattacattgtaattaatttaggcattggagttgcgcttttcctatattagtagtcttcggtgcaatttcacttgtagtatttatcggattcttcgagcgaacaaagcatcctaggctagattccttcgatagcatgataggtccgtcttttattttaattctctgtagacgagtattcaactgtggaaaatgatggtggaatcatgtattttgacgcccctatagagttagttaacgagaagctatacactaatgtacaaagttgaagattaaaaatgttttcttttaatgtggctgcgacatgactaaatcgtataatttgtcacttaattcaaatttttcaaacacggaatatagtttgtagtcgagagaattatatacccactccacgattcctgcaccttgaaagtgaatcatatcatggtaatatagcagtattgtacaaactggggatcttgtactacttttaatgtgttgtactgttagattggacttgtggaaaaggagaaaatcacaggccagtacttcagccaaaccataaagatcatctcctgacccccaggtgaaaacgggattagaggaggaaagcttgctaaaaatttttttagccacctgaattggttccataattttgctctccaatacttgtagcatttggccggggttccactgtatatcaggggcatcacctaaaccaatagatgtgttttggagtttagttttcaaagcttccacgtcaagataatgctgagcgtttggtatttctgggtctagtccaacaaatgacattgctgcaagaaccctaagatcccccatggcaaaaaacccatctttattaaaattccgatttaatattgactgtcgaagatgcattggaagatcttccctttcaaagttgaaacgaccaattttgtatcctgcttcttttaaacctcctgctaatgaaaagtatagacagttgcctccgccaccaaattcctagaaaccatttatacaggaaaaaattgtacctttgaacataaagtaagcctcattggacgcagtttgtcctcccactccttagttgttggatgccatgccggaaatttagcacaaatgtgactggctgatgtgttttcattaagaccgtacgaagaaagctgtgttactactcttcttggaatgtcagtgcgatgtggaaaagttgttgaaagaggagatgggttgactccgaacggatttattgctaaaaataatttaataataatttaattaatattcatagatataagcggatacacccatagataatattgacaaaatatataagaatcttaccatggatttgtgggattaaatttctgacgaaaatcaagatgtataaatatgttgatggaatcatcatgtaaagtaataaataaaattacaaaaaaataaagatttgatctaataatgtccatcacatagtgcactatgaagatgtgatctattaattatgttgaattacagtcttctgaaataaacatgatgagtggcattggaatttcattgatttgaaacatggtctttatttggctcggatcctgtgtccctaatctgtaaattcctactacgtcgtagtggctattatcctaaattttaatgaaaatttaatttgggttcacttaccgaataataaattgtcattatgaattttggattataatcgtaatgttttgtcatacaattgatttctgttttctctctattaaataataacacggtcatttgaaatgtgaattgcaggtgtcgtatgtccacatgatctccaaacctttgggggattttttcttccatcgctttaaataaatcttgagcaaccgctcttttgtcactttcagtttccatcctttgacggaaccctatcatatttagtcctgcaatcagcattccagccacaactcctaaattcccatccgaatcttgtacagcaggttgtatttcactcatgtgttctattttggcttttaatgcttccatgtcaccaagttgataagattcgtcatcattgggatcaaaacctaaccaaaatatgtggctaattctttttagatctaaaacagatattaactcatctccctctaggagaccccttactgcaacctcaaccgcagggtccaggtctgggttaaggtatcctagcagatctttgtttgttatattattaaggtgtaatactgtccgaagtgcataaaacaagcaatttccgtcaccacgtgaatttatcactgaaattccgtacccatacattcctaatcttcttgtccaattgtccaataattttgacttgtaaatccatccttgtctaaattttggttgtaattcataattttcacttgataagaagtttctaaatgcgagaaatctcgataatgttggaacgtctatgtgttttgcaatggtccataggttcactccatcttcaattgattctaccaggattgggaagaaaattgagctaatgataactgtaaatgtagaaagtagtgctaaaactctcattttcgttaaaatctaacaaatatgttcttttattatttaaattttttatatttcacgtgcaatttcataccatatatttaatcagttgtatatatttttgttacatacacattttttgattaacgatttttttataaatattataaaataaacaacaatataaatattttattttaaatgtaatagatcgtctgttgcctaatttagaatttttttgcaacccccaggctgctgttggtttatgtgtcagatgcatggaatccacgaacattgacttaaaatcacgttataattaaaatatattgtttgtttataaaaagaatttttcaaaattaattaaaatatatgaaataatgatattaattaagaaaattttacaaattaaataaaaatgattgataatgaaattgaaaccatctagagagctataaaaatgtattgaattgttgagatccatgagaatctttgattaaattggtgattccttaagaacataataaattacaatataggttctataagagcctattattctaaaaaattaaattttatgttctaatatcctaatatttatttttttttatgttttgtttttgaattttgagttgattgagttttgtccttcctaattctcatgtaacaggcattacatacagccacccccttataatacctccactgtggcgtggttttcacgttacagttggaacaggagtaatgatttctatttaatttgggccttcctgctgatgttgacctggaattgcgcttcttatcatgggtcggtttggttgcgattctaccatgtccgttgccattttgatcatttgagtcaatttggtcgtgcctctcccctatgtcctgcttcattgagtttgacttataatatgactcaatagtaccataggggttggctaaattgtagttttgacctgccgaaatgaatttgaaaaatggagatatgtttctggcgcttaataattctaaaaaataattatgtaacgctatattaatcataccattgcgaaacatcgtctgacgatagataatacttgaattgttttcatcctcaacctgataattgggataatatgtgttggttttatcatcataaactggtgttatcgagttaaaataagccactcctttttcgggcgaattcatcatataatttaaatttgcgtcaagagtttgtttattctgaattaaatgtgggtcatatggaagtgaataatagtatcctggatcagaaatttggttctcacttccacactggtcatagttcatacagccatattcgaaaggtttattatggtactgcatctttctagcctcttcagaataaaatttcttatgctcctcaccgttcggcctcaaatcattttgatttatctcgtttataagttgatgaccattaagttctgctttcatgttgaaggcctcggtggcagctggaagcaagttagggctggtctctgggctcttaatacatttgaccatatcagagctcatttctgctgtttctagagatggtttttcttcaaattttgacatgtttacttggttagaatcttcgacatggttcatcatgttactctctgggatcatggcgtcgtatttcctttgtaagatgcaatccctggagttcatgacagtgttgtactcagggatttttttccctggctgatcacggaggatgtggccgttaacctctggcccaaaaatgtagttaggagagtaaccaaaattagtttgggcgtctggtggtggagccagatcaaaattcatatcaatctcaggctggtccctatcggccctgttcatgttttcccctgcattagcggtacgtttttgaaattcacccaacgattttacaatttccttgtatacattttcagagaaatacttgggcatcgagtcctaaacgaaagcgttaaataggagataaactgtacctttttctccaaattgttttccgaatgagtctgcattttgaataaagtagatctattgtacaaaagttattatagcatttattgcgacagtataaaagtgcgagtaaagtatctattaagattccagaaagatgaggctttaaaatcaatgaaatagatcattctctatttaaattaagaaatatttgataaatttacgtttaaagaggattaaagtaaaaaaattatagaatcatatatttggtcagtttgaaaagtattgatctgcacagtgaaattaaaataaaaacaaatctaaaacttgttggtcttattatatcaggtttaataaattcaaatgttattgtgtattttggtaaagaatactacaaaaagcacatgatagatctaaatattatatgtatggaatctcagctcaaaatttccagaaatggagatttaaatagaaaataatttataaaattcgatatacagaaaaatacaggaaatgatgggcaaaaacgattttttgagctgatttggtagagacgggtgtagtacgcgtctactaaattggcttgaattgaaaggatacggagctgatatatattataactttttatatattccatatttttactttattagggctcaaatatcggtaattaagagtcagatctcgaaatggtcttcaactatttaccacaaagatcgcagtcgatagagaattatatacactatacttattagtttggtacattttaatttctaaataagcttaaatctattaaaaacgtggaaaaaaaataatgattttccgccgaaatagtgcttgggtaagttggaactttgaaatgaagattcctacttacacatctacctaatttttaaatcccacttataaataaatattcttaaatgaatgggcctgttaggtttgcgtaaattataattttaaatggatttttccacgagccaactgttgggcttgtaaacaatatcactgtatttgtttatttttttattttattcacatttattcattttatacttatttttatatcatgtacaatattttataacctatatattcctcccttttagctcatttcatttttacattatctccgtttactgtctgtacgaactttttaaatataaatatggcgtcttcttgtaaggactagtgagtgttttactaatttttatccctaattatttttatattttcttgatgtgttcctttcctggatcattttcaccactttctttagtgattatctcttcaaactcgttctcatcggtgatagtggcgttggaaagtcctgtctgctgctcagatttgccgtatttttataaattttttatattctttccaggacgattcctttactgacagttacatcactactatcggcgtagactttgtatttttgaccatttaattaattttttcagaggtttagaaccttatttgtcaaagataaacgtgttaaacttcaaatcgtttgcttttcatacaatttacgaaatttttagtgggatactgccggccaggagaggttccgcactattacaagcacgtactaccgtggagctgatggtattattatggtttatgacatcactgataaggtactgttccatttacactaattttcgtagtcttcttttgaacacatcaatgactggctcactgaagtcaacaaatactcctctgaggatacctgtaagctcctccttggcaacaaatctgacatggaagacagcagagacgttagtgccactgacgttcaggtatttcctttatcaatttaatttttagcgtctttctgaggtcattgaggtccctgccatggacgtttccgccaaaactggtcataacattgacaaggtttctcatctttcttgacgtttttcaggcattttactccattactgagaagctcgtaagcttaaaaatgtacctttcccaattatttctcagttttacaattaattattattttccattaattttcaacatttctaaaaatattttagggaatctgaccatgatgttactgatttaaggactatttctcttcagaacacttacaatggtactttttaacctccattttaatctttagattaccttaaacgtgttaaaaacatgaaatgctgtaatcaatgacacttttaaaccttaatttcattttttatactactcatcattacactaccacacctgtgtatattttcctaagtatatatgtatgtgtggatgcataaattattattctttcagccacttatgggagagcagttgttgagctgtgtgtcgctccgatgggttaattctgagcatgcatgataggaagtttgatatttcggaggcttccttcttgtccatattatactttttgatcagaactgattccaacggccacctcttaatcttgttgatttggttgaacgacaaattctaaaaattaaatatattatttataaattgagttattaatatatatatagtaagtataattaccttggcctttttactgttttgtatcatgtagttgggtatctgtccaagcaattccacaatctaatcaatatttaattgttattaattaattattgagtaaatcaaattctgattattaaatagatgttaagttgatcaaactgtgttattaccagtagcaagtgatttgagtctcgttgaactgcttctttgccattggggtcaaagaggtaatctcctgtaatgagttcgaatatgacgcatgcaagagaccatatgtcagccagatgattataacctattaagaattatttgtaaattttaatacctatattcagtatagcttctggtgatctgtattgtctggtttgaatctcctcagtgaagtgtttatcaatccaacaagcatttccttaaaaatatttaaatataaaattttaaaaaatataatctgtagaaatagttaaacagtatatatagctataaacatgacataccaaggtcacatattttatatatagtttgtggatcgttaaactgttctagggtatgaggtttgatttgaacaaatccattggaggttctaatcctagttcttcttactccaaattggttaagtccaatggatgtcaggactgatggatgatagtgggatttgttaaggtttcggtcaacgtttttcatcatgttccaggttatatggtgatatggtctcctcagaagtgtttcttgtagtgcatagctatggtcataactagttgtaagggtgggatcactgtagcatggtcgaaccaggttttttatgtaggaaaggtcattttcgtttccaattccgttttgctctcgaacacaattattcaaatcaactcttccaaaggaaagacctggcaagttgtaacgctcattagagagattacttttgttgcctgacttgtgattttgttctaaggagtgcttatacaagtttagtggagatgtgatcagtatgttttccggctttatgtcagtgtgtatgattttgcaaactctgtgtaaataatctaaacccagcaacacatgtgtggcgatttttttaaccagtgggattggtatgccttggaacctgtaaagcttgatcagggtcaggatattaggtcccataacctcaaaaaccacacatatgtgcattccattaggccctgttaccataaagttgtccagatatgaaactactccatttgaggggttgtaattttggcctagtagtttactgtagactgtgctggtgctcacccactcgttactgttctttccgttaatcacggtgttgagaaggtcaatctcatcgagcactgcatctgtgtacatctttgcgcttctctggaactttagtgcaacaaaggtatccgggcctgaggctaagtctgatgcgagccaaactgtgctaaaatacccccagcctaacttcgcttcaattttgtacctgttgttatacacttctccaatggccactggatggtatccccctggaacatagctatttgagtcctcgctatcactcatgtttatctcatactgtccacaacttccgttatccctcgaataataagaattgttatcattggataagggtgagtgttcttggtagtcgaatgagtgtgatgactttggttttgcttctaacacattgttctcatagttgccatgttcatttaagttgttttgttcataaacacacttggattcatagtcttcatgtgtggtcggagtcttgtacatggaatccatgggtgagtatagcttgtgattagcgtcagagactgtatccggtgtgaatatatcgaaattctgagtgcccccagttctgaaagatcccatgtggaatttcaagttcatataattgttgggatctgtttgtgaaggggattggcgataatacgagtcacaagaatatttgcttgtacttgatgtatttgggctagaactcattgactcggtgcctgatggcttccaatcagataaagaagagctttgaatgcacttttggtagtcgtccgagtgtaaatgatcactagagactgaatctggaaatgaagatgacagtaggctatatgtacggtcgttatcgttagagttagtgttaaatcccgaggtattatataaattttcagagtcagaaatgtttgaattatcaaatgagtttaaatttgatgtctttcctgaccatgtgactgacataagatcctggcttgatctcgtatctgaatatacgttaatatttgacaatgaatcgacgatatcgttaaaatcgtttaggttttcagtggaataatattgagtgtcttcgaaattactttcttcaggctttaatttggaatctgttgaatattttgatggatttactatttgttgcttcttataatctatagactcatcgtgattgttttctcccgtcatattcgaatattttacagtttgtttaacatattatgatattttattgttctcgatatttatcatttttgtaagtgttattaggtgtgatcagttttgatatgaattattattgaatgtgcccacataatttgaacataaaatggaatttaaataatggtggtttaaatataacgtttatgtttgataacataaatcaaaattttaatgttcgaagatttccgaaaaaaatatattaaaatgatttattgtagaattatggattttgttgtccccaccataaaacataaaaaaatgtccttctaacaagaatcacacacttttttactaacaaacaaatggattaaatttgcctttgatgattattttaaataatgatacacaccatatgtcttaatggattataaattatgaatcctcaattgggttttagaagcaactatcgcaccaacttagtgaacttaagtcattctgcatttttgtgtctaatatttttttcatttatcacattttgttattcatggactggaagacttactcatacatcgcaattaaacccgtatacaaactataaaaataatccaccgccatcttccataaagaatcaccatgaatttcaaacaaatgcatttgaagatttaacaaataaggtttcggggctgaaaaatgtcctacaacagaaattcgggctctctaacgagctcagcactatggacaatccccaggtgtccgcgtatgaaggagatccgtctacaccgaaggcacctcaggagcctcctgaagtaagtctgtcgggtgagcagacatacccatttcaagcagaagtcagtagagttatggacataatagtgaattctctgtatacagatagggatattttcctaagagagcttgtctcaaactcagcagacgcattggacaaaagaagattaaaggctgacccggaagagaaaataccaaaagaagcatttggaggtattagaataatgccaaacaaggatttgagtacactaacaattgaggatgacggtataggaatgactgcggaggaactaaaaacgaacctaggaacaatagcagagtcaggaacagccaaatttttacagcaggtaaaagcaatataataaaattagtttataaaatttttatctcaaatttgaaaacaattattgataaaattttagattgacacaacaggagaaaataacctaataggacagtttggagtcggattttactcgtcatacttggtatcaaataaggtagaagtattctcaagagcatacggacaagaagctggaccggtgtacagatggaagtcggacagtaatggaacatacacgataggaagagtagaaaaccaagagttgaatgacaaatttatgaaaagcggaacaagaatagtgttgcacctaaagcccgaatgcgatgattatttggaagattataaactgaaagaactcctaaggaaatattcagagtttatccgtttcccaatacaagtatttttataaaaatattgttgttgatatgattaaaatcgcctttgagttctactgttgttccttgttgaacccacaaggaagccagtattacgctgaaattatcaaatttatgatcaacaaaataattaattagattaaatataagatggaatggtgaatgaatgatgtttaggtgtgggttgagagaatagaatatgaaagggtaccagacgacgcaacaatagtggatgggaaaccaggaagatataagactgtgactaagaaaagaaatgaatgggaagtggtcaatacacagttaccgatttggagaagagatcaatcaaccataaagccagaagattatatatcattttataaatcaactttcaaggtaacagtttatatttatttaattttaaataaacattgatagtggataaaacatatatatatatatataggcttatgaagatccactgagttatatacactttaaagttgaaggacaagtggagttcacatgtctactcttcgttccaggaacactgccatgggagcttagcaggaacatgtttgacgacgagtcgagaggaataagactctacgtgaagagagtgttcatcaacgataagttctcagagtccataccaagatggcttacattcgtaagaggtgtagtggattcagatgaactctcacttaacgttggaagggagtatttgcagaggtcaaaggctctaacagtgataaacaaaagaatagcgagcaaggcgatagatatgctgaagaatctaagaaataacaaagtcaggtttgaaaagttctctgaaaacttcggaaagtacattaaaataggagtagtggaagatagagataaccagcaagaattggcatcattaacaacatttaagagcacaaaggaaaaatcaacaacgttggatgactacatacagagaatgaagaaagaccagccagcaatatactatatatcagcggatagtgaacagtcagcacaaaattcaccatcactagaaaagtttaatcagctggattatgaagtactgtactccttggagccagtagacgagttctgtctttcatcactcatggcaaccaaatacaagggaataatgatacaagatgtaaataaacacgatgtcaagattggagagaaccaaacactttcagaaacgagtaaaactgaaggaacaacaacagaaactccacaaggagattttgaaatgctttgtaactggataaaaacgacatttccagatagagtacaggaagtgaaggttagtaatagactggttgaatcgccagcactgctggtgcagacagacttcggactctcgccaagtatgcagaagtatatgagacagcaagcaacgagcgtgggaatgaacgaaactgagatgtttggaacatcattggtgtcaaaaccagtacttgaaatcaacgcacaacatccaataatagtaaacctcgaaaaaatgctcaaagttgatgcactcagagacagaatgaaggaaatagcagctcaactactagatgtggtctcaatccaaggaggatactcaatagaagacccaagttccttcgcaaaaggaataatcaaattaatgcaaaatgaagcaaaacattacttaacgaatccaagtgaaaaaacgccagaaacaaatgaaacactgagtgaattcgctgcatcaaaaccaagtgaaagctgtttattgaattctaatactggatctagtgtaactgattcacccaaggaaccagtatctaaagttacggatacaacgatgtcgagcaataaggagaatgaaaaggtggaacagatcactaaagaagaagcacaagaagtttcaaatactctaaaagataatgaaatgggtttaaaagttgcaaaagaggaattcgaaggaggatccgaactagttagaagcccgtcaggccccgtagaaacccacaccctcaaccttgtataataggaatttttaatcgaatgtgttattatattatttgttacctagatattatttaacgtttggaacatatttccaagattaaggactacctaagagtctgggtacacccaaaaataaaaaatctcaaatagtaaaacatagatgagagccctccatgtctataaaaacaccaaaataacaataaagtatttgtttgttgaccatcattgttaatttaaatgagtttccaactcaagaaggggtcatagtcatgaaaatatggaactcatcgaaaagaaaggatcaacaaacacatctgacccatccagagtaaggccaggaattagagtacttgaaaaggatagaaaaagagatgcaacaggaacagatggcaaaaatgtaataggaaggctagattccgaggcctttaaaagaaggagtaggtacctccgagaaatataccttaatccagagaaaaggcatctgtacgactggaccaacttagaaaaaaaaatattattactcgattggcatcacaacccatcattctatgaaaaatggaagcccttggaaacggaagatatgatgaacaggttctactcgaacatgatatataacttcatgaacttgtccatgaccaatgtaggaacaacgccagtgtacgtaagattattaaaccactttcaaactttcagagtcacgtaccagtgtttggcaatgatacaaagatatttcaggtcggattccacattctacgatgaatttaaaatagcatggatatgtagagactccgaattaaaaattagttcatcagattcaggaggagtcagctataaacagacaagcacagatgaataccagtgcatagttgagggagtcaatttcaatattttcaccatcacgacagacgagttcgaaaagttcggaccctgccaagaatgcctgagacataaagttgttgaaaaaactactctgaggacaccaaagatcgtatttccactcccagtcacagcaatggaagtgacaaccactctaattgacaacgttcacacctacctactcgtggtcagaatggcaaaccttgtaagaatgtatgacataactaaaatgatacaaaaaacactggaaatttgtaaactatgggatgaagcgagacaaatatacctaaagagatataaggaagctagaaagaaattagtagatagactatgtacaggatgtatattaactaatgaggatttccaaagactagataagcagaaacagctgttgaggccagtaacattggttaaaccacatgactttaagggattggacttcggagaatcaactgttaaaaccatgtcaacgaaaagaaacacttcacaaactgggctaaagttcttttacacgtcgtttctaaaagaaaagagagtgcttcccacatatctgggatgtgtgggagtaaaaagagcgtgtgtatgggaaatgtatgaagtaaaggaagcactaaatgacccactcataacaatggaacttgaagatgaagctattccgacagatttgtctgcatcactgtcagtggttaagagttcagatgactttagagaaaagaaatgggtagttgaacccaagatatactcaaccgacgacaagggatatttgaggctgtggaatctatcgaaaggtatttttacaaaagaattaaattattttaggtctcgaatgctcgctaaaactggattcaaatgcactactgacgctagacgttaataaaaagtacccgcacctaattgcactgggaggagatacagggaaacttaagatctacaacctccacatacagtcaatggcatcatcagaccaatctaacctggagctggggctcctaacagtatcaagttacatcccaaacacagtgtaccagtacatgaactggtaccacccattggtgaaggttaagtgggtaaatgacgtgtttgtagcagcacaatactcagagccgtttttcaataaggagtcaacaaactcagctacgctggctatttggaatgtatataaggatatatttgataaggaagatgcttttctgtccaataaatattggtcacagtcaatggagtcagtaaacagtacatatcaccttgggtcaaagttaatatgtatttacggaggacattttggatctcttggaggtatactatcgtcggatgtaaattggtctgaagaccatggaataatcgcagtatcatcggataatactggtcagcttcactggtacaagccagggatttggaactgggcaaactctgatgacccaatgtgtttggcaaggataaaatcaaacgtggcattccatcaagatattttggacaaagtaaacaaagaacatagtgtgataataagggaagtatctggtataagtcacggaacaagtaattatagaaaaacaaggtcaaattacacacagtacttaaatgaagcaatggcgactctggaacagttaggtcagaaaatacctcttctgaacgattttaaaagcttgccaagttgggcaaaaaagactctcagactaaccacagacgaagaaaaatatatgaagatgataaagaaggaggctgatgagagagaaaaattggagcactatgttatagaatatccagtacaaaggtcacaattaaatgaaatagatttgaaataaattattaacttttgatatgtaaaataatttagtaaaattgtaatatatgtgtgctatatctaaaactttcaacaccattagggtgtatttaattcttaagataattttttgtattaataatcgcaaatatgaattaagagataattatttattaaattttaaaatataacataattaaataagatggtggcgactaagaggcagaaggtcaaacaggaagtcacttcttcgtctaatgaagaaccatcttccaacaccaagaggggattcgactttattgaaatttataatagatatgaatcgataaattctaaagatttaactaaatctgaaccaacaaaaaagcctacaactgtcaagccctcgagtttcatgatggaaacacaaacagagggatcgcttagaaaagaatacgtccttccatcaactaataagactataattgatagtctacagttcgacgttatggccagctcagatatctcaagagcttcagaaatcgagattgaacacaaacaactttacgtcatgaattcaagaaaaccttgtgtttatggccctctagattcaagattaggtaattttacttataattatatctaattttatgtaattagtttgatttttcctcactaattttttacaacagggtgtaacaataaagatgcgatttgtgaaacctgtggaaaaggatataatgaatgtgttggacattggggacatataaagctggcattgcctgtatttcatataggattctttaagtacacaatacagatattgtactgtatatgtaagaagtgctcgtcactgttactctcagaagaatcaattaagaagttttatgaattgcataaaaaggcccaaggtaggaaaataataatagctatttaattattaacgtttaaaatgatgattgtgtagatgatccggtcttaaaacccctaatatttaagaatatcgtacaagattgtaagaaaatctcaaagtgtccaagatgtgaagcaccgcaaggagttatcaagaagatagtaaaacccataatagaccagttcatgaagctaaagcacatttataaatataaagagtatgggaaaatgaagacggtggaggaggaattaaacccgctggttgtaaaacacttatttgagaacattgacccagtacactcaaaggtcctaaatatagttcacccagaaaaacttattatctcaaatctagcagctccgcccgtaagtttaataaacagttttaacaaatatttcattataaaacttaataaacctattttaaaatttcaaataaaatatttttcagaactgtataagaccttcagtatctgttggtgaggagggaactactgaagatgacctaacttgtatcttctctgacatcgtagaggtatatatttcttgtttattcttgtattagagtaataatcaattgaaatcatatattaagaatggagcacagacaaattcattcattgtacattggcagattatacagtaccagtgtactcgattcattaactcagattctccagcactagcacaacttctgttatcaaggagagtatccaagccaggaaggggaatattccaaagactaaaaggtaattttattaaccatatgtaacatatgtagttagttagatcacttttcattgatctaatcaatttttagggaaggaaggaaggtttaggggaaacttgtcagggaaaagagtagatttctcagcgagaacagtcatatcaccagacccaaatgtagggatagatgaagtggtggtaccagagtggatagcaagaagacttacattcccagaaagagtaacgaaatataacatagatgtattgaaaaaagcaatattgaacggtgtctcagtgtggccaggagcatcatacgtaaataaattagatgggagcaagtgtagcctaagatttgctaacccaaaacatatgtctgaaaatttacaagttggagacatagtagaaaggcatctttggaatggagatattgttatcttcaataggcagccctcgttgcataggctaagcataatgtgtcacagagctagagttatgaatggatcgacgtttagatttaatgagtgtgtttgtttaccatacaatgcagattttgatggggatgaaatgaacctccatttgccacaaacttatgaagcaagagcagaagctcttcatctcttgagtgttttgaaaaacctgactacacctagaaacggagaacctctaatagcgccagttcaggactttctttgcgcttcgtacctactaacaaacaaggatatgtttctaaacagagcagagttctcccagattatttcctacttcacagacggaacgatacacattgatcttccaccgccctcaataatacatccagtaacactatggacaggtaaacaagtatttagtgtcttgattaaacccaacaacaaatcaaaggtgatggtaaacataagagtcagagaacgtgaatatactgatccaaaacagtactacgagaatttaaacaagaaaggttcagaagatagtaaagttaataaaaaatcaggaaatccctcaaatgatacaaatcctagaagttttataaaactggatgattgcatgtgtccaagtgatgggtacgttgtaatatataaatcagaattaatgtgtggaagtcttggagttagatcactgggagcaagcaaaggaggcctgttttatgaactaatgctgaaaaatagccccaaaatatcatcagaatgcatgctgagagtaagcaagctctcaagcaggtggctatcagaatttggaatgacaataggattagacgatgttacaccaagtagagaacttatagataagaagaaacaattattgctagacggatactctagagttgatgaagcaattagtaacttcaagttcctccaaccatacccagggtgtacgagagaacaaacactagagttacaagtcaagtccattttagatgaattgaggaatgaatcagggaagatatgcacgtctttactaaacccagataataagccactgatcatgtttaactcaggtgcaaagggtgcactcatcaatatcgcacaaatggttgcatgcgtagggcagcaaaacgtgtcaggccagaggatccaaaacggcttcataggaagaacattacctcattttacaatggggtgtaaggatgcaaagagtagaggcttcgtagcaaactcattctttacaggtcttgagccagaagagttctttttccacacaatgtcgggcagagaagggctcatagatacagcggtcaagacctcagaaactggatacatgcaacgtagactaatgaaggtaattttaatccatattattaaactagtaatactattcaattactatcactattaagttagtaacattaaattttactttaattgcattaatggaatgtaggttatggaggatttgtccgtgtgttacgactatagtgtgaggaccagtgatggtcagatagtccagtttttgtacggcgatgacggtttgtcgtcatcgtcaaagtcgtgtttcacaaatttgaatagttctctagaccacataaaacatattaacccgatcaacaagcaacaaatatttacctcatcgcatatagaccctacacaccttgataaccaggaaaaaggtgcctttacatacactaatcatgattatataatttatgtaaaaactatagtataagtaaactgatttgtgttataggaccatcaaaaaagagaagtaagttgaagaagattggtacaaacaaggataaagagccaaaacttacacacgagagtaaatggatatttccaccaaaaaacgtggacgaattacttgagaaagtagacacatttctgaaagatgaagaatttgtcagtaaattgcctccacaaattaagaataaagttgcttcatacagtcattggataaagcccgctgagacatatggggagccttacactgagaaggatcgcaggagaagtttcgatagattggactccaagcaattcaacaggtttaagctggttgacgataacatcataaacacttttaaaaaccacatttcggcatatttctcagtgtatgttgagaacagctactctaggaggaatgtcccgttactaccccaggaaattgtcacatggacgaagtttctgcaacctttattaacagaactacttcctccgacaatatatagccattcttctgtttcacaggttagtgatttatctatttacataactaaatttccaaaatttttaaatatttattattagaatatgggaagtgtttacgagtttgggaatacaattgagagggtgcttttggaacactctgaaaagatggcattgactcttgataaaaactatcaacaggttattgaatcacaaaacacagagtctgaggttataattgagagattcaagttggtgaacacagtgaacaggatatcgctagaacagatgtttgagtttatcaggtatagctggaaggattatcagaagagtttgtgtgagccaggagaagcaattggagctttgggatcccaatctataggtgaaccagcaactcagatgactttaaaaacattccacttcgcaggagttgcctcaatgaatgtgactctgggtgtccccagaatccaggaaatcattaatgcaacatcactcatcgctactccaattatagaagtccccttggaagacaatacagactacgattttgctttgaaggtcaaatctaagattgagaagactactttgggacaaatatgcctaaacatcaaacagctttacacaccgcaaatgagcaaattactgttcactctgaaccgagatttaatagaacaactccacatacaagttaacgcagataaggtaatcgcaccaaatttactagtttttcattcattatcgttgtttttaactagttttccattcattatcgttgtttttaactagtttttcattcattatcgttatttttaactagtttttaatcatattttatttcccacataagtatgtaccacggttacatatacctacgtgtatatacacatatgtttattaatttataatttaggtgagagatatcataattgactccggctgccttgggaaagttaaaatacataaaagctgcgtgtattcaataggaaagtggcaaatttgtatagaactcccatcgaatcagcagcatttcttccagcaaaactccctaatctctggcctgacccaacttgtagtagcaggatccaaaagtgtaaaaagagcagtaataaagcgcgaaagtacaccccaaggtcctaattaccaaattgcagttgaaggatatggcctacaggaagtaatgggctgttacggcgtaatgtcatccgcggttaagagtaatcacgtggctgaagtcgccaaggtaaaaattcttacctattgtttaaatagttaatattattagttagtttgaaaatcattgctattattacagttttaaaattgttaatactctattataattgtttgaataggttctcggaattgaggctgctcgtagtgttattattagtgaaatccagaggtgcatggacgcatattcaatagatattgactgtcgttacatgaagcttttgggagatgtaatgacgttcagaggtgaagtcgttggaataaacaggtttggaatacagaagatgagatcgtcagctctcatgcttgcatcatttgaggaaaccaacgaccacctgcttgaggctgcactccatcatagaagggatccaattaaaggtgtttctgaatgtataatcatggggaaaccgatttctctaggaacgggatcctttgatattttaatgtcaaattagacctttctctaatttattcttctatatatactcaattgtatatacaagtgtaaatatgctataagctatagagaaaagataccttataatagtgtataactatacacatataacaaattaaagtacattaaaaattcttgtaaatcttgtcccaatccctggtgagtgtgctgaagacgaacccgaacatcagagctgagacaactcccacacacgccatgacgttgaataccatagctaaagtaattagtgtgtctatgtgtaaatataaacttactgttatcaggtaacacaatgtgagaaaagaacgaagtcatgaaatagtaaaaatcgggacaactgaagctggatagtctcctgaagtcggccaaatcaaggttagacgggtcgaaaccagtacatcttctcaatttgtctaaatccagaattattcctgaagggacaagctgtcctctgtgtgcggatagatgaatatcctcataggtgatgttatccttcgataactcaacagatatgtatgctacagttttaggctcaagtgataaataaatgccgaaattgttccaatatctcccaagatcgtatatcatcaggggatcactatcagataatggcaatttaggaacgggatttaaataatcaaaaaatttaactaagtgcttgtgatatttggcgggtaataaatgttcaaaaatatccagaaatatattaaaattacgactagactgtgcgtttcgagagaaacagtttgctgaactacatttataatgtacataattgtctgttaggccttcaactgctacacttattgaatgtagaagaggttttagccagtatggaagtggttggtgaatgcaaagcttcttcgttaggtcagataaattctcgaccctaatgagtaatgaagactgaacacgcttcaaaacacgcagatatttgctatcgagttctgaaacctcgaaaataacctccgaattatcctctgcaacctcgtagcccttactgaacttagctaacaattctgagtatttattgttaactgagtcttcgggataaattaaagtgagttcactgtactttttgaattcgtaagagtctggatacacaaatttaacccaggactcagaaacactaaggcatctagacgggagtttcccctctggaaaaaacccactaaaagaggaaggtaacatagattgtgaaacagtaaattgtacaagagttctaaaatgaagatcgttctccagcatttccacccttaatttaactcctctgtaagatgagcgtacaaacattcgttcatccccaagcaaactcactaacccatttgtacacaaacagggtaagagcatcctcagtttataaactgtatccaggcaagctctttcttcaaagtccgatgatagtaaaaccgtggaattcggtaaagaatcgtcattatagtcattctcatacaactctgtgatgtcatgaatgtatgattcctcatttacaaggttactaaacatagaaccagtaacaccccaaaggccataacacagtgatttgaaatgctcactaacaacgttcttatccaaacttggccaagaagccatcaaagaaagcccgtttgaaatcaatatctcaggtttatgcccccaaatagaatctttccattctccgaaagataaattcgcttcaaaccaatgcgatttagtctttaaatacaatttagcgatatcgatgggcataacatccataataaagtatgggtcctccggattctcaaataattctacaacatctcgggaaataaccgatacgtcaagtgctaaaaaccaatctccgttggtaagaggctttaaagtcagccgttccgacacattgtccaagcaagatgcaagcctcaatagaatactggtaatcaagattaccaaattaatatgcatctctatcccagcattatattaaaatatttcacacaaattgaaatcttccatccattcttgattttttcagaagaatgttgtgcaacacattcgtgaaaattaattatagcattcattttttatgtttattcaaattttgttataattctatttaataaaactaaaatgtacaaatagatatgctttttaccctttatcgcatctatgtgttctcactagtacttgtgcttatttataattgtcgagttaaatcttttaaaataagatacggacgagaaaaaagtcgaattgaaaaattaaaaaaaagaaaaggagctattctggataagttaaactcatacataaagactagaggttacgggcttttaccattgaaagcattacctgaagattccgatctacttcttcttccagaagaagaacctgagacatttcttaacccttccgttgataacagtttgtatttgctgacacctgaggccggtaagttgtttgtttcatctacacacccgctatagttagaaggaagaagactaagaatccaataatcccagttgattttgataaatttaatactctcttcagaaaaatatcatcgcttagaacatacaaaagtaacattgactacgaaaatcgaccgggaaaggtggatcctggcgggtacagagtagactttgttgagactgatctctgggatatacaccctagtagactaagagttagaggagtaagttcttaaaattcatttaataattagaaatatttctcaaagctgtacgaatatgaactaaaggagcctatgaaaaggcacgaattcgatactggatcacctgaagttgtagtggcagctctaactgcaaaaatagattatttaacacaccatttagaaaataacccaaaggtaaagccaattcaatatgtaatttagttaattaatgttttaggatgtacaagcgaaaagacagatcacaaaactaggatttaaacgtagaaggtaagaaacataaattaaatgaaatgttagattattaaaatatctgtttcgcactagaagggaaacttatgatttgttgacaaaaacattcgatatacactacgatgatgacttttgcccacttaaaaagataataaagaaaaacacacaccgctatcacacaaaaactaagcgttaccgttcagcaaaggaaagaaaaaacgatttacccaggtaccactttgtcattttaaccctatttatacaattgcacatatacttaccttaatttaggaaacctgattctatattaatttgatggtttttggaacaaagacttgctgaggatgatttttatttatatatattgtatattacagatttgttcagggattaagttccctaccccaaacagttttggatactcatttgtaaagtctgataaacaaaaagagaaatcagctgatagcccagtgtatttgtttctgcctccaccagaaccagatcagaatgcaaatattataccgaaagatgtaaatgttgtcaataacaacaactacgatgaaattataactggattgaagagtaaagtattcaccaatgagcctactttgattaattttatcccagatgtcaagttgagtgataagaacactgtaacagataacaaggtaatcagtgttatactaaagatgtcagaaatggtgcttttgtcagatagagttatagtacctattgactttacagaactaatgaaaacaggttgttgtggttctgatcgtcttaagttactaggccttgtgatgttagcagttaatatgcagcacaattactcaccgaaacttcactttgtagtatacaactataacaccatggaagataaattttatctaaattcatatgaaaaggagtatgtgaatagacaaaagtcagaaataactggagtgttgaaggactttttatcctcttttgtaacaaacccatattcatcacctttattgccaaataccataatactcacatgtacctacactaacaagtatgccaacgtggtaagttttaactaactaatgagattaaactgtaaaatgtttagagtaaaatattgaaggagttgtttgtcgaagacttgaactacttttcactttgctcaagtgatataaaggatgaattcgataaaaaagtcagaatttgtgagaacattgaaaacttttcctcatcgattcatgaagttaagaaaacgaagttcaatgtaggagagttcaaccagattgttggccactcagacttatacacacatctgctgaacatacacaactcttcatacacgaagtaattttatttttaaaatttaaaacacattctcacttgtaattagaaatttctatacacttcgtcatttattgttaggtttctccaaaaattaaaacagcttgtcggtcaggaagtcaacatcaataatgttaagaaatcaatagatactatggtatcccaggtcttatcagactatgataatcaagtaaaacagtctaaggataattttaagaatgatgaagtcaccgataagatatactctgagatgaaaaacagatttgtaaagagcatacagcactacttgtatttgtttaaccaaaatttgataatgaacataatatctcaatcattgaatggtcatgaacaagatttgaaaaaactcaaagtaacgccatcactggacgagtaagtttactaacattaaattatatatatggtcatgcgaatatatacaaaataaaattatattattaaataataaaattaatagggatttgtcgaatttgataaataaatatgacagtcagtactgcaagaatgtcaaaaaggtcaagtacagtatactggatagttataaactatacgacgcggtgacgaagtcgttcagatttgacttgattctaagtttgagggattattccaacgggataatggagaaagtgataaggctagggaattattaccatgagttctcgatcattgatgggcttaggttcacgccgagtgaaaacgtagttggatttattaaaaaaataattagtaagatcaatattccactcaaaataagaatatcatacctaagtccaacagcttttggattctctaacttgttcaagtaagtaaatgaatcaaatgtgtaacattaaacacatttatagttcatgagtaatattgatttaggtcagaaaacgtaattgggcgagacactagatggtattttacaggaaagagtactaaaaagtagaaaacattggaaggctggttaataacttataatttgtgtaaatttaataaagtgaggcgaatcacacccagaatcacaataaacaatatattaaaataattcattattaatatacattataactatttttaaatttaataagaagttatgggatggcatattcagaagtatatcgccaaggcaggtagagctgttaacccactcacatggtataaagcctggaacaataaccaggggaaacagttatcagatgtggcaaggagcatcgcatatgggctaaataatgaattcgcacaaatcggaagagtaagccagtacagatactggtggtgggccaatccactaggagcaggactggttgtttatggaatctataagttttggtacctttcatacatggcacataaacaacggaaaggtttgttaaattttccataatttttcttagttgcccaagtagtcgcaggagcctatggtcagggaggccagtggcttaacccagtcccaaaataaattttttatcatagattttttaattttcactaatattactatttattaatatgtgtaacatataaatgtagtataatataatgtctagcgaggagtgtgatgaagatgtagatgatgatgagattctactaaactcagtaattaaggaaacttggacttgtcatttcactctaaaaggatcaccactaagctgtaaagaggatacaaaagttgtaggccacgactgcaagtattgtaagcttcgattctgtattaaacacagggcacctgaaacacacggatgtaatccgaagccagtgaaactaactaaacatggaagaccaaaagcgaagaagtaaaacattagttaaagttgtttaagatacttattagtctctttttaaggggaattcttctatacttcgtatcgcctggaacttccttctcaattactaaccttgaattgaaaaatcctctatcagcggctttatcactcaatctatcactcattttcctactattctttacactactagacatcttttcaaactttattctgtctaggctcttcctaagtgaccttttcctagaaaggatctggtttatcggtttcttaactttagtaaaatgaataatctggtcggaaagttcagaatcctcagtcaatatactagtaactttggccttcggatttttgattctgtggaagaatgttgttgaagaggttggaaagtcataatttattatgtgatctccagatacgttgattcccctggtaacaaggtctgtagcgaccagaattctaggctcgtcctcttcaaatgttttaaggattgcaagtcttgtggctagagctgattttctatgaaacgacaaaactggccaatcatgttttctaagcgtgtcatatattaatttacagttcttcagagaattacagtataccagtgtttttttaactggattatccacgataagctttactaagcagtctagtttttggttagaatcagttttctcaaaattcaattcggagctgatcacatggttttgctcagaaaagaccagcctgctagtattaaacctctcaaaaatcatacttccgcaggtttggagaccaccaaaatttatagtagagcccacatttattatctgcactggtggtggagcctttggagttcttttttctacatccactaggggattatatgttcgtggtcttgggcgaagctttgaaatgatttcgaaaatactactcctggatgcgttattctcgaagagcatatccacctcgtcgaaaactagacaaatcggataaatcccccttcttgtaaaatttaaaacctcgaaaacgaaattctgtacagtactaacgactatgtcaacacatccccacctataatatttgtaaaaatagtatttgatagattattatctctataagtggttaataaatagttaataaatagctagttatatagagcagttaattgtgatactgtatattgtcagaagttattagtggttgtttcttataattgattgtatcgggaattagtccatctattgaatagtcatttctagcagttctagtcattatcttgttaactctgttaggcatattgatcgacattgtttcaacctctatttcttccacttgtttaactggaacattctctatcatttttaattggtcctcgtaaaataagttaatggtatccttatcagaattgttttcggcatcctcagttccaacgcttacagtatcccgttctgaaacagatttttcaactttctgtgttttttcagttgttgcacttgtttctggagtggtagattctggagataaacatatacttgatagagtctgtactgaaaccctaccaagaatgtcgatcttgttaatgtaggatatcacctgtgatactaagtccttatttggaaccagaatcactacacagcgaactgatcctaatgggtttgccattatacttctatagatggagttctttgacctctttctccaaatcttcatcggaactgttggaaggcctaacatcttcatagtcctaggctcatgtagatataaaacatccagtaacttgtcaagtgtagtgccatctttatatttttcatacattttgttacctactgatttaagtccatcaatatcttgtcggtagttgactatattagaaggaagtagagaatggccaagtttataattccaagccattgataaattccgtatttcttcgtcatatttagaaactgaaggatcgtctttaaacattaaccgttcaagcatgtcgtgaatatggtacacattatttaaaattggaagtaaatatgcgatagtctttccagtgcctaaacaattgataattaaaaaaataatacctgttggagagtgtattgtaacatcctttccacttacaattgaaagatatgaagattcttgaatctcatttaacttagttaaaaggttatttgctacaagtgaatactttaaggctggatgaagtttaactgagggatgtgttgttatatttgttgaattttgcgatattgtacgattttctatatcattttcaaatttatacttatcatttaaatttttattgaagatatatggattgcttttaaaggactgtgtattaatccttttatacacagaaactggaagtcttctagacattaaaaaaaattattattattttcatatcattcaaatttactattatacattataaattatttatattgtttaataacagagtattacaccatctcactattagttatacacatttacatgaatatgtattatatgtttttaaataacttaattgatatgaatttaatgtatggatggaaattttttattctatggaatttttccgcgggaagaatccgtgtaactagtatatattatttaataaattataaaaatggctgatcttatgaatataataaatcgtttaagggaagcaacatcatctgcaagaaaagaatgtgatattcagataaataaaactgttaatgaaatgaccaggtaacacctgttgttcaatgttattgtagggacctgaaggagaaaataataaaacacaggtacacatgtcgctatcaaattgtttttagagattcccaaattaaattaatagaggagtcatccaataattcagaaaaggagcttgaggaaataaagaaggatgttagttaagattctaataataacttacagttagatgagaatcttcttgaatttaagaatatagaaaatgaattatcaaagctatttgagcatcatttatcgatgaaaaatgtttttatagatgattttaattaaatttacagaattatgaggccaagattaattttatagccaacaaatataagaaaaacagagttaaacaaagcaagaaaatttaaaaattattatatattagaccgaattaacaaaaaagagttggaacatcttgaaaaacaactgaagaaaaaacttatagaggtgatgattataattaatgtgatgttttagaagatgaagaactgcagggcaatgatgctaaaaccagatgaaactctcataaaaattaataaaatgctcagtgaaatagacataccataacacattaatattcgagtataatttattagtaaaaaataacaaaaattaaccacaaggttttacacatcttatatacgtagaattatttaggaatctattttaaatttattaggaaatgttctattatgaaatggattaatatatggatagtattttttaactttatttttattaatattattccccatggtggttatattaatgctattttatcactgattttgtttttttttgtatttgtaaattatataaaatgtattaattcaaaatgtagtatatgatgtgatatttgtacatcatatttctccctaagagtccctcttttatcgcacattcaataataatcttaaagaatgggctcagaaatgtttgattggtctgaattcaccaaaggatttacaaaccctagtcattttaagagtaattggcttccggaattactttctgggcttgcttcatttagttcatttattataattcatcttttaagtatttgctcaaggcacattgcagttgcttttaaagtccctgatcagaatattggtatctatcttagtaaattgtacggacttcgagcctctttcatatttttaggctctgctcttgagtgtattgtcaattattatggattcctagaacgtgagtggatgtcgttcttttcattttgtttaatcttttttgttagatttgcttttgtaatgtgtctttacgtatcccaaaagccagccctccatgcctattacattttaaacctggaggcatttttcttcggtatctttcaaatgtcctatttttcacttattccaaaatttgctccaagagctgcagtattcttagatttttcatcagtttttgttgcatttatgcaattcttatttgatctttgtatgtttgatgagcctatcatgattcttaaatcacaggcctggttatgtattcttttcacattggtttcatgtggtggatggtactattaccttttccttgccgaaaataggcaatcttatttattggattgtgataaagaagaaaaggaggaggataatcaatttaaatgtctgaattttaaaaagtatgaatataggaaggatatgtataaatttaggtgccaaaaacgctttagagaccatcttaaaaaggttcgttacccattcgttatcctatttttaatatttacattaaggaatattctttacccgtcaatccttccgtacggtcttctgaatagagatgattgccacaatataaatttgtttatacctgtagccttggtattaggttcactgacaatttacatgactcatggattttggactgaatttaaaacacgtcctggaaattacaatttgtttttccttctactttttgtacctatgataattataactatagtttcaatttcagcgcttcattcagaaacatgttttgcaaaatatataaaggggtcaccaattcgcgttttattccttttgcttggattgttgtactgttctaatgttatgcagtcacttagttatgtcgcagttgcaaattatgtttactaccaatcaaagtgcagtccaacaaagcttagtgtcctggcattgcacaatctggtggcaagtgtttgccgctactttacatataaaataggagtgggttacgcatgctgtagagtagaaaacgcatatgcaatgacagttttccatccgacatatagaatgaataatattgaagcaacatattactgggtcacagcttcatgtaaacgggcatacaaggacgtgtttaatgactttaatctaaatattcaggaatatatttaatgttttgcacatgtttattcgttaataatacatggatcctctatatattatttgaatttagatataaataactagatggacccttttatttctttaaaaattatttttgtatgatcaaaaacacaataatccgaaagggatctaataataggtatgttttaatgagggtatttatatcaaacaatgatataatatactcaaatctacacagtatagatcaaaatatagtctttaatgtgctattttttacattggatgtgtgatctttaatgtttttattttcactgtttaatttgcctcctttaatatttaaattgatgtcttcatcataaaatgaagtaaaagaatttcagaacaagcaataataggataaatattttaataaaatgtctgataaaagcgttaaaaaagttgaaactgcggaaaatgatagtattattcataaagcacctgatataattcttgcttttgtgtgccttgctacatattttcttgagacagaactaagtttcatatcactttacttcttagaaacattgcacattccacacattcatctgggaatatacaactctaaactaaattgttatcgcagtatatttataatactgggttgtttgacggaatatggtatttacaaaatatgtgatagatttaaactagaaaagaaatatcaatcttatagagaatgcttaagtgtcttttatttatttttattgtgttttgtgagatcaattctcttgttaacgctgtatttctctaagaagctatcattacatttatacatagtactaaatgccgaagccttttattttgggctattccagacttcgttaatctctttatctcttgaccattctggagaaattaaggcagttaattattttttattaatgataatacaattgattcaatttctagttagtagaacggaaacaattgatcactttttaatggttaaagcccatttctggatttgcacaatactttcaattacgtcactgatcttatggcccctatatctctatcattatcatgaaccatccaaacaatacgaccaatatatattctttgttaaaactaaaataaatagtttggtttcagtgttaaaagaaagtgtacaaataataggggttgttaataaaaaactggatgatatggataaactcaaatcagatggaaaagatgaaattaatgaagaaactactatatcgagtgaacaaaaagatccgtatactgagattgattcaactgggactgaaaaaccagatactgttgatgaaattaatgataaaacaatacaaaaaagagaattaaaagattcaagaactgataatgatttaattacgactgaaaatggaaaccccaatgatagagataaatttaaaaatgaggtaattacactgttgaacagaataaattattccaaaatgacatctgatataacaaaaaccaaggataaaatcgatgaaatggtgagttattacaacaaaaacgtggaaatgagtttgttactaaataaagagatacactcactaattaaattgagtaatgatataaaaattttaaaatcggaaatagataaagtaaaggatcaattgtttgaaaaaattcaagttttaaagcaaaaattaaatgaattaaagacaaaaataaatagtttaatatatagaacaaatgaattagatggagaaatcaaaaagattgtacataataactttttatggacgctctctccgtttttaatgattatacctactacactaatatatcatttcctatttgatggaacactccctcatggcgttttaaatgacgaagactcaaaacacaacgtaatcttaacatcaacagctcattttattggtacaatacctgcattttgtatggcttcaaaaggtttgtcatacagattttggacttggcaacactcgcttttttgggttgcattagtcccagaaatcattgtgtttgtcttttctattctagctatacaatctaaaatattttttttcaaatcatttattgattcgaccccaaaaattggaataatgacttcagttttaggcttttgtcacggcctaatggagtcaaccagttttgtatcagtttcaaaccacgttcattttcattcggcacaccctgatgatttttatcttgtattaattaatatcattttacaaacatatctcaaaattattgctttaaagctgtctgcaagttacaatgaagctagaattagtttgggatatcaccttccagagttctacacatttctagatgtgcagcccctagaaggcttcaaattaacattgaaagaaacatttagacgtttcctttacgatcttttatttgatattagagttaatataaaccaattcatataatatgaatttttatacatgatagattagtgcctagcatataacactcttacatgtatttgcacacatactcgagatattcaaaacgataacacacattcaatcaacataatgaatcaacaaattctattacactgttaaataatacgtattaattttaaaaaatacagcatccagttgaacataaaatacagatctatagagatgcaatacccactttattatttccaaccctgtttagaataattgatatcctattatataaaatacacaataatattgttattattgcaacagtttatgtagatctgtcattcaaaagtcaaatggaagtatacaccgcaaacaaataaaaaaatggagatgtgtaaacgatcatgtagaacctcgataatagaggcattatcgaagttttgtatgttaattaaaaaaatagtagtaaatgaaaaattctacgcagcgtttaatgcattttcagcacatatgtttatccagatagcatctgttacatctaaacatatttcagtagcttttaaaataccagctgaaaatacgggaatatattttgccaagttactaagcgccagaggactcatcagtctagcagcatccatactgagctacatcattaatatgacctcaaagggacaaaatgtacttctatccacgatattttgtgtttcgatattcttattcaggtttatttttatggtttttctccatacgtcagagaatctgccgttaaccatatacctgtgttacatactagaaggtatagctgttggactgttccaaatgccattttactctctaacagccgaatatgtatcgattttaagcgtctcattcaagctttcaaggataactctcttcattcttcagatattcctggatctggccaattttgaaaaccctctagtaatggtgaagatacaatattggtttgcattcgttataacatgcatttcaacgggtttgtggtttgcattttgttttaataaaccggatcgaaagaagaaaagggagcaaaaaacagtggaagaattcgcagaactaggagatgaatcatttgttcttaaagtaggagaggatggagatgaggaaacacctaatttcagagacgatgaaacaccaaataccagaaatgaagagttagaaatattagaaccaacttttttcggactatttcttgaacaaatatcaccatactttatgtgtttggtaggtataatgatgaagaccacaatacaccctggaatactcccatactctctcttagatagggagaaatgccatttaattaacatggtcctcacccctatggcattaatagcaaccacaactattcacatactgaaagagaatgtaaaatcgatggatagaaggtgggactggaaatggaacttgatgtggttgaatggaattcctccattcaccatcgtaattataattttcgtggcacttcactccaaagggtgtatttcttcaggtatcattaacgcaaaatggtctgtttttgcaattggaataatattttttctattcaactgtacacttgaatcagctggatacgtgggaatagtatccaatgtgaagcaaaacgggaaaatcacctcaaagggaaggaaaatagtctcaacgggtcaaatatcaagtttaatagcaggattcatattttacaaattctcaataggatacagtgttaccagaaagataatgcagtccgatattcctttagccatttctactgaaaaaatgagtcgttttggagcattttgtttctggcttggcagaaccattacggaaggatgtaaagatttcgttaatgacttcagactaaatataaaaaattatatttaaccaaatgtataattaataattagtgtttgaaagatgtaatggaatcatctaatcagaaagagatgaatactgtataaaattgaatagaatctgaaactaacagatgaattaactaaaaaatctttatgtagtaataaaaactgtagaataaatgttgaattattgtaattaacgggaatagctcgagatggttacaaagcaaaacaaaacaaaaattaaagggtcaaaataatcgaaaattttaatttgtaaaatatttttgaatcttcccctattttcttatttaaaaaatgtagagtgaaaagtttttgtgaaaagcacacaactatgcgtgtaagatacacacttgaatgtggaagaggagaataaacaaaaatgttttaaatttttaaaattttgatttctttttaatttttaaatgcagtatattgtaaataaataaatatttaacctgtgaaataatgtagaattaatatctaagatgcctactaaaaagaagaaagcagatcataaaaccctaactcaaaggttcgggggctttaaaggccccttttcagtattttcaaggttgttatatgggaaattctcgatttttgcgttcattgttggctttgtggcgttcactctacacatgcccatacagtttatatcggttagttcaaggcacgttgcagtagctttcaatattcctaaaaagacaacaggtatatattttacgaagttttacagcctaagggctcttgtaaccctaatagcttcctcaattacatatgccataaagtggtttgttccagaggataatatatttttcacgcttttgttttgtgtcgtgatggttgtatccaggctacttctcttggtttatgtctatatatctaaaaaccctgcacttgatatctataacttttatgttctcgaggctttatcgctcggattgtttcagatgactttctatactctgacaccagagtatgtatcactattatcagtaacctttaagctttcaagaattactttgtttctcctacaaatgattatggacaggttcgtatttgataatcctcttttaatggtaaagatccacttttggattattttcatattcagttttctctcaacagtgttctggttctactattcaatagttaaagtaagaaacgatcttcgtgaacaggaggaaaatacagaagataaagagaataggggtgataagttagaaaaaaatgaacaacagatggaaaatctaaaggaaactaggttcgataaattggaaaataaaaaggagaataggaatactggttccaagagattctcggttaaagaaatggttaaatacaaatattcaagggaaccggatcctgagaaattaaggctttcagaacctagctttttaaggcacatgattaattgtatttcccccttcatgatgtgtttggtaacactaatcatgaagactattttgtatcctggtatattaccatattctctcctggaaagggataagtgtcatacaataaacatgtatagaactcccgttggactaattggtacactaattgttcacgtaattaagatacattgtgactccatcaacatgagatggaaatggtactggcatctattttgggtctttgccattcctcctgcctttatattctacctttgctttgcagctttacatacaaatgggcctctagctcagagaattatcaactctgaaggcacagttctagcaatgtcaacagttttctatctatgtcatacaattgttgaaactgctgggtacctaggtgtggtttcaaacgttaaatactgcggaaggttctttgataggggattaaaggtcatagcaaccaaccaaatttcaggaataatatgctcctttattttttacaagtttgcagtgggatacaacgtgactaggaccatgacgaaccgacacccaccagaagattccagcttcatttataagctgtggttctgggttcacaactcaataacaaccggttttatggacttcctcaaagatttcaaaatgaacattagggattacatttagttttttcttgaaagtgaagattagtcgagagaatttcaatataccaaatatgacatctcgggtttataaaacatcattaaatattcttgcaacttcctttaatttctaatacattatttatacacattctagagttaaacggtgttttaattaagccttaaggccattaggtgataacgtgatttctaccccaacagggaagaattttaacgaagtgctcatttcgcactaaatcataacatattgttttttgttttacttggctgtttaatatttaatttttaattttttatagaaattattctttaatatatttcaacatgccctttttgatcaactatcactgtaatcctccctataactaaaatctgccttttgtgtcaagatgggtttaaaacataaggaaatccacagacactttcaattccttagcgaaaatccattcacctatgaatttatagctggatttctcgctttcgctatgtatatacctgaacaggtagtttcagtgagttccagacatctcgccgtcgcctttaacataccaaaggaaactacaggtatatattttagcaagttgttcagtcttcgtgcccttgtgttgctattaggatctttagcagtgtatatttttaaatggttcataagcgacgataacatatttttcacgttgcttttttatacattattaattgtatcgagagttatcattcttgtgttgttgtacttttgcaagaatctggctctgggattttataacattttcatcttagagtcactcttcctaggtctattccaactcaccttcttcactctgacgccagagtatgtatcattattaagtctttgctttaaaatatcaaagatttctgtatttctaattcagctgagtatggacttcacaacatacaatagtccattcctaatggtgaagatacactttttcattatttttgtcatttcattcttttccatcttcatgtggttcttctactgtataaattacactaatttcaaacgcaagccaatacaatcaacccaaactaatgaagctattgataattcatacaaatatacagttaatggttcaaaaagtaaggtcattgaaattgtatcaaatgatggcaacctgggcccagaaccaggcttttttaggcagttgagaaacagcatctcacctttcttgatgtgtctaatctcaattatgctaaagaatacaatatcgcctggaattctcccatatgcactcctggatagggataagtgccacaaaatcaatatggccatcatcccaatgggactcctgggggcatttgctatacactttttaaaagttaaagtgaagtcaatcaatgaaaaatggacctggcgatggcacttaatgtggattttcatcatcccctgtgtagtaatatttataataaccttcgcagcactccactcagatggagctctttccaacgccattataaactcacaaaaatcggttttatggatggcggtatttttcttcttctgtttcgcgtttgtcgaatcgctgggttatcttggagttgtctccaacgttaagcataatggaaaagtctatggaaacggacttaaagtggtctcgacgaaccaattctccggttatgtgactgggttcttgttttataaaatctctgtaggatataatgttacgcgttccttcgcaacaattcctccagaagttaccggatctttcattaggttcctatactggattcgggaatctttacacggagcgttcagcgactttataaaggatttccaaatgaacatcaaggaatacatttagtttttttcgtttttttattatttttttttatttttttaaatcggtttttaatttttaaaaattattatattctaactagttacttatttgtatgttcagctcacatcttagtctcgctggatcagtgccaccttgagaatttacgaatgtgggtgtacgtgaattcatgaatataaattagataatgttaatgaatttgtaatacgagttagataagcatgtaaattaatcagtatatttaaatttctcttgaggtttatagttactttcaacaaattctggtacaaacaaagaccgaagacggttaattgcagcggcaacctgaagataattgtttatgtgtaaaatacttcaaatatgcgaggcattgtgcaatcaccctaaatcaaaatctaagaaaagaaaactaacagatggaaagtgtttaaatccattaacttggtccagaccattgaatccagcatctgaaataataattatcttgagtttcaagcgtgcctttattcttgttccactcgaggtacaaagattccaataactcacgtagggtcctaaaaacagttaaaacaataaacaaatgttaaattacttgttttggtgctgtggagtgtggtaaaggtcttccaagtaagtaataatgtttgttatagtacaggtttggccaacctcaaccaactgctcaacaagacttaagtcgatttcctccgttccatactttatcttatgaattccatgttgtttaatcttattctttactcttttaaaggtgcctaaagaatgtaaattagtttgttttaccaacttttcgaaattaaccgagaattgatcagcccactaaacagcttcaacttggtcaaatcaacctaaacaattattaaatcactaaatatcggtgattaatcatgggatatgaaggtataaagagttggaattaatatttttaacctttggaagtgtatcaactgcttcttcaaataaagacttagcctcgagagttttatctagacaactgtactcgtccatttgtagtactaggtcagcttgagtggtaaaaaggccacaagaacccgatacgaggatagtggaaacgttcattttatcataaaatggtctaacaagtgagagaaagggggtaatgggttccttatcctttgacacaaggaggtccatgagtttatctctgtacataaagtttgaggctgagatatcttcatcaataagtaggaggtctgctcccatctcaattgactcgactattgaggcagcttgagacgttgaacctgaggcgtcgtcagtggtgaattcagtcccactcttcccatttggcaaattaccaatgaatgtcgagatgtcaagttttctaacactcctgccgtcctcagcccttatttttacacaatttggtgatgttacgacaaactccctcccatcacctggcaccttattgtaaatccccaactaaataaattataaaagttaagagttacttgtagagactctagaagagttgtcttcccgtgatatcctcctccaactatcactgtgactccagccttaatacccatgccagttactaaaatcggttaatctaactaatgctcaccgtcccctttgttaggagttttgattgtcacttcgaggtttgctggagatttgaacaacttgaggtcctgaaaaccatgaaaattgttagagatactggagatttcagaggtttatcactggttccgctttctctgggtaacattgctccgttagcaacaaatgccactagtcccaagtcctccagtgaatttctcaaatctaaattatagttatgcatgtcacaattgtcgtaaatattttactatacgttgctggtcttcaacgcactttacgtgtttgtaaaattgctccttatcgtaggactcgaaatttaagtaagctttacaaatttttgggagtatgtcagtgaaaagcttagcagcgtatttgccatcaattctacgaccgtttgatggcatatgtgcatataaccgaagttcaacaaactctttattgagaatcactgatttcctctctagtacgtattgagtgggctttgaaatatgaaatcctcgtttttttagggatcttgactcccattccctactcattgcggtcaattcttcactgatgctcctagcaatgtagtcacatgaagctatgttccttattttggggatcattaagtcgtaggggaacctaagaataatattcatttggaacaaaccttgctgtatcttgaggtattctgactctgacattggatggaggagcaaatggatcagactgtattctatcaaaaatcaccgttatatctccttcatcaagagtccactctcctagcagtcttttatacgaggaataaggatcacctataaattttaatatttaaatgtaattttaaattatgatagaaatataaatggtaagttagttaccctgtttttctctcaggttccagtataatttcccagttttcttgataacactttttggaggccagaagtatccatcatcctgctcgtcaaaaaatgattctgggaacttgtagtctgggttacaaccgccaatgtcctcatttcctgagatatttccgaaattgtgtccagcttccttatccagtctacggccccaacgcgatgttgattttgggcccagccccttctttttattcactgcgtaatctgacaaagatccaacttggttggaccttcgtttatcctgtcttatattatcatatttcatgtaagatgtgtgtggttgaaataaagtatctggtgatgtgttaatataggtaaatttaaaggaagattgtaaaatgttattgttacacaaagattctacattataacttaaaaaacattgtattagtattaaatttgaaagaaagaatataaactttgagctcttaaatttgatattatttatgtataataaaaacatttatataaaatatacatccttaaggattaaataaatgaaaaaataataaaatataagttaccaagataaaaatggtttaaaataattctaatatatttaattatttattcttggttgatatagccaatactagaatcacaccatacagtaatgttaataacaatctacacattatactttaatggagaagaagacgtatttggtaatatatactgttagttaatataaatattgtacgatttgtggatattttgacaaagtataagaaggatacaatgatattatggttaaaatgagatacacattcacagatttgaggccaaatataaataataaaaatatttattgttactgattcggaaaaattctaaacgaacttattgtaaaaatattctatgatcttggaatcagcataagaaaccacatataatacaataaatagaatttgatcccaatacatgtttattttaagtctgtatcatgtattaaatttattcaaaaagtgttataaaaagagtttatatcatttagttaaatttcgattaatttttattgaaaattatagactaaattaggtaaagttatttataattgaaatgacctgtggggaccgggtaagagattcttgacagaatccactgtaattttaaggctatgatggcaagaaataattttaaatcgtatgatatatagatataaattttataaatatataatatacctgtttgccatcattatccacaaatcctactgtatagaatttcataaatatattaatcaatacaatttatcatttgtaaagccaataaataataaagatattatttataggttaaaaagagattatttacagttaaataaggaagaaaatggtatattcaatcagccaatactaaatatggatcagatggacttggttgataccgataaaagcaggaagtatcctgcaaaagaccttaaaattatattaccaaaaacatacgcagatgtaaatagtaaaaagggacctgagtattgggattacgagaatataacactaaagtggaatgtacctgactcatacgagatagtcaggaagatcggaagagggaagttcagtgaagtttttgagggaataaatacagtaacgaaggataaatgcgtaataaaaatcctaaagcctgtaaagaagaagaaaatcaagagagagattaagattctacagaacctaagaggaggtccaaatataataaagttactcgatattgtaaaagaccctcaaagcagaacaccctcgctaatttttgaacatgtaaataatacagatttcaaaaccttgtacccaaccctaagtatacaggacataaagtactatatttaccagttattgaaggccatgaattactgtcacagtcaaggcattatgcacagagatataaaaccgcacaacgttatgatagatcatgaaaagaaaatactaaggctaattgactggggattagctgagttttaccacccagaacaagaatatagtgttagggttgcaacaaggtactacaagggtccggaattgctggttgacatgaggtactacgactacagcctcgatatatggagcatagggtgtatgctagcgggtatcattttcaagaaggagccatttttctatggtcatgataactatgatcagctggtgaaaatagccaaggtactaggaacagaagatttacaccgatactttgagaaatacggacttaaattcgcacctgcataccaggaaattttaggaaatcactccaagaaaccctggaccaagttcgtacaccatgaaaatcaacacctggtatcacctgaggtcatggacctgctggatcgcatgttagtttatgaccataccaagagaatcacaccgctcgaggcaatggaacaccctttctttaacgaaatcaaaaacaactcagtttaattctgaatttaacgacagtttaatgtattctaataaattatatttattattctagttttaaattaataaaacacatttttgagaatataatttaataaattatgaaatttgtgagttaaaatgtctttcacggggaatgtgtttttattcagaaaagtgtggcggaatgaaatgtgtttatccaaaacaaattaatttattttttaattaaattaaataaaaacacttataaatggttataaatatacttaagtatgtcggtctcccaaaggtttgtttaaaattgataaattttacacaatttttagagattgacgaaattctcgagcaattttaggagagagttctccagtaacaaggtgtatatagacaaagatacgaaaataatttgtcaaggtttaactgggaaacaggtactttaattatttaaatattccttcaaacttttacatttaaacacataggcctccttccacacaactgaatgtctgaaatactacggaaccaaatttgtaggaggagttaaccccaagaagggcggatcctcatggaaatcactcgacgataaacacaccctaccaatattctcttccgtttctgaggtataaaatatatataaatatctaatatttttccctatttgtgggaataataaattatttgtaggcaaaaaaagagacaggagccgatgcctcagtgatttatgtacctccaccaggagctgcagatgcaatagttgaagcaatagaagctgaattaccattagtaatttgcataactgaaggtataccacaacacgatatggtaaaagtgaaaacactccttaaggacccgtactgtaaaactaccttgatagggcctaattgtccaggaataataaagccagaggagtgtaaaataggaataatgccagggcatattcacaaaaagggtgtagtaggtacgcaataactagtatttcacacatcacaaactaataatattttaggaataataagcaggagcggaacactaacatatgaagctgtaacacaaacaactgaaataggactcggccaatcagtctgcattggtataggaggcgacccatttgggggaattacttttacagacgccatgaaaaaatttgtaaaaaatcctgaaaccaaaggtttgtttacacatcttactaaatattttttacaaattgaattaaatattcttgtacgattttcgcaaaattattaggtattttaatcatcggggagatcggaggaacagcagaagaagacgtagcagactggattaaagctaatccaacagataagccagtagtggcaataatagcaggaatatcagctcctccaggaaaaagaatgggtagttttaagttaaataactggaatttcttaggccacgctggagcaataatcagtggtaacaaaggcacagcacatggtaagattgaggctctcagagacgcaggagtagtggtaccaaacagcccagctgaaatgggtttagcaatgttcaacgcacttaagaagaagtaatcttttattctaccagtgggggattcttatacacatttattccttattttccctttatttaaaattaatttctttaaatttattattgattcgtgtttttaaataaaatgataatttttgaataaggaatacattgaaaattgtaataaaagatataataatgaccaaaacatataaatatgaagatcaacttgattttattcagaaaagcgatgatgtgaagaaccttttcataatcaagaagggctttgtcccaaacatgaacgtggaagggcacttattcgcgaatgacaacctctcaaaattgttatttgatgaattaaagcagtttacagatgacccagggtcatttctaccagcactgaaacagcttgcaaatgtggcagccttaccaggcatagttaagagtagcattgcactcccagatgcccattcaggtatttttacccctaactcaattcaattaactatgatttttaggttatggattctctattggaaatgtagcagcctttgacatggataactgtaactctatagtatctccaggcggtgttggatttgatataaactgcggagttcgcttgctgagaactaatttactatataaagatattgaaccaataaaagaacaactggttcaaaagctgtttgatttaatcccagtcggagtcggctgtcagggtaaaataccctgtgattatggaggtaaattacattatcttaagatttctagatttagataacattttggagtacggaatggactggtctgtatgttctggttactcctgggcagaagataaggaacactgtgaagattttggccgtatgattcaagctgatccaactgttgtatcatatagagctaaaaaaagaggtttatcccaaattggaacacttggtgctggaaatcactacggagaagttcaagtattaatttattcaaatatttatagaaaatttttaaattccgttatttaaattttataggttgttgaggaaatatatgacgagtacagtgctaaggttatgggaattgacaggattggccaggtgtgtattatgacacacagtggttcgaggggtttgggtcaccaagtagcttcggatgcacttgtggatatggaaaatagcttaaacaagtcaaaaattaaagttaatgataagcagttggcctgtgcaagaattaactcggatgaggggaaaaaatacctcaagggtatggcggcagcttctaactatgcctgggttaacaggagtgttatgacacatttgacaagaaaagcatttgaggaggttctgaaagaatctgccgatgacttggatatgcacgtagtctatgacgtttcacataatatcgccaaaattgaggtaatgcacttaaatattcatctcactttccaaaggttatataattatttaatgtaggatcacattgtggatggtaaattgaagaggttgctactacatagaaaaggctcaaccagggcatttccgccatatcatcctctaatatcagcagactttcagcacataggtcagccagtactggttggagggaccatgggaacatgttcctatgttctaacaggaacacaactagctatggatttaacactagggtcaacttgtcatggatcaggtgtgtattaataggatataaaatcatataactaaactgtatatatactttagggaggacattgagtagaaataagagtagacggatactggactataatgaagtattaaacaatttaaaagaaaaaggaatctcggtaagactactataaatattataataagctattaataaagtggaatctaaaggtaattaatattatttttagataagagtggcatcacctaagttggtgacagaggaggcaccagagtcctataaggatgtgtcagaagtcgtccaggtaaatctaaacataaaatttataaatttaaaattagacttgtcacgattccggaatctcgaaaaaatgtgttaaactaagaccagtggcagtcattaaggggtgaatctcagcccagattttaatttcatgaataatttttaatacgcattttctattttattattaaatctttaatccggattttcgtattatttatctcttttctattgaggttccccccattacttggtgccgtatgtagtcgattacacggttccttactagaatttaatgtgtttgagtttagaatctactcgcttatttaaatttttacttactggaattatttctgaatttttcatatccattttaccgagaaagttgtaatctctagaatcatgctagtttgctagttttgtaaaataaccaagagttgtaacataaaatcaagtatatataaatatggccatcaaagtcaattgggcgaagactgctatcgcatccggtaccaaatattagtcatacttacctaatatatgaacttttaggcgttgttgctgcagcggctgttttgctttatttcgtttttaagaacgacgatgaagaagaggaagaatacgactcatataaacagactttcaactcctctacaatgtcaactagtagagtagagaaggtactaacaataacacagtcatacatacatggatatagttctaatatataactatatagttattccattttatatataataacatataattttgcagatgacaagaaaggaatgttttgatttattgaaaaagattgctgatagtcaagatgaaactaagaacttgatggcgtcactagttgatgacctattgaccggcaaactaccttcaaaaattcttgaagtgtaccaaagagcgctaccagcaattccaaacgaccctttggaatcaagagggttaacgctctttgaccttgatcacctggttgacaagtaccaaaacgacccttcaatcagggagtgcatactcaacataatgaacatggctccggcagaaggtgacgatgagaacatatctctcgacgaactcatcaaggttcacgagttcatgctctcagagctaggtaagatggtatcttcgtacaggaagatgccgaacaaggactccttggataagaaggcactcacagttgctctccaggcattaatctcagccaaagtccaggacaagtttggttacagctactcctcaattgacagagctgtcatcaaaaaccacaccgacttaagcatgaacaccaagttcgcgagactcactatgcagatgcagagcgaaatgtctgaaatcacagggtaacttatctctttatgccctattcacccttttacaggatatacaactaacaccactaatcaactacactccataatacatgttaagtattgtaataaattatgaaatgaacaggtcagactgctccacaattctctgtgctgaggttttggaatccatgaatagcgagtctgcctcatctatatgtttagcctcaacagtcgacttttcctcaagattcctcaggacattggacggagatatcagctgaatgcaatacctaagactagagtttaagccgatttcacctagtcttttcaaaccctggtcactaatgggtacattctcgactttactccttatttttaatatttgcaccatctagaaactagtgagtgggagagttaaattacctcatgtattgtgtatggaactgtttttataatgagcagacggtccaataaatctgccgggatcccatgcgcctctataaaatcacttcctcgaacactacttatctacacagcattataagagcgtaggtagcagtgggatatgaatagataaccaagtagtgttgaaatataaccaagtagtgttgataaataactgtatgaatagttactccacgattggttgagaggatgataattggagatagaggggattccataaccttgcttaagtatgtgaaacactcaatatcaaacatgtggacctcgtcaatgtataataccccaggtattacttctgcgattcccaggtctacgtacttgttcactgccttgttaacctcaagtctcaacttgtcagtcatttcagtacgtttaggcctcaaatattggttaagcactgtaactatatcacttccaccctaataaatttttataaactttgttaacacatgcgtaaattaagtttaggttaaatagatggttaatgggtactgatggatttgaatttgccatatcaagatcattcagcgaaacctcctggacaacttgtttctgtttaagaacatcgccctttggaagtggaacatactcctcaacttccaagtcaaattcagtagaataaacatcacacctcccgcatctcctaacttggcctaaaacatagagttattatggtagaaaattacctgagcctgattctatgaatataacatctcctattgaaaccttctccttgacaagttgttcatgaacttgaggtgctagtctaagggtttttgatcctttaacagtcttcaaggttaccagtactccattaatacatttggctataaataacattataattactaaaattaagttatatatgtgtttgtatgtaatgttgactaataggataccaaatcctccagttggattctcaacttcttcgggtgttagctctgtaacttcaccttcgtaaatctgtttctcgtccttaattactatatgaatcgactttctgacagcttcatttaaaatctcagtttttttaacctcagtgctaaatacttcagtacttgataagattgtgaatggagcacttgtgctcaattctctagcgatacccatggcaagagcagtcttgccactaccacttggcccagccaggagcagagctttgcctaaaaaattaaaattaaacgaagtatatataactgggtgtaaaaagatgtttaagatggatacctgccatctttttggattttatcatgtcaacggcaatcagtgcggcctccctggccttaaattgaccaattaagccacaatccggattaaaacaattttcgtaatcacttaataatttagggtcgtcttttccgtcataatttaacttagatgtgtcgagattaaaaacagaaggatgaacgccaagacccttaatgtgactgtggactgagattctctccttagtcaggccaaaaccttttttatttaaggtatttgattttatttcagtaatagtactgctggaatcgtttgaaatttccattatttatattcttttggggaatattttttataataatttcctctatggtgatgacattctcgagaaaaaaacagtaagcatttttatttatctgtataatagtcttcttgttcatttgtatatgtaattttttaattttcataaatatacaattgttagtttaattaaataaccataattttgttttaaaattacatatatctgagttttcgttacatttaatattttgtactttattccctaataatttgaattttgattaatttatttatttcttttcgtctgaaaactggttttctaaattgtttcctgttttaatcgctaattctaacctgaatttgcatttacagtgtgttaatagctattgttaccaatgaatattaagtaaaatttgtaaaatagtatgaattttaaagagcaactataatattttagtataatcgcaaatacgttcagtatacttatcaatattacaaatgtggccgaaataatggccaaggttgataattttaacataaaatgaaacatcaagtttcagaggatgaccccggagaaaggtatgagaagtttagcagcttcgtggacgggtgtttcattcctccatgggaccacgtcgttgagtttacgacaaaagatcacaagtatttgaacgaactaatccatttgggagatttgtggcaggacccatcaggcttaatggaactgaacacaagacaaaaaaagcgattttcacgctgggttaggtactttgaactgtgtgaccagttaacattctttaactcagccccaagttcagaaaggatacttcaaggctacgtaggagattgctcgacagtttctagtctttcaagcttagcagattatgagaagatttccggtgtttcagtcctgactgacaagataaagttgatagatttggaaaaaacgggtcttaatctgatgagtttggggtacccagaagagtgtattaattactttggagggtacaagatagcagttggagttaggatattctttaacgggtgttcaaggtgtatgtttattgacgactgggtccccgttagaagtgatgatactttactttgtgcacactctaaggattttagtgagctttgggtaactttgtttgaaaaggccaacgtgaggttatcaggtcatacatatgcaatcaagggtacaaacccaggagttgatatttatcacctcacaggatggatacctgaaattatacagcttcctccttttcattttaagctaccaaacgatcactcaaaatcatcaatgactgataatataaaacagaaagtgtacgactcgcccagtgatataacgaatattcataagtgggagactatctgggaatgcatcctgtataactttaataaaaactgcgtattgtgccttggcactaatgagttgtatgatgctacaagtaatagcttttatattgaaggtatttccgcttcatcaggtaattttcacagattctcaattgatgtgtagggatagtaagtggtcatgcatacagtgtattaaatgtattggatttatgtgtatctggaatcaaacataagttgttgttactcaaaaacccttgggggaaagttagctcaaaaattgaaattgacccaatgatcctctcaattcttccctccaacaataataatacaagtgttagtatttccatctagttatacccactactttctatacatatatttatattatatacacaatgttgaataatttgataggatactggaatattctggattgagtgggatagtgtattgaagtggttttcacatttgtacttttgttggaatactgatacgtttgaatttgtgaataaaatacattttaactgggggaggaatgactatttcataaggtctccagtgcctgaagattcttatttatccctgtttaatccacagatattactttcatttcaaaatgaacatactgatgaagatttaaacacggatatggaggataagaagatgactaatagaactggattgaacgtgttaaactcaagtagggaagaagatgaaggggattatgtgttgatttatgctatgctgattcagaacagaagaaagctgggagagaagatgaagtatttggctacacatattttcgagggtagttatagaataataataccaaataacccactgatcaacggagtgtataataatagcgagattatactgaccaagttactaatttgttcaacagattgttcagattatgaaaggagggagcaacttctaaagtacgggagatatcatcaaatagataataacacccctgcaattaatttaatcatgctgttatgttactacatgagaaagatgcaagagaattccaatttcacgctcattacctactccaacaaaccaatcaagttatttccactatcagacctaagtaataagatatatagttatataaataatccctaatataattttttagtataattaatattttattacaataatattagaataataatattagaatgataatattagaatgataatgttttattaaaataatattggaataatgttttaggtgagtttagtaacatggtgtatgattatagatggagtagttttaataacggaatgaacccgaatgagatttggtcatttttcactaatccgcaatttcgactcgagattaaaagggatactaaccttattattctgttggaaacagattctgaaatttcagtaaacctgaggttattttttggaagattagcaacaattaggtcattgagaacaaaacaagccaaatcctcaaacgaatataagctctactgctgttcaattcagggttactttaagaaaggtacatacacactaattccgtcaaattttaacggaatagaggccagttttaggtttaattttttctttcaagggccacagaatgatactatacacgtttatcccattccgtacccactgattaaactgcaccacataggcagtgaaggtttaaattccagaactaaggttgttgacagagaatataaaattgatgaaacaagtgatgaactggtagaaggacctgtttcatataaaattctgaacttttaccatgtaagtgtggtgaggatgtcaagccattaccttgacttcactgttgatcaggtcacactgctctcaattaaaatccacgtgaacagcataaatgataacaaattcgtgctattctcaactaacacaagttaccccaacttatctttaagcagttgcagtatagaaagtaactccgaaaatgctggagatttaaatttctgttccgatgtctgctgtttttcgtgtggtggtccatatgggcagttttatcccacattgtctgctttgttccccgaggaacatggattgggttataggttttgtttgttaagtgatttgaatggcggcatttccaaaaacggtaaaacgccctcaaattcatctcaagtcctattcaccagagaactcctagtcacattcacactcgccaaattgtttccaaattcacagtaccgcttggtctcgataaaccaattcaagtttcaaaagttatttttcatttcaaactttccaattaccttaatacattaatcttttatgttaaatagattgtatgtgtatatagtatagtatagtagtaagcatatatataatagtaagtatatattgtatagtatatagtataaagttgatgtataatgtatgtggtatagggtatatatatgaatagtgtgtataatgtgtacagtaaaatccaatatacattgcatagtatatatactttacaagattattaatacaaaaatgttaaaaccagggttgatgacaacttttcagctttccaatcatggaagaatcagtggaagcgtcaatgatacaagtgataacgttgtttatgggtaaagtgctgtgctcctggtcagcaggagacctgagatgagaacagtaattgaggattttgctcaaatattcgtcaatctcgtcggatttctctaacttagggtctttgtccttgatgaaggtgttcttgtccctcgggaaattgttcttgtcggtggggaagctgtttttttctttttggaggttctccttatccttctggaaggcgtaaaagtctctggaggtgctacgtccaattagaatcgcagacaaagcggcgtgaacatcaattttaaagtggtggatagaggatgaaacggcaaacataacgccgggaagaagaccaagtctgcatgtagggcccataaagttagtcatgttcctagtgagcctgaaaacccttatcttgttatcgtccatctccctgttaaagagtttaaagtcaaactgccttatggaaccgttattcatgttcaaaacaagcttagagggagttgagtagggtgtggcaaacactaagtttagcagtgcctgagtggcgtaagatgaggtgaagttaattctgaaattcatgaaattttcgtaatcgacggatgattctaagacaaattcataaagaatattgtcaggaacaatgttgcatagcttattgtatgagtcctggagtaagtcctggtgtatctttcggtaccaggtatagaaccaggggtactgtttttccctgaagagtttgaagatgtagttaaaacctgactctttatccatctcctcgttagttgacgcgtttgtaagagatgaagttggattatacttgttgtaacactcgtacagctttatagtaatgttcttttccaaaagtatcttgtgaagcactgggagaagtaaacaggtttcatacccgttaccactggctagcctggtatctagtttgttcaagtcactatcagtacgaatgtcagaaggcatcagagggatggagtctactaaaagattatccattgaaattgacctgttgaagatactcaggagtgtgtggctgttcgggctatcctctactaggcaaatgtgaggatctagtggaactatagagcctgaggaaatgaacaagttcctcctcctagtctcattatactttttcatgtagaaattcacaagttgggacatcttgtgaatacactcttcgcccttctgtctagctctcacgagtgggtacactgagtagtagtgcttctggccgtcagttgtaattatcttaatacactttaccaggtgatttctcctcctcacctttactagacatgggtctacatacaaaatatcatgcatctctccaatcacattcttgcccttaatcatgtcgtcaactggagttacaactacatggggtagttgtattgagatgttactgctggatgtgaacttgttgcttagaacacagactgagtagtttagtaagtggctaatgtcacgcctaccacctcttttgtttcttgttttcccaaaatttatcagcaggctgattatgtccaataacttattcatcgtgtatccacacgttaagcccttctctgacggatcttgaggggtgtctgattggtagtttccaagtctgtcaggagtgaagccggagcttgaagtaacgctattcaacagttccgttgcctttatcggctcaataaagttctgcgtgaaattgtagacaatactataaagctccttgtcgtcatcctcgtcttctgaggtgcttatgcttgaggatattttattcagaatcttgttagtcaagcagtacagcattggtctcggtatgtattcgtgaaatggcaactccaaacactcctcaaatatcgtttcatatgcgcacataatctcgtcaatcaggtccggctttcccatattcgtgagtatattacagaagttctcgagcgtgtggttcaaacctggattacagttaattagcatttgaagtatatttttaatgtcattcacgttctgtcttccaatgtgttcttcttcatccctagtgctgtacccgttatttgtgttttgtggcattagggacaaatactcggtccttattgtgtaatacagctgctgtggcaccttggttatcaagagtttcagcaggtggaatatttcaacattgttcctggtgtacagaaacgtcaccagctgtggcagccacatcagccacacgcagtggtgcacaaactccgagtacttcttaaacgtctcactcgttgcgtttactcctctgtgcatctcagtcaacaatgtaaacagtctcttaatcaacaaccaatgacaattcggactaaaacattatatacacagaaaattttaaactattttatagaaataaatattataactattgactataactagttagtgataactatttttagtattaattgtggtaattaatatcatttgtaactactgtatttaatatttagttagtattagatattgttatagtgatatgtcgtggttaaaagttacttgattgagattgctgtcagatatcccataattgatgtttcatagagttctagtgggaacatttgttcatttttggcccacattggcaccatggagtggtcgatcttgttatcgttaaactttgcccatgatatccagttcttactcagcagaggttgcagtttcaaggcttctaacatatacttacatgccaaatcaatgtcccctaaaacaatattagtaattatacaagtaaatgctgtaaaaaacaaatattggagggaagtaaagtgtttaaactatgtattaaataattgaatgaaatcaataattgaaatggtgggttgaaaatacctatgccgtttaactgtcttttgttggggttagtttggttatgatgtatgtcgtagatgtaattcctgttaatggcttcagctttaagtctcgtgacatgtgatttcagtgtttcatatcctctgtttggtagtttatcgaaatcaagtgtgattacactctttagagcatctggaacgttaattgagaaagtcaagtactgcttaagcctctcattaatcaacaggtagtaatcctcccctatgtttggacttttacttatcgtctgcaccaaatacttttgagccttatttaaaagaactgatgctattaaaggcaactgatgactctttcttatcactccactatacttcaccagtgtccatatgtaatcttgattaatcaacagtgaatcatctaaaaaatcatgtaattgtagaaattacgagcaaataattcaactaaaaatgagcaactaatttaactaaaaatgagtaataatttaactaagaggttcctaaagcttacttaggggttgatgattgtttgttaggtttgtgagatttttaacggtactgaaaacctgtgttctgaaacacagtagtgtgttccagatactcggatgatcatacttgttaggaagtctgttcctccatttatttatcaaatgtatctcatcacactcctgtgccttgtatatgtttgttattgatctcttcaagtatgatattccctcacttatctctgttaacctatgatttagcctcatacaattcacatgaccgtctatcttaaggccaagagtcttataatagtgcaataaccacgaaaaacaattctgcacaattcattaatataatattgactaatagtttaatacataatggtatctattgtttacctgtgtcatgatgttgagtttatagtattctttattatattgcctatatagtgtgttgatattgttagaataggccttattgatcttattaaacatgttgtaaatgttcatttcaatgacgatttccatgtcataggagtcaacatcattaaaggattcctggttcaccagcagatagttatctttattttggttctgatacagcaccagcatgtgtggaaaggagttgaggaacacgttagactgactaaatgtcgtcttactagtcgatatgtatgagatatctctgataatgtcccactcattcagttgttttgtgcagtacatccaataattaaaccagagcttagactcgtcaaaccatgctactgtttcagaggtctggcctgtgttggataactggtccattatgtggttaaaatccctctgggcctgtttccactttccatgctgaagattggccaaagctaacctagtctcatttgttatcacccaacacctatttgtgcctattgacaagtctagcatgtccagcctcaaatacaattccgacaaaagcgtcgctggtttagtcatgtccattggttgcgctagcatcaggttctccaagtagaaacaggtgttaaagtagtttcctggcaagaactgtgaaaggtactttaacatctcaactggcaaggatatcatggggtatgtgttcatcacagtatggtaaactatgttaattgagtcaaggtcctccttatcacaaaaaatatccatgtgtgttggattctggatgtacatatttgacagcaggttatggttaagagatattgaggttatcttttttgtaaggaaattgataacatgttgggatacctggttcctgtgtggctctgacaagttaatgtacagttgtgaaaacacctttgagaaggtgtcacggttaaatttagtgtcgagttcacacattttttccaaatacttcagcaccaaattctggttaacataactttgtaggtacactttgttgtattcatgtatcttcactagggattcatacagtttaccatccaaactaagttcaaactcctggagatcttctggttcactaactggaatatcctcatcagtatctagtgacatgtttctaaactccttcaataaggtcacaattggtctcaaacttgaattctcgcagttacacacaaaacttatctgacttacaaggtcagtatttgacaatgaccccgacccgaccctgttatccaaaggttccaaccttggataattactccctattccaacctccacatcctaatcaaacattagtcaattttttaccaaatagtataaactatatattaaaaattaatagacaatcgtttaaatatacttaaatagatagtctcatacctgtctaaaaagtgtgaatagaatatcaacgagtgttgttgcattttggttatatttaaacaaaagatcaattgttttggatagattctcttgcctctggtagtgcttaacataatcgttatgttgtgacttgaacaggtatgcacagtgtgttaggtaactcatcttaatgtctaatctcaggtttttaaacttttcgtgatccgtaatccccaggtataacaaattaaactctgttgccagggtctcctcatccactttgcaatcctctggtacatatgatatatgccttgtgtagtacagcacgttacatatgtactcaaatttataattgtctaatggagccctaatgcagttaatcaaatctcgttgtaccaagttgggatcaggggagtaattaaatgcaaactcgatgtggttgaatgtgattttatgaaacttcctgtttggagttgtcaagtcttcagccacgtatttttccaaagattctgagctgacttctgtgtaacttccattatagtcgaagaagttgtaatccatatcttctcggtactcttcctccggtgattcccaaatactaccatacgacctcaacctagtcagtactctcttgttaatgttaatgtatggctggaagtactttaaactcaacagtatgttgaacatcatgaacttgtcagcctttgtcgagatctcgacgactttatagaatgaagacacgacttcagtgttaaacttgtatattttcaggaagcacaactctaggaaaatagcgtaattcgcactaattatttttctaaactttccatgtggcacgtttattagacacacgtagagttttttaataaacgacggtaaatagtcgttgatgtatcctcttagccttttagtgctaacaaccttcaacacatcaacgtacaaacatatcacattcagcaactcagttaatctatttagttcaggatcatcaggttctccggaccccgtgctaatcatgagtgggtttggggtaagattaactacttctttcagatagttgaagatcaacttcatcaacacgtccaggaacttggctgtggtgtcactaaactcgtgctgctcatctccatactcagattttaacaaacactttaaatttgctggtgtcatgagacatggtatgctatttagctgcataataaggtgatacagatgcgggtaatcattaatcagaagctttattgacacgctcttgaacatcagcttgtttgtgtcataactcaaattatcgaaaatcttattcttgtaggtcttactgagtattccgttgtacctgtaaatgatgttatttgtcagtttcgagtccttcaaatagtcagtccttgtcaaatgcgctctaagtgagtttattatcctgaagtacaccgccatgagcttgtacttgctatacttcatctcgttagactcgtatattaaaatgatcccgacgactatctccatgatgtaacggctgtaatagtacccgtgacacgtgtgtttgtatatgtaatccacaaacctaacaaagtacgggtccatgaaatctctataattgttaaagtaattcataaaacctcccagcaacatcgttaacgctcttatgtcctccttttcaacatcctcagttgttctattttccaataaactatcaagttccataacaccgttctcagagttctcagaagattgctcttgatcagggccaaattttggcattgacaggttaaacaggtacaaaagcactggctggtactttttattgtccaaaatcgttatattgcacagacagttgaagaagttgaacgagaccatcttcatgaccaaaaagtagttattgaactcatctgtatctatagcattctgttcctcatccactgttagtgggaatgtgttgtttagtattagaaatatctcaataggcatgctttggaggttattcagcaggtgtgtaaaatcataggacttaacaaactcaatgtattgtctgaacactgtcaacaccagcatgtaattaatgttacacagatgaaatactttactcacaacgtagtatccaacccatgtcgttaacacttggtctaggtttaagttgtccttggtactggtcgaattcatgttttccgaaccgttatttagcactccgttgcacacgtaatccagcaactcggacaacagattccccttgaccagatcctcgttgttattgataaagtgcactatcctcagcaacaccatcagcctataaatgaatttttatcttataatcacttactgtgtgttgtacaaataatttgatgttgacttgaacaactttaagttattcatcagctcgaagttatcacttatgaatctattaaacacactctaaaaattattcattaagaatttattagatggttaattagggatttagtggatagttatttggtaatttggtaactattactaaatagctgttgtgatgttaccagttcattggtagcgttgacaaacgagtatggtgtgaatttgtactgtgcgagtatatcaatggttgatgggtagtgaaggtgtaggagctcgtaacacttatttgaaattgatatataactcaactcatcgatatccttttcctggtgttctgaatcaaatattctattttctgggtgtaggtaatgccctataaagatatccttatttgacagtgtcactactgtctttataacattcttaaactcctttgttgatatcaccaggctcttcactgacgacaaatactctatgaagcacagtatttggtatattacgttcaggttattattgttgttcagctcattattaagtttgttgaacgtgttcttaatcgagttatcatccatcaaatacagcaaatcatacatcgtcaagctttccattgccttattctcacctggtttatcttggagtttcgcgttattaatgaaatctttatacatctgcattacttgtattggtgatgaaattgtactctcacttccttggttgtccgtgaacaacttgttattataccccaacttcaccaggaacttgaaaaagtctatgtaactgagaaacttgagctccgacacgttaatcttggactccgtcagagttattcctacgttatacaacgagtccttcatgcacttgaaatcactgccatagaactcatacaataacatcaatttctgcaatacagttaattcaattgttttcgaaattaactagacaatttacacagtaattaatctggtcactaactatacaatgaatctagttgttattaaaatatggtaaaaataccttgactgtgctgtaattgaaaatggtttgtagttgtatgatgaagggttccagggtcattaatgcgttttgtgtaaccatggtcttatccaacctcttcaaaatggataatgatgtcttaaacatgattccattggatatcatcaccaggttaagtaaagttgttgatatcatgtgaatcagtccagggtccaactgcttaaacagcttctcaaacctgctatcaaaaagcaatagctccacgattctcaggtaaatcatcatctcgacactgtcctcgtcatagttgttaattctgtccagcagcttcttcaggcaactgtccagacacctaaacattattaagtcaaattaatataacggttaattgtagatacattttattgtgcgtgtactgtgtcgtgagaagtagtatttccaagaactgcaaactcttgaaatttgtattgaaaaactgggtaagtttttgaggcttgtattcacttaacagctccatagccagaagacgtagcttcagaatcttattattcaacattgacgttaaattgttgaagtggaaatcagggtcacagcttacaataagtttaatgagtgtgaaaagaatcttctcaggtatcctgtttgctttgttgattaggagttcttcgttggactggtgcaaatcaaccactgtgcaaagcagcatattataaatgtatgtgatatatgccttaaagtacttgatgtggttcgctttaaacagctttaacagtaacccgaagtatgctactcttctgaatatgttatggttattcaacttaaccaccaggatcccgacaacgtactcgatgacgtcatccatatcatgagccactatgcattcaaataattctgaaattaactcattgcatgagtcatcccactccacttccttactctcgttagataccattggatactccacattcaagagcaacaggtacaacacctgagataagttatcatctctggtcctgttcctaactcttgacgataaaaccagataattaaacagtgcacatctaaataactgtaaattctcatactccacgctcttctttatccttctgcctgcattcaacattagacacagacactttaacagctttctcagatacttcatctgatcgtctgttttcgtaagttttgcctcgcgattcaggtgagttccgttacttgaatactggttatatacaggaacttgattcttggaagttgcatcaatgtaaaagtgtgttagtgacaagttgtattgaagtattggcgacattatgatcagcaggtatcccgcatatgtgttatattcatccatgttaagggggcctttctctctatacaaatttcgttccaccctctttattattaaatctaaacctggctctactggaatcgacactactgtagagtcattttccgttaaacatggaaatgctagcgaaaactcctctgcgtttttaatattatagtctactctgtatttctgactgatggaccccagtttgcccagaatattcatcaccagtttagtgatctcgggatcttcatcattcaacaaatgttccattaggaattttatgaagtatggttccactttatcatcaaagttctgttcgtcataatctataggttgatattcatatgggttaatgtctttgatcgtgtctgccatgagcacgtacaacccggcgttatctgtgttttctacatagttttcaatcaacattaatgtgtatttgagtagctttctgcttgttgtgtagttgataaagtagttgaccagcctcagcatctgcctcatgtattcgaagttaaagttattcatgctcaccacgattacaaatgcgtacaaatcctcgttctcttcaattcctatataacttgaagaagctatttccgataacaagtcgaaatttctataatccgagagctctaggtaaaagaggattttgttcagaaaagagtagagcacgttgatctggtcatatgcgtatgtgtagttcggattactgtttatcttctcgaaaataacagttaacagtctcaaataaagctccatcttctccttggttttatctccgggctgtgctgattctgaaccttctgtgcatgggtaataattgcatacgaggttaaccatctggcccaagtcatatgtaatgtacttaatcgagtccaggttcaatttaagtcccacgaatatattttcattcatcagcttattcattatctttgttctatcttgatctagctcatctttaggtggtaaaacatggttttcctggaatattatgttgtaggagtacctgtataatctgtccaggtcctcgtcgttcatcaactgaatcaccagtgacaaatactgctgaatgaagagatctgggtaatttttcgaaaatgtgaaaaataggtacaagatcacgttttctagctgattcctctcctccttactctgatcttggttttctgtctcagataaatctgttactgagtttatctgggtttctttcaagagttcctcttcgttcataaacagcttcctatttgggtacaagtagtagtacactagtatcggcaggactaatctaatagtgttttccaccattgcgggttccagggttttacacagtagttttactgaattatccaaaataaccaaaaattcacttttctcttcgtcttcatcctcatccatccttatagttttatttcccggggcactaatgtatagctgtgaagagagcttcactgtaatcaaaaacgcttgtaaaatatttattgttatcacccttttaatatttgtcagttgtattaataacttgtaattgacaacgattatctctatgagcacgtttagtacggtcttgacgtacaacaaatatgcattgctttgtttctaaacagaatttgtttgttgtttattaaatatctagttatttctggtgcgttacatttctgctgtagtagaggtcacttataaggttaactgcgttgaaaaaagtaatgattgagaacttgtatattgcattcagggactcctcgtcaatattggaggaaagttttgggaactggcacagcaaggaatgcactagatttaagcacaattccttgattttatagtccgatgagagccagtgccggctcagcaatgtgttacacttttcgaacatttgcatattaaagtgctccgtatccaacttcttaatcacatccaaatacaacatcagcacggaacacctaaattacaatttattatattttatcaaaaattattataatttattatattttatcaaaacttattacaatttattatattttatcaaaacttattacaatttattatatatcactaaaaattttcttacgtgcatgaatattccatcaatgataggtggtataatttgttaaagaaatcttgttgtaggatagactttaaaacaatgtacgtgactcctgaattgactaaaattacaaatgcattgagcagattcgtcctaaaattaaattacaccaatttaaactcacatttgctcattatttaaatttaaattattcaaaaagaaggttaggtggccgaatatttcatttaaaaaatacgagtaattgaacgtctgttttaagttcacagtaaaaatttgcaatgctctacatgacaatagaatcaactcaaaatagcatcctttgtgatgatctaaatcaatttttattattggtttccaacctgttgaatttaatccgttgacttttctaaatactggcaacagttgaaccagattctttgtgaataatggactcgtaaacaactggtcaagaagacttataaatatcaataatctttttacgtctttatctataacatttttgttaaatagatttatataccttgtatgtttggatagttgcttaacagtttcgtggcaaattcgaaaaattggtcaacttgaaccaggtttacgtaatgttttggatccattaggaaatgctttaaaatcctttgacaactttcatcccaatttgaactggtaataattgtgttaaagcataatgagacgaattctctcctcagttggacgtccgcgaactcgaccttcgtgaatgattccatgatgtcaaaacactgggttttgagttccaacaaactcggatcatttgtatttttcagtagcaaggtctttaggaaggcataattgacccgaaatgatgcaaggaaaccatcaactgtatagttctcaaaactttctattaacttcttgactccgttgaggcaatctatggaaaattatcattatattttacaatatgttaattaatacctttagatagttcattatcagaaggagtatggccatcttttggattactgttcgatataacgggagaataagctcctcgattaaaataagagttagtggagtccaaatttggatccattatgccgatatattatttacaattatggaaaataagtaacaaatctcaactgtggcgaacattacaatgaatactgatttcgtcggatcagttcaatcatgtttttaaatctttgagttatctaatatacattgtgtgtaaatatgtttatattttaagaaaaataaattaaattaacctgatcataattaaagatcatctgatcttcagtatgtgatatttttatacatttttgtatatcgtcgctttgcctgacggaatccaaaatatgatcactatcattagtttccctttttagtttaagttttatttttgtaccatatatttcttaacttaatgatctactcaagtgatcatttaaaattttaactccttttatatattctctgttagagagatttgtatacttgagatgtcagaatctttacgtatttctaggcatccttactctaaatttttaaaaaacaatatttataaatctcttaatttattttctggcgaatttggttccaaaccttataattcaacagatcctttcactagaaaacacatacgcagtaaaattctggatgaatacatctcagtatctcaatatacacctataacaaactcaaactctcaaataattgaccgcagtaaggagaaggaacttgtaacacccaagactaggaagagtaggtcggccttggcagaggttattgattcagttgatgctgaactatgtgctcttcgtcctccaaagaagttggaatacctagattctgacttaggtcagcctaaatatagactaactgatactaattatctgactatttcagatgccaactcaacagctgagaaaccaactgagggcaaggaaatatcacttattccccaggacgttaaggctgaaacgctgaaaaaatacctaaaagagaccgtttcaaagggtcatgagatagctagtctggatataaacccgaaactggaaagaattcgaagaggaagacctacttggcacgaaccttggaagttataccgggttataaaaggccaccacggttgggtacactgtgttgatgtggatatttcaaatgagtggtttgtatcaggcagtgctgataggttgattaagatttgggacctagcctcatgtgagttaaagctttcactgaccggccacataaacacagttcgtgatattaagatatccaccaggagcccgtacatcttctcatgcagtgaggataacactgtcaagtgctgggatattgaacagaataaagtggttagaagttaccacggacatttgtcaggagtgtacaagctaagtttacacccagagttggatatactattcagtggtggtagagatgcagtagttcgtgtttgggatataagaacaaaacaagcagttcatgtattaacaggacattccggaactgtgatgagccttgttagtcaatcttcagaaccacaggttatttcaggctcccaagacaaaactgttaggctctgggacctttccatgggcaagagtatagtgacactcacaaaccataaaaagagcataagagcaatgtctatacatccaactgaatactcattctgttcatgtgcctcagataatgttaaggtttggaagtgccctgagggccagtttattagaaatatcacaggccacaacagtattttaaattgtagtgcaattaaggatgatggagactccagtatcttagttgcaggtagtaatgatgggcaattacacttctgggattggaactcaggttacaagttccagacccttcaatcaaaagttcaaaagggttcattggagagcgaaaacggtatctttgccctagtgttcgataagagtgagtctagactcataacagccgaatgcgacaagactataaagatttataagcaggacgaaactgcaaccgaggaaacacatccaattgactatcaaccatcaaagattactagatactattaacacgaattttaatttcttaagtgttatactttcccaactgtaaataattaatactccagtgtatatactcaacagtaccaattactgtcatgagttagctaaataacccacgaatgtttctaaaccctaatatatacacatatatgtaattagtactattaaaacaaccaaattatactactgcacctaatttgttggaagcagcggtgacgttaagtaaagaacatgacttgccttctcccattgattcaaagccttcattctcaagttcgatgcgtttgtgttgtattaaggagtgggttaggaagaaagagtataagttctgaataaaacaaagaatgtaagttgtagctgccaagtaatatgcgttttcagttgtgtatggttcatcttcaaatgtagaatagagtggcgtcagggtgtgcagtacggcacaaaacgccatgaaaaatccagaaattgcatagtaagttctcaaaggaagtaagcaagataaatttactttgattaccgagtaaatgcaaaacaacgcaaaaactatcccaattgcagcaaagtacgcatcaaccaccagtatgcctaaattgaaccctttatgcataaccagatagaaacaaaacactattaaacaggagttcaatagtacagaaatgacattagataaggtactaatgactttaatcttgttaacggacaacatcttgatatgttatctttaaatttactatacactaagcacctcgtttgactatcgactagatatcaaaagctaaatattaaaaattaaaaatcagaaaaatttaaaaaattgtgaaagacctttataattttatatataaatttgatgtatattggcactaatttatagatttagaatcaaaaacaacgtagcacattaggcgtgtattttaacggtcgtaaacagaagagcttatggtcaaatacaaatagaatctggtaaatagataaagaagccaaagtcttgttatttcaacaaattaaattaaacagaaacggaaaaattgcatcggatcgaggtgagattacagaaggccccgcaaaggtagtacagagttgaggggacaaatagagattatagatattggtatttaagacctatacaaataacatgtaaaaagaagagtgaatgataaaattagtgaataattgagagttttaagaaagaaatggtatacaacggttccatggttacaataaaataaataattaaaatttactaattaatttagttaaaaaatggaaatatatatcatcacaaatgctctgggaaaataaatcatgaagggtgtgtatttattctctaattttgtaaggtgtaaccacatggattccactttaaatttttattgtgttattttcacaactaacatttgtaataatttaatttttaaaaatggcacacggatcgcaacatacaaaagtagaaaataccgtaaaaaaggaatatccaatggtaatttgatattataatcacaacggttgtagagggatttatttcggaggttcctggtcatgaaatcgattttagctcttgttcttggatttattcttggatattttaaagttactggaattctaggcttcatggttttcataccctttcagtacatttccggccagttttactgtacccagtttaaggttccagactaccttatggataagggagaaatgtttacaactcaatgcttaccctcttttgggttatttttggtatgtgtgtaaattttatgatttttttagatggtttggatcataacctacacaatgtttcacggctaagactcaataatttattttaagcataaatatatttataaatattaattttttaagttgagaatttcttcttaaacttgttgtcacactcgaatttcttctgatagtacctgagcgcctggtcgtttgcatttaacgcaattgtgagctcaggatagttcatataagtgtaatgtttgaacccagaatcctcctggatcatgagagctattttttctagtgccaactcaatttcgttttgagacccgaatagaacaagaacccgttcctgtaccggaccatcctcataagtctgtttaataaccctgatattagctccagtcatgtccattatttgtttgaagtacttgttccgatccatggtgaatctgagtgattctggaatcagaacttcaatttcaagccttattttagaaggttcaattcttacagattcatctattaagagccttataacctcctcctgaatagccctgtagagaggcctgagaaccttaagaatattgtagagtttgccgttgattagtagaactcccttattattagagccagggaaatgtattcttttagtagtgactgatacatttacactaaattcctgttgtagagcctggacccgatgtccgttggatccgaaaaaagaacctataactccatgagacgctagaagctttaagaatgatcttctgggactcttctgagagaacatctgcgccaacgtgaagtcgtaagttgattcatttccactatccttcaggaacgcctcatatctcaggttggagtcaacgttatacttttcatgcatcgtcattaccatgttctttatcattttctggagcgtatcaattttgttgtagatgatatgctctccataggttagttctttagaaaaatctttagaaaccctttcactcctgtcatcttgaaaatctaaagttaattttaaaattatggaactaacctggtctagttattatcatttgattactatcgggactacttatagtcaggtcataatagttttcatttgggtttcctccaagagcacttttgatggtatcaatgattccaaactgataagccagactagattcaaagttgtcaagtttatctccaaataccaacagttgactgtccattgtccttacatagttcatgtcgtttccatcaacttcagttttagcgagtgaccgggtgtatgacatgtctccgtttgtcattaagtcgatggcgtcgtcggcatgaatcatagaagacttgttcgtatcctcatttttagacgagaaattcatataatagctatctaaaacatttttgtattaggattggacctacttttggagtttatatcgtaggcttccttattcaaattcgtcatgttttctccatggtaatccgattttgaaagaatgactaaagaattttaaactaaaattacttactatttgaaatcccttcatttataaagtcttgtatatctctgttttggtcctaaaatcaattttaggtttaaaaaatgtaccggttctgtcttatttgagttattcgaggttctttgtgggttttccattatctcaacaattctttatcttcaaaaataattatttaaacatcaaatattaaactgttatactgttagttctttattataaatgttttaacacagtatactggtcttttaagcttgaaattttggtttttaacaattattttacacttactttacaggtattttacaagttatgttacacaaatgtattagattattattcaaattattgaaaatctattgtacagttttgaaattatactaaatctactttacacattgtaaagaggtttgttatactgcatttattgtctttggatcttttttcctttaacaaataaaagcttgagaaatactacattaacttacacactaaacttaaatttagtaaaaatcatagaagatgggacatttagttagaattaaaatgtctagatgtaagaggactgacacaacctgttgaagtttgaaatgctatgttacaaaaagttatggaaatctgcaaaataaagacgcaattttttgagccaaattactgatgtgtagattagttggaagtagttaagagaaattgaacgtgtaatgtaataataaatgtgtcgacatttttgtcataatgctggaaattaaaagatcaaaaacaacatgtgcgtctcagacgttggagccaccgaataatataataacaccaaatacagggagattacgtgaattttcagtgggaaatatatgcaataaatgattttgtcaaaagttggtatttctgtgtagaatctcaggatagagaaattggagagttcaaatgaggttaatcaagagtatatttaaatgaaaaaatataatacgtggaaaattatagagagaaaaattaaaataacaggtaaaataatcaaataaaaaaagcggtaccggtagggatcgaacctacgaccttgtggttaacagccacacgctctaaccagctgagctacggaaccgacactccgaagtcgatttaatatttgatttaatttatatatagagaattgtacacaaataaaagattctagaggttgaatattatttaaaacaaaaatataaaaatgaaggtaaaatgaatctaggggttattttattaaatctaaatgttaggctgttgtgttatttatctacatcagtccagccggtgcgatgccttcttcgctctttaggtcttactacatgtataatcttaatatttttaattgcttacctttttcgtccagcgattcatttgaaagggcctcatatactccaggatcatacacttccttgctgtagtttgagcagtaccctttgatgtcaaaaacggccataattttctacttttatatgttaatttaatgtgtataaattttacctctaaaaggtatggattcttgaattcaagtgattcctccaggttctggttagtcgtaactccctgctctgttatcttcttcagtcgttctatttcttcctgattattaaattataaaaagtattaaaatttaccaataatttaggcggcatctccacatctgttacttccggtactttgtacccatcttcgggctccttactcatttttataccatcaagatttaaacatattctttataataaatatacacggttataaaatacattatattacatgtatagagtgaaaagtaaattattgtgtttatgttttatttaactctctgaaaaatagttatggtggttaacctactcttattcttatattggtggaaggcttgttcttccttgccattttttcttctaatttcttggccttttcgacgctaatctctgactcttctccgctctaatgatacaaattagtaataatttgttttctaggtaaataattaactactgattcggttctgtatgctctggccatcttattatatgcaaattcagattcagacctctcttttatcacagcttctcttagttttgatgggagcgagaagttcttggagtagtcaaccaggtttaccacggctttaatcagattttgaaagtagccggattttttacataaagtaaagcaacacgagagagtgggactacaacatagttaattatttttaacaattttgattagtgtgtaacgtacctttttactaattgtgcgtctcccggtaccacatcagacaagtaaaaatactccaagtagttgtaaaatggctcaaacaggtgcaaaacatgatttgcaaactgaaccatagccttatcatttgaactaacatatcctctaaaacagtcaggtaggtctttactttcatataagtgggagaacaacaactaagcatttatttaatttaatttatcatttgcactaaatatttttatataaatacataccaaatgaggatattgtgaaataaacaatttatttttaacttttctacaaactgcgaataacaattgatcctgaaaatttttgctggatattaaagttaccagagattcaaatcttacatcaaaagtaacagtgtcctttgctgtatgaaagaatctaatgacattttcgtgccagaagcactgtctctttacaaactaaagccatgtttataacacttgacttacttgaaagttaatcaatagccagttacaacttgttcttccggatgcatacatctcaaattcatgccatcctttctcaatcagagcggtctggtcacgctctatatattcaaagttctcttctaacaccggtaaggctgtgttacacctaaaatattgtctaaacaaaacacatacagttgttctgcccattttttgttacgatcgtatccataatatgcataaagacctaataaagcaaccagaaccaagaaataggcgtaatttcttctaaaatttcttggaaactcctttgagagtggttctgagatctttgagaatattttccaaatttttgagggttttattccgcctaggctttctaaaaaaatttataattatgaaggattagggataaatatcattttcctcacctagtgggtttgttacatcagattgcggttttctatattgaaaactcgttgtaggttctggcctatcatcatttgactggctaaaaaacctatctttaagctctacaatattagttaatttacttgtactaaaatacctgagaatgaaggaaaggataaagagtttacacggccaacactggaaagtgtaagcaaaaggattggaataatgagcgttaatttacagtaacgtttcattttatataaacatcattatagatacacaaatcgacaaattaaaaaataggtttataaattataataaagttcatgtgtaaagatctcgagcaccatagataaggaattaaaaatggaaataagaaaataaccgaggtaaaatacaattaaaatgattttaaaatgatttttaaatttatttataatccatctggtctataatcccactgtgtattgtccagtgggcacacacgtctggttttgagccatgtagagatacaatgtagatgaaatgcgtgaccgcaagctccccaactaatagtacatcctggttgctctgtaatatcttgagattctttgttatgtttggcctaaattatattctaaatcacaacactgtattcatacctggcagtctaaacagtgatccataatatgattcctacaaatagcgcaattatctactgacattctccatgaccacaccgccacggccgaccatctttttacaacaaaccttggtcttcttattctgattcccatctactgagcatctgtttattccacattaaatttgaaattttgatcccaaatggttaattataaataaatttaaaataatttcacttcattattaaaatgtataatctataaaatctaatttcataccccagaggagagtcaaaaatcttacacataaaatgttttaaattaaaaacattttgtgacacaaattataaaaatgatcgtatataaattatagatgtattaaaaatgtacaataaggtgttaaaggtctgtaattatgatacttctaagcctctgatgccggatagggcactgataagaagtttaatggcttataactttcgagataaccactattcctctgaaaactcaactaaatctaaaaacaatcatgacaaaaactctactgtacgtcacgaatctccatctcacggaaatttaaagataaggagtaaagtaaggtcaatggcttttaattctcatggaactagactgtacattgcaaccagagattcagtttatctgtttaacgttcaatctatggctgtagaacatacccttcatttaaaaacgacaactttaatcgcacatccaaaacacccaaatatttttgctcttctagttcaggtaattctaaaattttattatatttttagggctcttcccactctaagccttctgttaaagttttcgatgctaaatacactgaagccaggagttataaggtggatttaaccttaatgtgtgtgataacaagcgcatttaatgagaactggtacaccggatgctggtccctggatgggaagtatatggctctcgtggatcgagaggatactctacaagtggtagagtttggaaattcatataaagatatgcaattgaaggaaaactcttcggtaaaacttgattctgaagcctatggaataatttataccaaggattacttggtgatacacagagtggatgggcatttacagattttttctcttgatttgaatgattcttttgtagaaagggctcactcacacatagtgacagcctctgcatttgattctaatagaaaccttctagccactggaggaagcgatcatgttgtaaacctcttcgacgttgactcacgaatggtttgtataaccacatttcccagacttgaaggccaggtatctagcttatccttctcctctaacggagcactgctggcttggggaacaaaagactctgcaccttgtcccatcgatgatttaagtgtgattgattcaaccttggaatccagtacctcttcctctaaggaaaccgaagataaacctccacagtactatctcacaatcgcgggcgtagacccttcagaaatatattaccaacataacacaccctctcctgttgcccatgttgcattttctcccaataaaccgcttttggcctatgcctgcgattacgactcattcccaagagggggcaagagttcctcccacgggaatctggtcggatttttacatttaccattttaaaatgttttttttaattttttcatgttatttaatttattttatacattcggattctcacacatcaaatattttctcaagtattttatagtctaatgtgtaaacgctttaggactcaattccaacccagtttcatttcgaccaaaggaaataaccttggaatccttgtcactgtatttatttatttatagtttacatcattaaatatcagaaatgatgagaagataataacgaaatcaaaaccaatcgacatcaactcggaactttcagcagtttccaggaaaacatacaaaaatctaccgtataatttagaatattattatttgagaatattattaatcaatgttaggaaaccagagagtgttaagcttacacatgatgtggcatctgaaatcgaacgcctaagaaatattgacgtttgtttgcttattttcatgaaatttagtttgaaccagtgacaaaacctacagtggaaccagaattgaactataaagatggtaaatatcaaatattaatggaatgtgtaggaatacatatcaagaaaccactttctgaacctgatttggatttgaaaaggtaaatatttacagtatataataattaaattaaaagtcataatgagttttcaatagaattgatgactatttgataatttacaagaaccctttggtgtatataccgaccattcttgtcttttcagtatctctaccgtcattttcatacttgtaagttttgtatttggaaatcaattggtagtctggtgtacggaagagaagtttcaaggtattcaatcagagggataacatccttcgtgttatactttctaatatacaacacacttaaaagtgtgtatataataggaatagtattggcaattatattttccttcttatcattcaggtttgtgaattcaataaattcataaattagtatcgcattaaaaccactcaagtattttaattttggaccaaggagtaagtttagaattttataaaaatcacttaggtgtaagaaaggaacctattggatgggtatttttaaaataaaagataaattattaatagattttcgtgattctgttctcatgtgtagtattctcaaacttggtttacaagatcttattcgtcatcctacagttaattacagggagttttacagcgcctagattcctaagagcaatattcccagtgttttatctccttttcctgactgttgtatcgggggtacgatgatagatattcagatgtgtatattaattttcaggttgttctgggcctattaatagttgtagtaccaactaaatacgcccaaaactcagtgttcgcattatcttgctcgtatatacttatgtctggtgagaacagcttggattttacagtttcactcttaggtgtatcgtacttgaatgacttcttggtgtataatttcacctcaaatctgaggccactgcaatttgatatgagtttgtcacattatacttatatccaataattaacttttttagctcaatttttcgatagtaacgtaacactttctacttcacattttctaattgttcttgggacactgcttgtgtcaagtgtcacaaccttccttaatagtaataaatatttaaagtaattttttgttaaaaattttatattaaatatttaattcatgtttattccgatttttgttaaccttcctctttaattcgttaatttcattatgtttggaatcgcctttagaagtttagtgaggagatctgaagtttcagtttcaaaatcatttggaagtctaaatgactgcttcaaactatttgaaacaaataattcagttccaactcaagagctatatgacgcttttaagtatctagcttcagataccacagtgagaaaaaacgcaataaaggatgaaagatatccttcaatgcttaagcagttagatacacgtttgagtacattaaattcgtcatatttggggaattttgcactcagacttttactactttcacagtcgaatagctatttggaaaacgaccgtaatgacatgaatgctgaacaaacaaaaaaagtattagagaaaatagcaacaactatgattgataagggaggacatgtaaaggagataactcaagtagcatatgcagcggctagtttgggagtggtaaatcatccgattttcgattatgaaaaacaacagcttacccttaacatagatttggcaactccagactcgcttaacctgtcactacagacagcatttaagagaggaacgagagatagagtttatctggcacttttgtgtgaaaaactcactgaactcactgataggttcacttcaaacgatgtagttatgacactaagatccctatcaaaaacagggtaattaaaataattaaatagtgtatgtttagattattgaaggggtttctattacgtagactttttacactaatgatggataatcttgaccaatttacggagactcaacttatccagtcctcctacaggctggcaacactcaagttctttacttcgaataattttaagactgttttcaacgttcttaagcctaaaattgaagaaatgccatttcacctaaaagttgaggtagttttaaataaattttattttatttagttacttgctgcaagctgtttgagtaatgttgagactgataacgaggatatgcttaacttgttggattctataaaaattgacaaggattacgatcttttaaacttatcagattacatatatgcatcagcttattacaaaagatacggtaacacttggataatgatatttgtctttaggagatcagctacaaaaggcagtttcaaacatgactagcaaaacaccatttatagcaaggtaaccttaaatcaataaatatgaaattaggaaatacgctttacttgcaaaagaagcgcttgacacaatttccctagagtcaaatctgaagataaacctatcagattcgtggaaggaggcactggagaactttggtaatttcttttaaatataaaaatgtgtagaaagaacagaaatggagaagatggaaaaccaacctatttaccaggaatccaaaaaaattctagaatctactgggaaattcaaattcttacagaaagttggaccttttctggtatcatttgttgacgatgagagaaaattatgtattgatgtggaacacagcaatcttataagcaatttatctttgaaattaaggttagattcaatttttgtgaattataataatttttaacctaggaaccttaatgcacttggatataaggcagccgtagttagatattgggaatggagaagattaaaaacagaggtagattttcatatgtttttataaattatttttagagtgctcaggccagttatatatctaaattactccagagcttttcagaataacctgaaatattcactagtgctttaaattttgaaattaattatggtttctgaatctttgaccagagatagagtacgtataatataataatttaatatatgttatatgttagaagaatgagctaaagtacgccttcagattgtatgataaggacggggatggaaaactctctttcaatacctttaaaactctacttaaatcgataggaatccaccttactaagggtgaactagaatttctaaagtacggtaagatttatataaaaatgtgtaagtaaactattgtgaaatagaggaaggtgtcagaggagggtttagtctcgaaaatttatatgctcttggggaatctttttatacaaattctgttataaaggaaaaggttatggaatctctaaaagaacatttcaataattccacacatttggacaaatatgagcttaaaaaactactaattaaactgggtatcacgcatcacaaaaatcatcttttagggaagcaagtaagggcaagtgagcgggaaatcgaatcgttttttaaattttatataaatgatcaagtatcaaaggatctaacaattgaaagattcgttgatgagtaagtttcaatatgctgatataatggatagggcattaatggaatcttaaataataaataattcaaaacatgaaagacaataaataatggtttaatattgactactttggcatagataatgtgattctgtgaatatctgagattatgtagcgagtgcatatgtatgtgtagttaatgtgttagaaggtttgtatttagggttggatcatgcgttatctgagtgcaggtattattggataattgaattgatgggcatttgagtttgaatcaggttgatgtgtcagattgagttgaattgagccctatgaaaagtagggtttcccatgtcaattatgatttgtgtgctttagtcacaatttttgagagttttgtttcagattattaaaacttaataaatctcgtgacccattaagtaataagactaaacaaaaatgtcaggacgtggaaagggtggaaaaggtttaggaaagggtggagctaagcgccatcgtaaggtattgcgtgacaacattcaaggtgttactaaaccagccataaggaggttggcacgtaggggtggtgtaaagcgtatatcaggtttgatatatgaggaagtgagaggcgttttgaaggttttccttgagaacgttgttaaggattccgttacctacactgagcacgcccgtaggaagacagtcactgccatggacgttgtctattcacttaagagacaaggaagaaccctttacggtttcggtggttaaactttttaacctcttgtcactattgtaatcccaatttaatattcgcccggattaatttccaacccaggcttcacttgaagccataatcatacactaattttttatcattattcatatatttattatcttacattttttacaccattatattctcatttatcattattaatatttaatgaatttggtacattttaatttatttaaaataatttttttgttttatataatttttaattttttattttgttttaacactgtagaatcgtacaaatttcatcatgctaatcatcactatttgaatgtacgttttactcattattcaccccttgattaccatttattttatagaataattgtttaaattttaacacacttttaaaagtatccgatactcggaagaatcctttcaattatcgcgacacattctctaatgattttaacttgtacaatataaattccgaaaatgaaaatattttaaataaacaagaccaaaatccagtccagaggactgatttaaaagggaaaaagttgacaatagtttgtaactggaagtgttatttgaacactaaattatcgaacgaaatgataaatttgtatggaagtcttaaatttccagagaatatagaggtaaatgactttattttaacagtttataggttatcacttcaccttcctcaatccatttggcttcaatggtctcacaatataaaggatttggaagcaggtgtaaaccctgtagtcaaaacgttagtcattactctaaaagttttggaccatataccggagagataacagcaggaatgctaaaggttaggtttctggtttaaaaaattacttaggatttgggcgtaaactggacgattgtgggtcacagcgagtgtgaaacacccgggaaccacagcgtattatagtaaccaaataaagctttttaggataaaaacaatgaagctataaataggaaggttgtaaatgcgttgaattcagggctcaatgtaattttatgtattggttcgttcgacataatgttacacacctgtaggggaacctaaaggatttaattcagatttgtcaagttatctctccaaacaattggaggtaaaaattggaattgtaatgaagtttaggaatttttgaaagatgtaaatttaaccggggaacaaagactagtagtggcatatgagccatactactcaatagggacggataaaccggcagacccggaattagtgaataaagtgatagaagatttgaaaaaatcactgggagataaagtcaaaggagttaaatttatctacggaggctcagttaatgaagaaaatgcacatcggtatatcaaaaagaggaatatcgatggaatcatggttggaagggttgcacataatgaaaagttcgtggaaataattgaaaattttgtaaaattgactactttggcatagataatgtgattctgtgaatatctgagattatgtagcgagtgcatatgtatgtgtagttaatgtgttagaaggtttgtatttagggttggatcatgcgttatctgagtgcaggtattattggataattgaattgatgggcatttgagtttgaatcaggttgatgtgtcagattgagttgaattgagccctatgaaaagtagggtttcccatgtcaattatgatttgtgtgctttagtcacaatttttgagagttttgtttcagattattaaaacttaataaatctcgtgacccattaagtaataagactaaacaaaaatgtcaggacgtggaaagggtggaaaaggtttaggaaagggtggagctaagcgccatcgtaaggtattgcgtgacaacattcaaggtgttactaaaccagccataaggaggttggcacgtaggggtggtgtaaagcgtatatcaggtttgatatatgaggaagtgagaggcgttttgaaggttttccttgagaacgttgttaaggattccgttacctacactgagcacgcccgtaggaagacagtcactgccatggacgttgtctattcacttaagagacaaggaagaaccctttacggtttcggtggttaaactttttaacctcttgtcactattgtaatcccaatttaatattcgcccggattaatttccaacccaggcttcacttgaagccataatcatacactaattttttaccaccattcatatatttattatcttacattttgtatatatttgttaaatattttatataagtcgccctatatatttcaatttatataatgtgtaattatatttttaatacgattgaacgtctacgtgttgcctcctcttttgatttttcctataaacaccatctattgattcagcgttggtggtgaggcactgcaaaaatgcttggtctgtccttgaaacagtcttctcattaggggaaggaatatggtccctttcacgcttacagacctccacatctacttgatttttatcctctaactcacttaagtcaacagcgaagtcagtagtaatgcaatcctggcgattgacacccccgttgttcctgtaatttggatttacaggattccagaaactacgttctccagatcccgacccaccgttgttaccgtagctgtttccatcattgccgctaccgccgtttggattcttggggaacttgcggttgttactgttggaactgtcgttactgttgttcctgagcttaagagaatggtcaaaaacagtaggaagaccagccaaccaaggatgagcaagagcatctgaagcagaagaaatcctcttccgcttatcaaagcttagcaaacgcttgcagaggtcacgtgctagaggaaactcacctaaaggaggagtgttaaagtctataccgttggcctcagctgctgccaaaactgcgtggctggctttagcatcgtacatcttgtccattgatatcggaggaataccggtcatcagaatgtacaaaacaatcccaatagaccacatgtcagaagcagtggaatactcatcgccccttagaatttcaggagctaaataaccataggtaccaactaaccttctcttcccattgacaacctcagtcttatcagcagtagggcagtctgtcattttgcaggtatcaaagtcaattaaggccaactcgtacctctcagcaacgggtaaaactgacctcgttgggttcctaaacatgatgttctcaggcttaatgtccctgtgaagcaagttcatcgagtgtaaagcctccgcagcaagcagaatctgcctgaaaatatacttacaaatgtcctcagggatagccttctccttaagcaagtactcaaacagctcacctccaatgaatttctcagtaacaatgtagaaactggtttcggactcccaaatctggtcaattctcattaaattgggcattggaggcatatttaacaacttctcgcacagagcgcgccagttgttaagactatccaccccgggagggattcgggatttagaaataatcttaagaatcttaggctctccagtcttgcgatcaattatatcacgaagcaatggccgtgaagacgattttttattggaatctgcacaaatacggagctctgctcctatatagtagtagcttgatagcttactccccgctgataacttcctgatttttttgtgttcaggggttcggagagcgtcaattgacaccctctccaagttcctagaatcaccctcattgtttaccacctttggtgacagcttctcatcctggtccgatttcgacccttcattgtatttgctatccctcaaatgtgccttcgtcgcatccaatatcgctccttgttgcattatattacaaatttaaaattttctaaaccaacgttatttacacattggaacttacttggaacaattcaacgaattatggtacagcgatgccttataagaaaaatactttactggtatttaaatatttataaattaactgcatcgataaatttaaaattttaagtttatacacaaagggtgtaacacaatcatttcaaatgattctacgatttttcgtcaagaatatctctactaaaatatttagtaaaaaaatctcatgaataaataacagaatccattttaatccatataatggttaataaaataataacctcaaattttcgacatgcttcgcgtccatcttttaggcatgcgatattttgtgattcgtagtcgagttcaatattgcaggacggtgcaaacaattggcgaatatttgtgtagactcaggtcaaatacattttagatttgacattactattccaaatttgctgttttataacatatgtttacataatggcctgaattacagtgtatgatatcctattcactgctttccagatttatgggtgttttaaaacatgttagtggagttattttcagccttccatgaaagaaaatcatttaaaatgctctttataagtcagatcacctatcattcttttactaatttttagatctaagccttacaatccatatcttaagtgcggtcgattacctaggtatatcatcacataattccctgatattttagatttaaatccctcaaatttatactaatttagttttccattttgaataaaatgtgtaagatagaatcaaaatttcgttcatattaatttgatacacgtggtattcttataatattatagaaatcaacgtattaaatacattaaagaccattatttttaatttatattcttataaaaatatctttccactagaatacacattaaaagggtgatgaatatgggtttgaaaatcaatataaaaatgagttcatttacacattatacttttaaaattaaaatcgtgaataattagtcggattaaggttcgaactcagaatcaaatatcaaatcaaatgggtcgccagtccaggaacgttttaaaagatttgcaaagtcctcgtagggaatatatgttccgttacttgaggcttcagatatcattaaactaagctcattttctgaaatgtcagctcctaataatggtttagcacatataacaagtacctatatcattaactgccgattttaggctctctaatgtgattttccctgaaattacttatagaatattaaaaggctacctgttccatcctggagctgattaaatattttctctatctctttcgagttgtatcgagtgtgtattctagaaactataagggttttaaagtcagttggagttagcgtgtcattttcatcctttccaacctctttaaataactcctttatctaaattcaatatatctcaagataactaacattttctgaggatgggttaagcctaagagccttaaaagccgcttgacattcaaaaaaatcaattttattatcattattcttgtcaaataatgaaaaagcttcctccacctccgcttctagagctctattcataatattcttgcgcagtttgttcacatctcctgggctaaactcttgatctgaatcttcaaattcaggatcattcacgtaatcaacaagtgtactggcggttgatgagatttcattactcagagactgtaattcgtattccattttgaaaactcacgtaataaaagtgtaatgaaaaaacgaaaattgtgttaaaatgagggaaatagaattctattacgaaaatcaacaaatgtttataaaaattagcgaaaataagggacacataaaaaatatcgactaacacattatggtgttgaatgaaaaaagaaaaagtggtaagttaaaatcacgtaaaacaaatgattatgaaaacggggtaaaaattaaaaaactaaaaatataattttaagaaaatatctttaaaaataaaacaacaaaattttaaaaaaatcaaagatttcagtgtataatatttcaaaacctataattcaggtagaagactaagaaataaattaaaggtagggattgtggatgaatataaagtagaataatttgaaaagtgtatgacaatgtatagtaaagtagatgtggttaagaaacacaaatgttaaaatagggaatttcaagtataatatcacttcataattggtgtaaaacgattaataaaaaatgtaagaatataagaagtgattttcctgttctatttagagctgctttagtttatacctcatacccccatttaaggggttatggcgaaggttatattgtatcattaattgataattgacacatttatcacttaattaaattaattatatgttatttattatttcaaactacactttttaggattcccttcttatagtagattgtcttgataaaatatggtacggttttatttttagattcttccatacacaactaacccttatctcactaattccatcatattatttattcataaatattgcttaaatataattcttttagggtcgtggtcccaagaaacatatgaagcgtattaacgctccgtcccactggatgttggacaagcttacgggaaggtatgccccgaaggcttcccccggcccacataaatcgcgagaatgtttacctcttctagttttacttagaaatcgtctgaaatatgcccttacctacgatgaagtaaaattaatagtaaagcagaggctggtaaaggttgacgggaaggtcaggactgatatcacatacccaactggatttatggatgttgtctccctcgataagacgaatgagaagtttagaatgctttatgacactaagggtcgcttctgtcctcacaaaatcactgacgaggaggccacatacaagctttgtagagtaaagaagacttttctgggtccaaaggaggttaatctggctgtaacccacgacggaaggacctttaggtgtgtccaccccgaggtaaaggctggagactccctgagagttgaagtttccactggaaaagtcctggaatttcttaaatttgagcctggaaacttagtgatgataactggtggtcacaacgtaggcagagttggcactgtagttagtaaggagaaacacccaggaagctttgacctcgttcacgtcaaggactcccaggacaataccttctcaacaagaagctcaaatgtgtttgtaattggcgttgggaccaagagctacgtctcacttccttacgaaaggggtttgagaaaaaccataattgaacagaggaacgagagacttgcaaagtcattacgccactaatttactatactgtactatatatgtattctagataaatactgattgtgttacaaaattatagttctacatggacagtccctggagtttccatgggcacttcaaaggttagcccgtaatcggcaggatgctcaagaacctcctggaaatcagtaacagaagatctagaaagctcatctgagtgttttttccataattcacgagttaaatctaaggaaatttaagataaaaaagaataaatcttactggaagagccgacgattgaagtgacatcgtcgtacatagtgaagctatcaaactcttcctcctccttataaacatcctcaagttcatttctggtcaaataaccatctccgttcttgtcaaactgcttaaagtcgttcgaagattgaacttcatcctcaccgtcctctaatttcaaagtcaaaaacttttacttaccatttcggtattttttgtactcttcataagaaatcctaccatcatgatcagaatcgtgggcctaagaaagttatttgtataaacttaataaatttataggcaaacctcaagaacatcatccacttccaattttaaaagctcaggactcctggaagggttaataaggtcaccgagttcggcaagatcaagaaagccgtccttgttcttatcagccaccttgaatctccttactaaaggttctttgttatttaaagcatcctcttctccaacctcgctcgagaaggctgctaataactcatctaaactcacgtttccgtccttgtccttatctattgtttccatttcattggccagctgcctatccgatatgactttgctcaactttgaactgaaagagtccaattcagacttactcagaactccatcagaattcaaatcaattttatcaaacaactgtagcatatggtgtgtataatcgaccttgcttttaccgttttcgtccaaaacgtcggattttaagtcattttcaaaggtgacagagcaccaacatttaaaaaaaatatatatagaaataactaaagttaattttaactccatttaaataaaattataagtaagcgaacaagttttttacaaacaccacccacacatcaagttgctaggaatcaacaccaaaaatcatacatgaggttacaaaaaaattaaaaataatttaaagatctggattctatgtataatctgttaaatatactagaaagatagaaattatgtaaatgatgtgtaaaatttaaagtgcgaaacattatatataatgtttaatattggttttgaaatccatgatagtgtccaataaggcacgcttaatggtttccccaaaccatggttaaaatttgtcccatttcctggccaaattgtggccagaataccgaatcctagtgtcgttatatccaactgataatttataaaacataaaattaccattattatctccacaatccatccttatatgatcattcagtattaacgtatcttcttacatcaacattcagatccctcactatactttgatcccctcgtgtaaatgtctctattgcccaaaaaagaattggatttctgatttcccttgtaggaacaaaatctggaggtaccaatccatatctaattcttgcttcattgtaaccaacccccgttttcttgattattaaacgtaaaatttcaattattattgtatgaactgcgattaatccgctactttgtctattattaactacgtaatttgttactgccatataactaaatgattccattatgctgttgcaaaggaccagcaaaacagccattatcataactaagaatattttgccaactatcattctaaaaattaacacttctgtatgaattgccattaatgataacaaaaatgccatgacttgaggaataattaatatccaaaataattcgtattgccatgtccacgacttaaaaccactcacaaaatactcagttagaaatactgttaatgaaccacaaactctaaatggaacaacaatcaagtttacaactatagccctgtcataatctaatactgcataaggaatcacatgtggatatagaaattcgaatacaagcaacgttgataaagtcataataattggggaactcattattaccaagagactaaaatatccatgttgaagttcttcatactgtaattttcttaccaaacttattttatcatttttctttatttttttaattttatcttgaggaattttattcatcatttgttcaaataatgtattaaaattttgtatttcagctagaattgcatcagctatatttattatttggtcccttcgctcctttacttccccttgcgatttttttggtttgctaattatgtattccatgagttcatctaacaacaaagtgaatttaactctaacttcatcaagttttagatcttgacgaattctttcattttccataatttcaatcacttcctcaatggtgttaaagacagtttctagttctctgaatcccgtatgggcgttatttatttcttctagaactttttttaataaattatcaattccagaaggtacttttagcttttccattttttctctattatttataaagtcttgggaggcttccttgatgaatgttttcattttttctcttttatctgcatcatctataattaactcgtataatttttgatcaaatttatctatcgaacttaatttcggaactgtttttttagcttctgtttttaagcccttattagttgtgtttttttcttctaattctttaagttcaagcaacagcccttctagttgcctaaagaatgatcttatacttttttctgcttttttaaatgataagaatgtttcaacagattcgtttaacgtggaaataaaagaatttatatttgaacaaaactcattaaaagaatctatcaagatattgattttaattccgtatgatagattagattcatatcctttgaattctaaaaaaaatatataataagaccagagaaatagtgaaactactgttaaaacaacagaaattataaattgaatttgaatgattttcaatgattggtccttataaatcacatccaatatggtctgaattatggtaacaactacacaggacatatcgttggatagtctgataaatgtcatgtgctggggagcaagagagatgattgaactataaacatgaccaaaaacaagggcatccatatttgaataaaggtaaaggatgaaacctaggtcatctggtattaacatatcataagccattagtattctttcaattgacatgattgttaatcctcctaaagttaaaaaacgatcgcctaaaccaagcacaagcatactaaattcttttgatgcaaatcccaggaaagtaaaaacaactctatatgtgttcaatttgctaagaaaatgtccaacattttcttgattaatatttaatccgacttgaaaatggcttgataatgctttgacttgttcctggtgtaaattaatacttattataactattgagagtattaattttcctataagttcgttccttcttaattcttttgtattttctgaatcgtctgattctgataattgttcccccgtcatattggtgatgtcctgtgccttataaacgatgtcgtgaataatctgcaatcacatgtgtagtagggatgaatcataaaaatgcaacacaaactcaaatttttatcaaataatgataaatttaatatataaaatcatgaatttatgtagaatacgtttattaagttgatcgttattttgtgattatcgaattaatcacatttcactgcgaatttttagatcccgaatggggaaataataacgaagaatttatgtttagacagttatctttgttacaattctgacaggtaaatactttcatcatattaagtaaaactcatttagaacacctattggtattcgtgtatgaactgagttatctataactattaataattattaaaaaaggggtataagtaatattacctattgatgagatatgaaaatttaaaatatactcagtacaacaatattatattgtataatattttgatcattaatcatttcatttctagtgatttaacaagtgaatacatgtttataatcaacagtaattataaatcaacatgtcacataacaaatttgattaacctagtatataaaatgtttatttgcataaaattattgaaaatgatttgtcaattgataagaatagttataaacagttttttagaggtgaattgtttacggattcgaattccttccataaattgtacaagtacatggtgaacagcccgtcggaattttcatagtaagaagtctcttacaactcctcagagtaagaagcatcttcttgctcagtgtctttgtgttgttgtgagtagagcttggcaacaactggactgcacacggactcgaggtgtgagagtttatccttatactcctgagcttcttcgtcaggatgtgatcccatccagttactggcgtcatcaagctcctccttaagcttagatacttcagatttcgaaagctttgatgacactgagtcctccttcaaggtgcgcctcatgctgtcgatgtagttttccaaagactgcttggacatgattttgtccgccacctgcttgtccttctctgcgttctcttctgcatctctgaccatacgctcaatttcctcctgactcaatcttccgctctttggttcaatcaccaagttctttgtgtttccacttcccttttcttgggctgtaacggagaggatgccgttggtatcaatgttgaaggtgacttcaatttggggcactccttttggagctggtgggattccagtaaggtcaaatttacctaaacaatgcattaacaaatatttggaaaggatgttaaatgtgtatggggcgtggccttaatagtgcagtggtgtagtaacaaacctagtggcacattatccttagttagaggtctttcgccctgaaacacattgattgtaacgacagtctggttatcagagtatgtactgaagacttgtgacttgtttgctgggatcatagtattcctctcaataatcttgctcataactcctccaacagtttcaatacctacaaatttattgtaaacaactgtataataattaagtatattttgatgaataaaaagttaccaagtgacagaggacaaacgtccaatagtaataaatcttgggatgattcacctgttaagataccaccttgcatggcggcaccgtaggcaacggcttcatctgcattaatgctaacgtcgggctccttgttaaagtagtccttgatcatttccctgacctttggaatcctggttgagccaccgaccagaacaatctggttaatatcagattttgtcattttggcctccttgaggacggacttgacagtgtccatggtcttgtcaaacaggtcctcgttaagagcctcgaacttggcacgagttaaggtctcgctaaagtccttgccttccaaaaggtcctcaatctcaactgtgacttcagtcttggttgagagttgcctcttagcggcttcgacttcctttctaagcttctggagggctctcttgtcatccctgatattgaggccggttttctgcttgaagagcttaatgaagtggtccatgactctgcggtcaaagtcttctcctcccaagtgtgtgtctccgcccgtcgcaatgacttcaaagacaccgctgtcgaggctcaaaagtgatacgtcgaaggtaccacctccgaggtcgtagactaggatgttactctcctcgttggtcttgtcaataccgtaggctattgctgctgctgttggctcattaatgatcctgatgacatctaggcctgcaattgttcctgcgtccttcgtggactgcctctgagagtcgttgaagtaggctgggactgtgataattgccttcttgacctccttgcctaaataggcctctgccagtgatttcatacgtgacaacaccatcgcgctaatttcctcaggtgcatactccttcacctcagtatcgtttacacgaacatagggcctgttcttcttattaatgattgtgtaaggaaggttcttcatgtcgttttggacgtctgggtcgtggaactcacgtcctattaaacgttttacgtcaaacactgtcttctcggcgtgaacagtagcctcatttttggcagccattcctatatacataatacaccactacactataatttaatataaatgttatacggttacactaatagtgtattaaatagattttgtaatagttaccgattttatgatggccatcaacgaatgatacgtatgagggagtgattctgtctccgttttcgtctgcgatgatctctacgcgaccattcttatacacgcccacgcaactgaaggtggtacccaagtcgataccgataactgggccctcgactaaaaaataattagggtgacattttgaaaaaacttacttcttccggtggtttcgggtttacatgaggtaagtttaacaaaaagaaggaaaatgacgaatgagacaaagctctgtctcatcttgaaagagatattcattttattatacgatatattaaaaaacgacaaaagaagagtacaagtctttagtaatattgttaatatataatccgaagtttgttaagttttagatctagggtttcaaatttctgatagatattgtagaatatgatgggaacaaatacatatcttaaaatatattatggaaactaataaatcgtattttaaatagacacgatttttttaatattacaatgagctctaaaaataatataaaatgcagaatcggatgtgatcgttggtgtactatgttaatcactatatccccaccaatgaaaaattactctcgagctacaatttcgcctttaacccccaaatcttgtacacatctatccacttacattatgtggacctcaaaaacatcatcttcttttattttacccctgaaattaacttctcatctcaacggtgtataattccgcagcagatactatttagaagtttggttactcctcataacaaccactttttcttaataaacacacaattttttcacttttattaattatatttttactttttcacaacacaaatggaccaaatacttacttatctatctaacaagttatgtatgccgtgaaagaaatttttcaaaaattaaagcttttttgcgcacggttcgtactctttaaagtgactacaacattttaaaagttcagacgatttatccttttcatttgactccagattctcggttaaaaaggtttcgtagtagttcctcaagcagtttgaaagatcctcctcgacttttgaacaccagacttccttgtcttcatcttttacagaattatcagtcttttctggttcagctttctttacctctttccccttttcatacgagtttgtgttggatgttgagtagtcgtttacaaactcagttgatagaactatcttgtgattttccatcatcataactaaagatggttcttaaaattattaatttgaattcatttccagaatactaaagtatcaaacttgttactattttaacgttttattttggaaagaatctttgagattaattatatcatgttaaaatgattgtttaattattttagggtatatttataaaaataagaataatttaaaattattagtgtatgattaaaatacaaaatttttataaaatggtggtttattttatttttccttccacacataagctacatctcactataaattgtatttaataattcttatgtttatatatcttattgaggttaaaataacgaggtgtttggactgatatatggaaggtggagaagaaaatcaagatgagaaaattcctcgagattgtacattttgtagagtgacaggaacttgtttcctctcaggattatcagtatattcatttatatgtgcaaaaaaggcacaacctaaatctttccataaagctttttgtgtattattcggtacatcttccctaattctaggtatgtttctcttgaaagctggaatagtttattgtgtaggtgtttgtagagcatttaacatgggattctttaagtgaaatccaataaaacaataatgtgtaaactaatctgatttataatgtcagaaaaatctaaaagagttgatgcaatttttatatttgacttaaatagaaagtcggatctcgacttcccgtcagataaagacatacaggtacttataaaacacttaactgggtttagcttagcaaattactgtattatcaccctgaagataggtcagttgatgacaaattatcgcacttcggcctaattgaaggcctaattacgctttcaaagtgagttattaatacaatttagtgtgcagaaattatactgatgatgaccttgagtttattaggtcaaagctttacacaacagcagtggtaaagtggttcgattcggtctacctatcagtggttagtggtactacttaaaaaatggttaggtttttttcaacaggaacaccacagatgatgaaaaggacgattacagctaccattccaggaataacatgctcaaaactatactgagaaactcaattcgaatgtttgagatgttttacggcagtttccaagacaatttggtcaaaattaaccagtaccttatatttacactaatgaggctgtagtgatgagatgacgttggaaagtctacaggaaatgctggagaacattttaccaacatttatgaataattccaccaaaacgacccttaactttctcaaaggtttaaaatcactcgataatgtgtttagatgttgaggctttcaagaagtttcacacaaacatgaacttatccttggacgttcaggtactcagccagccacaaactatttaaccctacaattttaagtcctaacttaacgtttagataatgattgatgacctgtataacgaatttgaggcgatttcaaagtcactgctgatatataaccggcaagtcttacactacaacatggagctggatgaagtgttcctaatatactgttacatagtccggtaccagggaaacataagtaaagtaaagtcaatgaacgtgaaatggcctgaaaataatgaaatgacaatagttgactcgatggatgataacctgttcagcccgcaaatattcataaataatactctatacactttaacaatgatatcggtacaatattaatagttttaatagcattttagactaagaactctacacttgtactattactggacacaaatgaccccttgattgtatgataattttacacaccatggagaaatgttttaggtagtcaactctatatacgaatacatgaataaacttcaacttaacttgataaccttggaggaaaagctgtcaaaattcccgttagtggctgtaatagttagtgcaccccgttgcacgatttttatggtgtttatcatgtattagggttttgaccaacaccaagttctttgcattaaacaccctatcaaagaccataaacaggtttgatttagagcaaagaaagatattttagtgtgggattcgataatctgaacaatgaatctattgaagagctttcaatgatctatgacttgcatgacatcctcggtacatgtagggaacaactgtacaacacacacataaaaaccaagaatacatgggttggcacaaaatttaacaattccaggctcgtttttaataactaaaccactagtagggaggtgtattacgtcaacagcagtaataacaacaaggcctcattatcggagtccaaacgtacccacatacatattccaatatttaactaaacacacatattatcacatttagtccactttgagaaatttgtcagtacttattttaatgggatttacttcatttaataatctaaacctatgaatattaatctcacactatgttacatggtacatactaagactaatatacgtatgctatttactagtagtagtatacaagtgtgtatacagaatagtacagtatacataagtataaagagtaaaagtagatttagatctttgtaaactcagttaatgcgtcctcatcagttactatatgtacaacgggaaccttgaaaatgaagcccgacttgagtgcaacttcttccaggggtgcatgcaaatcaaacttcatgacctcgtcgggtgaaacctaacaatatggtggaaaaacaatatacctggtagaaggaaagtgaattactgctggagaattgatcatcttctccgaacatcacgtctagatggtcagaaatactcgagttatagtcaaagtcctggatgtagtcactcatattcacctggtcatacctaaacagggtttagtaagaacatggaaaaatgaaataaaacttacacaaacagacacgatgtgtgaattacattgtctttgaggtagaagaccacagtttgagattctgggatttgaaaaagattatcacatagttttaagcctaaacaattatacaactgatttgttggttggggtaaaagcctattttaagtcaacttataatatgaaaccttttaattttaaaaactccttagccgcgtcctcagcaagttttttctaaacattttaataaaaaatatgttaaatggtaagtaccttctccttctccttttcctggttttgcctgatacggttcttttccttctcaaactcgtcgtactttgccagaatctttttgtagaaggaaccgaatttatcatcaattatgcagaggagtttatagttatcattcttttcactttcaaacaccttaatttctggatccagggttattgcctttgcacactcattgcagaagaggagcgcctgcttgtaaagtgaaagtttgtaggaggctatggctcctctgtagtacctgagataatatatccactaatttaagcctacgatttatagttgtaaacgtcataggttatgctccgccgacaatcatttacacacttcacataatcatctgaacataaattacattaatagttttcaaaatacccaatctcaaataaactaaagctctgttagagtacagttgtgagtttaaaacgttatctttgctctccgccgcaatcccatctgtgtaacttgagattgccgcctcgtagtaccttctaccctcactaacatacccgtttccaacttcctacacaaagtttatacaaatatgtcgaaacggcaaatttaaacattaaataattaaattaacagtttaaagggatactttgtactttttcgctatggaatctctggtttcaccctccgacaacagcttgtgtaaggcttctaaatccgagtttgacgatatatcatctaaattttattcgttgatttgggaaattgaaaaatacttggaagttcgtccataaaaaggggatgattgatatcagagtacttttccgtgagttccctgagaaactcgtcagaaatgtcgtaatcctcgtcatcaatcctcattttaaaactacattttatgaaaaaataaaaccgactataaaaacatgtaaaatatatatttattaaaattcatcgttagaataatcgatgattctagggtcatgcaacaaaatcgtgtcgagggaaaccaggttcgtaataacatcatctatgaatttttgcacattagtggccgtcaagggacttttcatgatctacatctttttaaaaaattcacacataccttaaatttcctcctcttgcctctgaacgctatgaactttgaacacacttcatatgctgggcatcttgacgataatccaaatgccgatacgaatttatgctataatttttaattaaataccaatattaatgaagatatggttagatatggagtaaaataaatacctggttggctgcgctaatgtatctgattttaacagcatcttgtatatattttttagagatattcgaaagttcttcatgtaatgaatgctctgctcggtttccatacttgatgaatatgaaacagaattggttatcctttgggccacactcccccgagtctaacagtgcctttgttaactccttatatgttccgacgccctttttcttatactaaacaaacgttaaaaattagtttattacctcgttttgcttaaggttgagccataaaagaacgtcagaaaagttttcagagttcaactcaattgatttctctaaatttaattttattaactgtagggtaattaccgtccatagactctaaatcttgtatgtggtacagccttgccgtctcagtcctgcttttattaaaattactaatcagttccttgttactggctcgtatgtatccaattttaatttttgactttacatataccgataatgactttagtagtgtcaagtacaaagtctttttaactatagaaaccacctgaacaattgtcatactaacgtatcttaattacgtgtgtgatgggttggttttctataaaatctttcaaatgtttataatctttaatttccaccagctctgatggcatgattttgtggagccatatttccagctttagtgtgtactcatcattttcaaatactacgggatcgggtgaggtgttattatgtgcgataaggtgaggtactgatctaacagttttattacaaaagtttgagtgtttatcacagtttaacgcatatacgttcagtgcccctttaaatttggttattgtatcaacgaaccctttatgtgcagcttggcaggttctgctgtttgacatgaaaaagtaatataaatttaaaactctgatattttttatcgagtttttgtatgttttggggcatatttcctccactattgtattctcaaagcttatattacctaacattaaattattaccactttaattaatgtttaattaacactaagttatcaccataatagttggtactgatgtggttaacaatagttaaaattgaaataatttagtaaacagctatataaatgtttttagatgaaaattactttgaaattgttgttctcttctacctccctttgaacctcctccaaaattgaaatgagtgaacacatcgtcgaaatcgaatccctcgaatgaaaaaaatgtatggcctccgtctccgtaataatgttgatatggatgcccttgtggtccttcttgctttaaaccttcctctccgtgcatatcgtacgtttgacgcttggaaggatccttgagtacctcataggcgtttgaaagctctgcaaacgccttttcgttacccggattcgcatccggatgcagtttttttgctttttttctaaatgccttttcaatttctctatctgttgcatttttttttactcctagaattgaataatagtcgcttcgtgcttccgatatataaaacgaacatattactgctatatacagatgaaaactaatatacattataaatatactacagatccatttaaaaatttttaaaatttatactttggcacactgattcaagacgagaaataccacacaactacataactcataaggtacatgaattttgaaatattaacgagtatcactgcgataatggatattatacatttaatgtgatcaaaaaaatgtaaatgaaagaaaaaaatgtgtaactacgcccacatttagtccgggataaacatggcattaccgaaggtcggagaggcatcgtctaaaaataattgttataacaaaaaatctattaaattattaataaacatatactaaaaacgtggttgtaaaatatagactatcttaccttgtttagggtggtcgacttggttcaaaaccttgttccagataatgagatctcctctcatgagccctcttctcactacctgaataatctgaaaactgtgctgtttcaggaattgcaggtacgcagtgtttaagttatttgtaaaaactcttatctcattatagcccatttccatcgcttttttctccaaataatccaggagccttgatcccactctcatattccttctcttccttgttaccacaagcctgaccatttgtccaacgtttggattatttctgtaaggtgtaattccaacgcacccaagaatttcatttgctttgcatttctggctaaagttcaggtcatttacttcatctacgtggttcattttctcaagcttctcggcagagctgtttttagaacttgattctggcttgttgggatcgtcattttttgattcttcagtagttttatctcccttttcatcgggtgaatctccctgttgatctcctgagacataggcaacccaaaaattagaggctttatgactacgataggttttatgtacgtcaaccaggtctgggcaggactcttttatatgtttttcaatttcgtacctagctctgacgaataaataaatcagaaaaagtagacaaaagtaaaataaattgtaaattgatagtaaacatgcgtttattagaacgattgcgattaggtcatacacgtgctgaacaagccagtacataatagcgggaagggtcagtgatctgaagtgttcaaatagcaatttacatacatgaacattatcttcttcttggatttcccttatcattatggaggggtatttttgacggcgtcctgatttgttgcgggatacaggttttattgtaggaatcctacctttttttacatcaacgaatgatcttattttgttcattttggattaacaattcatatttctgtacattaaataatgtgagtgaaccactcaaccccccaacacattgtcaactaatacctacatgaaaatttgtacacatttggttaatatattttttatttatctctgaattaaatattttttcgttttatctcaattcaactgtttgttttagataatttatgttttatttgtgattttagtaatttcagtttagagtattaaaattgtgtatcatgttgacatatcacgtaaaatatgaaataagtaatctataaaaattatatttaattcatattattcacttaaagtataataaatagcgacaattttcacatttacacagattacattttaaaacattattaatttccatacccttactcatattcttctttattatttattaacttatttgttacaaatattacgtttactgttaattctactgggttcttgttaatggaatccttagtccccctacatcttagttccatagatataaatttattaatcactacaaactattttattaaataataaagcagtacttaatctacataattttcctgaattaaactaacaaaatgtatacattagtccttttaaggcatggttagtccatacaacatatatgacactcataaaatttcaggcgaaagcgttatgaacaaagctaaccgcttctgtggatggattgacgtagatctgagtgaggaaggagaaaaacaagccaggtaatccttttatttaaaatatttcttagagatgcagcggagcttctgagaccattcaattttagatttggtcatgtttacacttctatcctgaaacgttcatacgaaactgcaagattagtcctagagacgttaaatcaccctgaagtccccatgactaaaacttggaggtaccctcaaatcttacacatgtttctaggctcaacgaacgtcactatggcgcccttcaaggcttagacaaggaggaaacggctaaaaagttcggagaggctatggtgaaggtttggagaagatcatacgacattaggccaccgccagttgacgaatcaagtgaacactatccagccaataatccagtgttcgatgttgttcccagggagttcttgccaaacggagaaagcctaaagctaacattggagagagttatgccattttgggaaggagagatagtgcctgaactcagaaagggcaagcctgtttttgttgctggtaagaatatttaatcttattttttcgtagctcatggcaacagcctgagagggttgataaagatgctggataacatgagcgaagctgaggttctggagtttaacctcccgacctgtgttccagtactctattatcttaatgaagacttatctgtaagcagtaaaaagtaccttttagatgaggaatctctaaaggtttgttacacattagctaccaaccccaattaacaaccataatatcctataataggccaagatggatgctgaaagcaatgtaatgaaaagcggatcgaaggataaaagcgcttgatctaattttgcagctatgatctggcatcgatattttcgcggtattggacctggcccctggacattccaggatcccgattttatacccattaatgatacatatagcccaatttttatattttatttattcatttccgtgaaaatatatacttgcaaaatccatccagaccttcgaactttatttctcaatacagcagcatgcctatcagttgtgggtatctagaaaattttcgcgatacatctttgtcagacaaattagtaaatgatgtttaaattatgtttaaatttaagatttttttaatctcaatgacggtgctctcgctattcacttcctcagttctcttcgtagtcggtatcgcaatatcatgtacaaaagaagcaattgaaatccacccggatttccaaaaaacgtcgaaaatagcgtcatttgtagtagcaggggtattttgactttttaatttcattacttttagattcacgccctgatcgcgttaacctgcggattctgcacatataaaattaacaggttagcactctcgattaaattaatttttagattaaatgatagtccactcaacacttgagttttaattctaatgtaaatttaatgccagtaaattagtgtaacttaatggtaaactgtaagattttgattttctctaatggaatttaatattatattatatcgattcttaacaacttgatatgtgttccttttgccattttttacataaattaatgaaatctgataagtggtcgtagtagtctgcagaattggtcttctcaatgtcgttgtgcccagctccctcaatccaccacgttttaacgtactgattcgtctggttaaccttccttgcgtcctgaataacttgggagaaccttcctcggggaattacctgtatattttcctggtttaggtgagtggcctccaccgccatttcatttgatgaccccttctctagcttattttcttgaatttgcttgagtcgttcagcccttatcaactcatgactttccttgattatgcaagtgagttcaactgcctgttctaacggtatctggttatcagaaattccgtgcatcagaaatactgggattaaggggcagtttttgaggaactcggtattgtcaaatgagtctaaactatgatgcttaatgattgacttgaagaagattctcagtcctgatgcgattggcgagtgtagaatcagtcctccgactggatagcaatagtgttcactaactaagtaacatgatggagctgatcctaatcccttcccatacaacactatctgcctcggcccaagcttcatcttattcgtcatgtacttgtatacattcgctatattcgagtacatgttaccttcactcgctttccccgagctgtggccgtatccactgtagtcataggataccaagttaacattcagaaacgcacacagccttgtatacttgaagaacatgtggcctatatcagtgttatttccatgactaaagaggatgtagatctcctcattcttcctcttttccaactcctctggcgataaatttccgtttacgttgtagatctcaatgactgctatgcttccagtatcttcattttcgatggtggtgtacctacacctgaggctgtacctcttgagaaagtcgttggcttctatgagatctcccctcaagtaaacgtaaatatcgttgtttttcgtcacttcataccccgtattaagttttttcgggaaagagatcctgttgactaccaaattcttgaatctaaaaattaatgtgtttatccgggctaccttccaatcaggtcatatttattttttttcctcactcgcgtctgtttaaagtcacaaatatttatggaactgttactaatgggcataaatagtaaatttagtgtaatacattaaaattaaacatcatcatcagaaacgggtggtgtggcttcgtcgtagagagcaccaaatgggaacagcagttccttggagaaaattagcgagttgcgcacggtttgactggagagtttgaagcgcctgtatattaggtggagtcttctcaggagtgctttttcctggctggcgtcgctgatggttctgacggcgagtgcgaggcctgatatgagcgcctcgttgattatttcctgcaggttgagtaggaggtaaaatgcgtctgcgattgcgtcatttgcttgtgagaactttttcgaggcctcaactgcgtcgtagcacagagtataggcgttgtgggattctattgcttccggccagtctgcgtcaaaccgctttgagtaattattaaacgaccttatgtttatgtacttataaatcgggtgatacattattcttctctgtcccattatatctatccatgtcgtcatgaaacaggcgtgagttgagcagaagtgtatgttttcagaaactatgttcattaccttttccacttccagcaacttgcagaatacgtgcatgttcttatcgtagtttaatatctctgatactgggaacactcctctcattcctgtaagaaatcttccgtacttataacatacacaagatgtatcttcatcttgactcgaatcacttaccttttgagagttatcttcactcgaatcatttaccttttgagagtcatcttccgacatcggtgacgtgcacagctgattcatcttataacacgtttcatccagttcatcatctattccatttaggtaatttgtctcactcgatgagataaatgagtttgttgagatcattgatgacagttgtgctgtgatagcgttgtggagaagtttcatttcaatacacgtgctaggtctgtcattacgcctaaatgcgtggtccttcgagctattatggttctgctttacgttgatcagcatactgtttagtgcttgcattttatacgtcgctttcagctgtgttgccaacagcttcgctctttcgttcccaaactcctcaactgagaagctgatcagaactatttgtgacttctttggctggtaactactggggcctctgccgttagtctgtggatacgtatactttacgtctgacggcttcatcttcttacaaatgaactcaatcagcctcttaccatgtgtgaaatgaagacatgatccgttattttggcactcgactgggcacaccaggcatggcaccacatcaagcatgcaaatccagctattcgagtaatcgttgtagaacacgtcaaacattggcagatcctgcaccctttcgtccattattttactaatgctcacataattgctatttaagtgtcttggggtttcatagcaatagctgttaaaatcagaatggctgacgtgtggatttggattcccagaactcctgaaggctggcgagctcaagtctgatatcagaattgaagactgaaacctcagttcatttgcgtgcttaatgatcctggtgtactgtgacctggcatctgggtactgtgacagcaacacattcaggttattcaactttaggtcaataactttgcctcctttaatcctctttccagcaccgatttccccggaatctaaacctagatctttccctccagcgtacgcgttaaatatactggaaaacttccctggcgttggggagaataatggtggcccgttattgcggtataaatccacactgtttgagaatgcgctgtagtagctgctattgggcgttgatgcgaatatgccttggtatataagctcgtggtccagcttaagcctgattgatggcgttagcgttgatgacttctccacataataccttctcggtgtaaatgactctcctgatgacaccattttcctcttcaatgacactctcaagacatctgcaactgtgcattcatgcgcgctaactcttttaatatcgaagttttcttctccgtagtcttcctttctctcaagatggttcatttgcctttcacaatccctatcagctgtgttcttctgtttccctctgtgatccctcttaggagagttagacttgtaatatgttacaagatcgtggtatgactttatgagtgatgggtaaattgagaacatcttctgtgcactctttgttatcagaatccagcacgactggccatggtccaggtatatatattccggaagtgtgcttatcaaaattaaatactcaattgcttctctaaaaaccttccagatattatcattcgtgtagaaataacgccaatatgagtcgttatcgctgctgtagtggcccactccaataacctttaggctcgtgtcatatctcacgttagtcaggtatcccagcgagtccagcgtgttcatgatgtatgaatttaggtacccctcttcctcgtatatctttgtttgctcgtacttactatccatacaccaccagggtgatctgtacagatcataccattccaccttcttgtaaaattccaaatgctcctccgatacgcatgggaaaggcacgttgttgattactttgaaaatctcctccaggctaacgttacactcactagctttgaaaaggttagagtaatacactgaacccatatatcggtcctcatcgtatggtatactctcctttgcctcttctcccgcctgacttggcacattaggcctataccttctcggcgttaactgattctctataggactaactaggaattgaaccctgcccacttccgtgtttattgagtgtgagtatatggtgttcaactccagtgatgtcatattgttatgttttcgctcccttttacttttattctctgtatctgactccaaagtgtcagatatccttgatttagccttcaaatatccgtatatttggtttacgtactctatggatatgctttctaggggataattcttttcatccgtttgcgtgtaaaacctgctaaatgttctaaatatcttcctctggcatttgcatctgcagattttcccgcagttgtagcacactgctgctcttatgaaggggtgtgtgtacgacgtctcctcgcctctgcagtacgggtagctgaagttgtgcattattcccctttctgaaaagaactccattacgcagttatcgtatgctcccatgtctctaatgaagcatgtttccaacatatcttggggcgtttgtatgctttggatatttgacttatctaaattattttcttggtttggtttctcaatgagtgtcattaattctggtatggtttctgatgtgaatgtcgtttgaaataaatttttatccatatgataaatcctgttaaatggtctactccagtccaatggacttgttttatctgtgtttttgcttttatctgttaaaatactcttctcttttggcgctccttttatacccaggtatgtttctgagccttgcgggtacttccacttcagcgaactgtgattcacgtgattgtctgaacacgtgtgggagtaaccttgcgacattccaaaagcgcaatttttactgcagaagcagcttaccagttcatctaattggcagaggactttatctactataaaatctggagagtatatagaggcatctgtgtttgttttaaagtctggagatgaaagttgagatagtgtatctagtgtatccaattggctaaggattttcgtgtaatatggtcttgagtctgagaagtttgctaaattgtatttgtggcagtaaaacctgtaaaatccgaagttattatacttccatttattgtacttctctcccaaatcgtccaatattgacaacataaaatccactgcttctagcagtgttcttggtctgtacttgattttactcggttgcaaatcttctgtttcaaattcttcatactctagagaatcatatttttcaaatgtggacgctgtttctaaatttgagtcttcaaacgtagaatccacgtagaatgtgtcctgccttagcaatgttgactgattatcattctccattgagcttgttgaggggcttgtggactttgttttccgtctcagtacatagtttttgtaatttgacttattgtacacgagaacggagtccatgtcgccctcgatttcagggcaattcatagtgacaggcattgcacaaaaatctcatattttatgttaaaacattatagatatttttgcgataagtgtgaatatgtgttatttttggaaaaattcccggatttaagaaaaatacagccagatacaaaatggccgaattgcattattcttaaatcaaaaacttttgggccttttgttttgaaaaacaattttctagatattaaaaaatataacaaccaaaatttaaatcataataaataaatctgggcatcttattccccaaaattcacgacttccttatctcggccaaagtagcccccagaatgtattgcaacttatagatttgaaaattttataattcctaaatccccaaatttagttttataaaatttatcttccatttctctaattaattcaggtataaattttcaataacccaaatcctgatccatcacctgattcactatggcattgaccctttaatttatatcatccacttagatcatttctatctatcaatttatattttaaagtagaagatttttaatatatttactcgataacaacgtctatttttataagttttttattctatcaattttcatttgttgtcgggattcccttatgttttggttatactaaaaattttaaattattttaatcgtattgtcttttttatctatttatttttattatattatttttcgatattttacatcttatattttacattttacacatcacttcctatcgcaaatgttcgtgtttaagtctgactctcaccgtcagatgttttgcaatatgcttaaattacaaataaaatctaatattttaaagagattcggcggtcttggccaagaagaatctagaatactgaggtcaaaatcctttaaagagtttctcaatgtgtggtccaactcgatcataaacaaacttccaaaagatctagaatcgcaacctaagtatgtaacatcccagataaatcatgtttctgaggaaattctgggtctttcatcagtaaaggtaccctttaggcttcactaatttctttaggatatgattgataaggacaaatctattaaatggctcatagacaggataaacagtgattcagacgatgttccacgtccttatttcccctccgtgttaaggaactccatgattcagttccccttcaaacagtttgatattcagaaatccagagatttatacggccttctcaaattccccttttacaaactttctgccagtgtttatccggactcttctgagtctttcaaaggtttgattgaacccaaaacttcaagttcaccacctgaagaggatgatgaacatggcggatcgcgtactaaatccaattttggaaccaaaaactcacaggatgaagctcagttttcttcatctaactatatttactcacccagtgagcttgaaactggcttaaggcaataatattatctagtgcatataataagtaaatatattataaaacaactgcttcatcttcagaaacgccaagttgccatttgatcccaaatcactgcagtagctgttaaccagtccacggtctccattattcaattctacactgttgcgatactttttatattccagaagctcaattgccttctttatatcattgttagagaatgaccttatcaatggatcgaggcagttcatatctcccgaattaaagcctttctggtatagttcctgagctattcgttccttaccctcactctcggctaattttgccatatagtagagggtatcagtttcaccttgaagaagcgcgtcgttgaggaagattttcagttcacctttagagaatacgtctgttttaccctcgtttattagcatagcggcattccagtgaccagcctgagaagaattgtgtactacatacttaccactagtcctgaaaatgcagcgagtgcacttaaaatggtagctgcatggtagtttttcttagtataataaaagaaagagagatagaactcctcctctacgaaaatttgatcagctgcagttttgtaattcagggcgcattccattagattcaagtcagttccaagtccaacctctaacatttgtgcgcatctacagtagcctctacagtacccatagtctgctgataacctgtacagctggtatatatatggtagttctagataataatagttagtccctccgtttcgggccttaattgagacgatttctgcgataaagaatagtgcttcagaattatgtgatctggctgctatcaagaagtattttaaggctaagtcataattaactggtattgacctcccttgctcgggttccctggctccaaagaagtatatgattcccaaacaatttgcagcatctgagttaccaagtgaaactgccctctctaaaagctgaattgaattttcatagtttttaggaactccaatccctctcatatacattgtcgccagttccaacagcgatgacgacatgttttctggtgcgatttttttctcaaactcgttaattttttcttcaaatgggttttcaggctcttgtttttcattagaaagtccactgcaactaccctttctcttcgacaggttcccctcttcattcctcattgaatcttccaactcagataattccgcgtactcttctattttcaacaaactatttaaatcttccttatatctatccaacgaagtctttgaaatttttagatattcaagcggcaccaggaaatcaatcaagtgcttgctatcacctctcacaactctcttatataaacttatgacttggcttaagttatctgataagtcatgatacattaggtggaatgataaagccagcatagcaggcacataaccacttcttgctgacgattttaggtattttatagccgtatttttattaactccaggcccatttttaatattatagtataataaaaagctcagaaagtattgcgatttggcatggcccatctccgccgactttgaaaaataatgtgtagcttttgctatatcatatcgaatggtaaaaaatcgtttatagcctaaatttaatatttataaagtcaaataacctaaaagataaattgttcccaactcaaataaggattcttgagcaataatatcagaatatccttcagaaacctgaaacataactgtgtaaactaacaagtaccttctcaaacaaagggatagccgaataggggtccatttctttattataatctccatatctattataataattaattaataataaaattttacctaagaagatgagcatttttaaacgtttcgattcggtcggattctatgatcacaagttgaaatcaagcttaaacatacctggattcgcggctaaaataaagccattgttaactatatataaatttaaaatgagtagaagctggagaaatctcgaaattttaatttttttgtgttccattatgacacaggaatcacacaaaaataaaacagaataaattacgacagaatacaagattacaattacacattgataacaaaatatattataattacaatgtacataaaaatatgataaattatggtgatggctactgtttattctcctaaaggttaatgtgggtgttggatgtaatctgtatacctgatgatctttcagaactttgaagaatttgctaaaccttgagcatttcagtgagtcctacacaattttaatttatgagaatgacaaacgtcgacgtcatcgtccacgaatgagaagttgtttatgtcgttaatgttcatctgagtaacatcttcgctggttccttcagattgtggtttttttgcatattgaaagcctggaaccagacacgacaaattttttagagcattgttcgcagaaacaagatccgggtcactcgaaactaaaacaaattaaagccttaaaaaatacctttcttatcatttttaagtgagcctagggagaaaatggagcctgtgttacaacttgagggcatatcccagtttgaagattcgtatccaactctcttttcccagttcggaggtatcttaacctcacccttcatattgtacttttccaaaactctacccttgagttccgtttgtggtttttcgtacatcgggtacctttgggatttttgaattagtgatatcaattgcctaatgaaaattagtgtttctatgtaacttacgccgagtcatacttgaattgtttcccctgtatggttatcgggggtaacttgttcattgttttgtgcttcccatgagggtgttctgaaaatttatggtgaaagtgagtggattccgttatcttgaaggataggttaaaaccatcccttttacagccagaggacagtgatatgaactccaagatattcaagttccatagctcaattgacggttcggggagagcgggggtgtgatcggatggaactttcaagtcatgggataggatcacaggacttgaacttgacaattcttttttgtaactatcgttgttatattgctttatatttgccaataaaatgtttctagttatcttacatatcttagcccatttctcgtcatcgaaggttaccttaggtttaattccgacctcagttaacctttgggctaatttctctaaatcaaatttagtcaatagtcctttatcttccggtggtgactgtgtgtcgttttgtggattatcgacttgtttgttcgattcatcagtaccttcaatagttgtgttagaattctgcgaggattcaaacatcttactacattaaacgggtattgaacattatataaattataaaaatgtatgtacaatatgtgaaatttatataataaatatttctgattctttttgcatcactttatctgttgggtcaaactatcacctctttattattttccttttattccatacatatcttgaaaattggaatatagtacattttctcatttaaatttaaatttatagtcggttattgcaactggctcatatttgacccaaaatttagagatcgaaatttcaaattgtaggtttctcaaatatttttcaaattttataattttcgttatattccatctcgttttatattatcttttatcattattttgagttttatgttttaaaatattttactattaatgcccgcctctaatgattctaccatttcatgctcaattgaggagactaatgaactgcgcaagaagcttggcttaaaaccattagcaattccaacttcagaaccacaaaatgaatcggaatctacttctcaggacactgaggagattattgaacgcctaaataaatctaaaagaaggagagccagagaagctctgataaatgaaggcagtattgcggattctattaagaagggagaatcaataaactctaaacgtaataaattggtggacgactcggataatgttgacactctggatcttttatcttggtctaaaaaaatggccaaagtcacaaagtcgacaatagcacaggcagatcaacacgtaacatacagtgacgatgaagattcggatgaaccgacccataacaaccatgaacctaaagaagaagtgaatggaccaaatctgaaggtattacacaaggtgaacgagctagacttgattaaaggcgacggagtaacccttactttaaaggacgttggtgttcttgaagctgaagcagcaggagtttctgacctagattttctggaaaacgcagagttagtcgatatgaagaaggataagaagaaaatggagcagaggatgagaaaccaatacggaaactacgttccatatgatgatgaagacccacttaacaccggtttcttaaaacactacgatgatactattaatgagacccaaggcacaaaactgagttcactagcaaacgaagacgaagggttctttgttaaacctaaccagtctagaaagttccaagtcgatttcgatgaaaatgagaattacgacactttcatccaaaagaataaaccgaaacttgcaaaaaccgagcttgttgatgaaacggatgtgttttcaaccctgagttcaagaaaggagaagttaaaaaagaaaccaaaacagatgaattgggacaagatattctcaaaagacgaagatgcagatcttgatctcaacaatctagtcccaaccaagattaagaaggatgttgccgtggtggacgacgaggacgaggagatgctatatgtccaaatttcaaagtaaatcaactattcttcatatagttatctatttattaaattaactatttacatcaaaattttaatcaaacttttaaattaaatttatttaattgttttttagtcatcgcaaaaggttttcaagtaataacgttaagggtgaggactctaaagatataaagcctcacgttgaccttggagactcaactaatggtttgtttttaataattaacataaacttttagacaaaggctttgaaattactacaacaactgagttctgcaaagttgtgaaaactccaatggaaaaaatctcagagcaagagtctgacaagaggtacaatgttaacaccactactgaccacttagtggatgatgatccaaatacattatcggtactacatcatataaatatacacatctgtttatcttatttgtatacaagttcaattccaattactcatttattggttaggaacagcctctaggtgacggcattgcagccgccctttcatatatcaaacagagaggtgactacatagatgagaaggcagaaacgcgttccaaagaagttcaactaaactaccttgatgaatacggaaatgaaatggtttgaaaactattcagataacatttattttactatttaagcattaattaactgtaacttagactccaaaagaggcctttaaaaagatatcgtggatattccatggcaagcgcccaagtaagaagaaacaggagaagatgagaaggaagatagaattaggtatatcaattattcacattatttattaatattaattattgatattgatcaaagatttgtggaatttggttatttggaacattttgctgaccttattttaataatttcttagaacgtgctttgaactctaacccagttgggggcctaccaaccatgaaagcactgtattcgcatcaggaaaaggaacaaacgccttatataacactctttgggaacagaaacaataactaatgtgttttcaaataatatgttttataaacaaattagtctatgttacaagtggtttaaaacgcaattatctacttcctctgggagcgaagtttagccacgtaggaacgaagcttcaaatcgtaggactcagcagcagtaatctggtcgagcattccagattgtagagccttcacagtcttggaagagatcccaacttcctaaaaatttttaataatgaaaagtaagtagtacgttcatggattctatcctatgctttatcatgcggagaatagatagaagcttggaacgcttctcctcctcaggcattaaagtcttatagtacatctgcaaaacctccataagctcctgatggatctcagtcatcagtttaacagtgttgggatcaaactcaactataaaattataaattagttaatggttatatttgtgtataaatgcttgtgtatgctgtacattgtggagaggtgattaatttctcagactgacatagcttagtgttgacaacaaacatctttttacttactttaacatcaagttttgaatcctaaaaaatgttagtcttttagtattgaatgagtttaaaggtatatttgttagtactgtagcaatcaccttgatgtatttaactatatcaaagtccctcaattcacttatccaactcgaacggtcgggaaacgaagttgaatggtggagttttaactgaatcttgttcgcagactctgaagactcggctttcactagaggtgatggaggttcagcatgagttccaggcattctcagggaatttatcacacacagcgagtcaacctcctggtcctccttttcctgaaaacattaatttagagatttagtacctccaggtcatggattgtagcatccaacagcttccttttgcgataattctcaactaaaaatacacatttatttggaaaaagatactgttagattctagttgttcatcagtgggtttgggggctgaactttctgataaatctggagatgcagactgcgttttgttcatgatatttaatgaatggtcgttgaaacgctgaactaaaatgcctctagtcccgtctagtgtaaaatttttaccaaattttttgttcacatccatatatttcctattccggtaaactgaaaaatgattttatataaataaatgtacccttcttgttatcttccaaggttattacttcactggaagggtctgaaatcctcaaaatgtggtttgtatctagtttcttttgcgatttccttattgggatgcctttgatttcttcatagagtatcttatcttcggggggtttctcgtctatcaagttgtaaaagtaccgagattgtagtattcttttccaaaagctctcctctggcatgttcttatccaaaactagctttttatgaagatttctaatagtttcatcttccgcaagtagagtctctgcaagctgctttgagtaaacataaacattttgggagttaacaagagttgatgccggaggtactgataggaacccttccaaattggacctcgctacaaattgttttcatcaaaattcttacccttaagttgcgatacgtttgtttttagctcagttttatgatgttcccagaagtcttttgatgaaattagtccctcggaatcttcttctgataccactagactactgtaaatcctcgcgagtttatcgttggaatccagaaagactctcttcgcctgctcaaaatcttcctcaatgacatttggaggcgcgggttgctcaggttcagggattactgttgtgggagctggtggtggttttgtaacctcaggctctttgggtaggtggcgggacttagtagaacactcagttagtacgttagaaaattcttctaaacgttctctatcatcgataaaatctgctacgaccactggtttaaggagaacgtcatattcagaatattctaaaaacaaatatctatgtgtatgggatttacgatacctgaagtgagttttgtagaggattctttaaaggataacctaactttaggtgtctttttcgacttttctgaccttatccagtttgataaggaccatttataagtgtgattatcgactacgaacaaaagatcataattatttaacaatattgtacccttaacgccttcaatgagtacattttcaaatctgtactctgacattaataattacagacatatatatgaaaggaaacattaatttaaaataataattaaactgcggcactacattcagaacatctccgatgtgtagtcgtattttcccctgggaacaaaagaattaaatgaaattgagttaagtctggctgaaggcaatttagaatcttccgttttaaatatcgatccttccttctttccggtcatatatccaggtttatttttagtgccagactaaaatgtgtattaaaattttaaattttcttaccttcttttggaattttctccaattacttgctcttttataggattcttcatcttctttttgcgatttttgctgtttcttgagagtttgaaccagtttcctcttcctcagcttctccctctcgttatcagtttttttaattattaaattctctggaatcacatagcccgctggcgtcactatttctttgacttcctttattttaggctctgctctcatctttagtcttatctaaggtattttaaggtgttttttagcttactctgtccctctgtacctcttcagaagtattataatctttatatgttacaatgtatcccttttcagtctgccgatttattatacagtcataccaacgcctaaatgcatatatttttaatgataaaatacccgtcctcagcataaagtgcctgaactagggatccaggtttgcattgcgcaggtaatggaggctccaacaaccgcaaatccttgagacaaagcgtgcacttttctcgtgatcctagtaattctataattgtcaaatcatttggctaaacaaattaaattaaaccagttaattacctgatcacccataacttgaacaacttctccatatttttgttttccattgtacagcactacacatgtgcgtcctaggtagggtttaattatgaagttctaacctataaaaatcgaggtcgtgatatcgacatcctttatatcctcgaggtggataacaccttgcttcaaaagttctaaaaagcttaataaacaatcaaataccttcattggattgtttgtacttgattaaatcattggtgaggataataacttcgtttaaatcccgtttgagggaaattaactcctgattttcagggtcttgctttaaagaatcctctactgtggataattgtttgtgatattcatctaaattaacctaaataataatttatagtcttgatatcgtaccttaagatcctcaatagtttcggcttcatccatttattaactaaacagtaagaaaggctttattttaaatcattaataaagtggttaagtatccatctacagttttaaattgaaataatacatgaataacaactaagattgtactgaggacagaacaataagaataatgttttaaaatggtgaaaataatatatattggttattgatataataaaagaattaaattattcatatactccttaaatagcaacatcatatttcttctctagcctgacacagtagattctacattttaaaaaaacattgtaaattatagtaaataattttctaactcttgaattgaagtttgtttacagaaaatgtctgttgtgaaatctcttaaagccagggaaattcttggtaagtagatcctttagtgttaatatcaatttttagattccagaggaaatcccaccgttgaagtcgatcttgtcacagaatacggtttgttcagagcagcctgcccatcgggagcctcaactggagtttatgaggccttggagttacgcgacggtgacaaaggccgttatttgggtaaaggtgtactaaaagcagttgaaaatgttaacacagttgtcaaaaatgcagttgtcggattcgatgccttgaaacagaaggagttagataacttaatggtacagaaattggacggtactcagaatgattggggatactgtaagtcaaagctcggagcaaacgcgatcttggtagtctcaatggcagcagctagggccgcggcggccaagaagggagtccccctttatgtgcatctggctcagttagcaggaaaacccactgacaagtttgtattgcccgttccatgcttgaacgtcattaacggaggatcccacgctggaaacagcctggccatgcaggagtttatgatcctcccaactggggccagcaccttcagagaagcattgcaaatgggagcagaggtttaccacaccttgaaatcggtaatcaagaagaagtatggccaggacgcgacaaacgtaggagatgaaggaggctttgcacccaacatcaaatcagctgaagaagctctggaccttctggttgatgcagtcaacaaggctggatttgaagggaaagtcaagtttgccatggatgtcgcagcttcagagttctatgtgaaggagaagtcagcgtacaacctaggattcaaatgtgaaagggagctcctcaaaaccggagatgaaatggttgattattacactcacctgtgtgaaaagtacccgatcgtctccattgaggacccttttgaccaagacgactgggaatgctacaacaagctgacctcaaagcttgggcaaaaggtccagattgttggagacgatctccttgtgacaaaccccaagaggattcaaacagctctggaaaagaaggcttgtaacgcgcttttgctcaaagttaaccagattggatcagtgacagagtcggtggaggcctgcttactagcccacaaaaacaactggggagttatggtttcgcacagatccggagagactgaagacacatttattgcagatttagtcgtcggactctccacaggtcaaatcaaaacaggagcaccttgcagaagcgaaaggaacgccaagtataaccagcttttgcgcatagaagaggagcttggacccagggctacctacgcaggagttaacttccgttctgtatcccactaatctatttgtatgtgttattctcacttatatataatatatttatctgattatgagtctctcaatatgtgttaaacacggtttacatgcgaagattttataatgcattttaattactgaacatctgtgattataaacaattttatataattaaccgtaagacgatacatgaagaataactttcctggcttagaacacaataaaatacacatatgttactgtaactcagataattgtttaataaatagagggttctgtttcgaaaatccggtgtgtaacaatggattgcacaaactcaagtgctgtagaccatgcatgtttaagatagccaatggacgagtaaatgaagctgaagtaaataaaaaaacggatgtaaaaaacaaatcggaacctaaacccaaggaaactaagggagccaaacagagtactggtgagtctaaaaaaaagttggaacaggataaaaataacataattctaaagaaaccttggaattcatcaatcaaaatagataacatggataagcaggaagaaacatctataaagaagaaaacggctaaaaaaggcaatagctctacgaaggagaaggaaagcaaattaaatagggtcaattcaataaagataaaaagcgataaaggccaaaacaacagtacaaacaagggtaaaaccgcaacaacaaaggaaaatggagggaattcaagaaattttgaagatgaaaatgaggacatatatgtttcatactcgttaaagggatatctcaaaataaaatctaacaataaagtggaaatatgcgacagatattacacaagatgcagtgaaaaatgcgatggaagtaaatatgtgtgtataatggatgaaagtgacgaatgtgaagaagaaacatggtgtaattgttgcgaagattgcggaagggtggatgatgattattacatagaacaaaatgaatataactgttgcagttgtttgagtagatgtaagtgtattggttaagaatataggtgtaaaataataaaacaaatattcggaaatagctacatctaatttgttaaattaacaaaaaatagcgaataatttttttcttactacctcatattatcaacaatattattggcctttaaatctttttttaatttaatattttcaacaatgtaatatataatattttaaatatgagtaaaattttaaatttgagactttaagttagatcggaacaatgaacttccatccatggaatctccagtaacagatatggatataaatactctagaatacctatctctagagtatctttcaagccaaaccgatccaatagattacaatacactgtattttaaaatattggaagaaaatggactatctaccaatgaaacaaacgtaagtattgttcatcataaataaaatttttaggtagaattgtggattcgtctgtattctaacaagaatgtgctgattttaatcaatgacgaattttatttgtatttaagaaataattttaagaagaaaactagaagaaaaaatgttcatttattcgacattgatattagccaatttgaaccaaacgaacttgtggaacatatcccagaatcaagacttctttgttcaaattcatatagaataaggagtttgaaccttgtattatatgaacaggttgttaaaacaaacgaccgtttcaagttactaatggcaatagcatcaaaaagatactcaggtatgtgcacttcagattaagatttttataggatactggcaatcagaccttattaatgaatctaagatctcacccagggacatatttcacttattgacctctttgtgtaaattaggactggtatacaagatgacgatacctcacaacagaatatctaaattgatgatgaataacattagtgaaaattgcgttataaagtatgataactacagtgaatcacaagattctgccagagatgaaacacctaaagcacaaaattctgcatccatttgtttctttcacaagtatttcatactggatagaataccaaagttcataagaacactgttcctttcggattccaggacgaactatgaatcaacgatgatggagattctccaaaaggaggaaaataatattctgttagagtctgattggaaaacgtcatactttaacctggcactgcaagaattgggccagattatcacaagggtggataaccacatcatatcgaggagttacttaaattttagaaaatcacttgagctcaagaacaaaattgcagttatcttcgcatggtgtcctcaaaccaaaaagtttgaaaggtgcataatgctaatcaagaacccaaatgatctaaaaatgaagatgaaaaactcaaatatcctccacgtactaaacctgaaaactgatactcaaatgagtgaaaactcagaagatgagaaatcacaatcaccaccgtttcatctaaatggacattcgctacaggaatatatatactatttaataaaactatctagatatggaataacagcaaaagatataaaccactatgtgccaatcaagtataaacagctatcaaaactattgatttatatggaatcagtagggttgattagaaaggaaacggaaagagaagggaagctttttatgtacagatacttcacaacagatagtacaacaccactagttaaaactgagattatagaaagagatgacactccttacttgaatggtttggaaccaggatttgattcatctagtacgcaaacaccggataaagctgatattgacgatagtgaaccccctcagaagaactactctgaatttcttaacatccaaaaagctagatatttggaaaattctgtgtatctgcaggactttgagaggatatttggtgacctgcagttgccgaagcaaataagcactaccctgtttaagaaaaggatggtactgatgaagaattatttggactattttaaagcagcaacatattcaaacttatcaaacttctattatgatatggagagaacccagacgaaagtagatagaaaaacagcaatgagagtatcgagctttgtcctagaggagctgaaatatttaaaaactttaaggtgcgaagaattgaaaggagccaacctgtcactgacagtattatttgattcaagacacctgacggaaaaagaagcattcaattatgttagaaagaacataattatgaagagaaacctagccgcagtacaaacgttggcaataaagtcgaagataaatgaccatttcaaaggcccagaaggtgtaaataatttccaggaagacactatagatatactggaatctaatccagaaagtaaggacgtgctaaaccttaacatacaagtgccgtgtttgatcagaaatgtatcagtaaaccagcagaatacagagattaatgcagaaaactcactgggtttcagccagagagtgttgtcagcaaacggttacatcttcccaataatgacgagaattaagctgttacactcattcttattagaaaactttagtgaatgcagatttacaacattcgatgttctgactaagatgacactcgaaagttattttcaactgataggatgtgggtacaaactggagaaagtagcaaagtatgtaaatgaaaatgtactaaagttgccagaagagtatttaaaaatactgctatacaccagaagagacccgatcttagtattaaataaccagctgaactttctatataggattaagctattattatttgtaccggactcctgtgagccaagtaaaaatgatagttccgctgaaacatcacctggagaagatttaaatccagaggtggttaagaacattgaaggtaataagaaagaatttgtctgggagttgattaaaaccgtcgacttgcatgattatgtgaatagtcagattgtgggaaaatatgaccttacaactgactttgagccctattggcagaattttaagatgcaagtggactcttatcttagcagtgaattagaggcaccgcctaaaatactaaatgttaagcaagtgtttagtaagaaaaattggaaaaaggtagtatacctaacaagtgcaattaagtcagagcttgaccagataatatcgatatggctttcactaagctgcaactcacttcactacaagagcttgatcaagttatttcacatgccaatagaagtcataaacacgctctccaccaaatttaagataaacaacacacaaatctactcgtacctactaagcaagatcaagaataacaagtatgaaccacaagtggaggatgatagaatactgaataaaatcataacaaacattcatagggataacgaaatactgtggatagcaagatacgtaatatctgaaaaattggtaaatcaaatatttgtaaattttcttaaaaatgattataatggatttatcaaagaccaggattccgaaaatgagattaatatggacaccaatgtcactgttcgtaaatttcagagttttctaacccagaataaactggacaaagattatatatcactagaaagtttacagaatgacaagccgctggatgtctggaattacctgcacattctgtttaaacacaagtatacaatcagcgagtgccaaatcatatttgactacataatcaataagtcaaacttcaatttgaggatactgaaaaagctaagaaatatgaatataaatgaaattgttcattacaccatgaaaaaatctcactctaacccaaccaacatctataacaccactccaacaaatgccttatttaaaaccaacagctatcttgttggctcaaagaaaggttcaaacgactttgatctcttgataagctcgcttaaactaaagtgcatagtgttcacatcattatcaagcaaaggagggcaattagtaaggcatatagatcctagagattttagacaagtgttgaggaggtgggctgatcatagatggatagtaagaagtaaacaaaagacaaacttgtttaaagtatacaaattgtccatcttgtcaaagcttaagcttttcccaaagtattcaaacctttatcatctaggaacacagctgctctcgtacattcatttgtatggttacaacagaccttgtagtaatccagtaaaccaaagattaggaacactgtcatactatcctaatgaatatagagaaaccacagttacagtgaatatggatttagggctggaattaggacttgatcttggccatgatattaactcttcatttatggcaaacaatgtgtctgtgattaaaaactgcttagatttggacttttacaccattttcaacatactagaaaactttaaaatcgtacagttggacccgaagtggagtagccattcaaatacccaaactaagcttaagtcaggctattcacgctttgtagaaggaggaatatcaaaacatataaaaagtatgaaaaataacatgtcaataacacaagtgggagcaaacataaactcaatacaggcaaatctaaggtcacaaaactatgtaaatgaatatgaaaaacagagtgttgtgcccaaagcgatgatatgtgaaagtgaactaacagatatattgaatccttcgcaatttgaacgtacatacccagactccctagtttctctaaacaattatacaaggaaaaaaattaaaaaaatttcaggagtgatagattacgtaatgaatatgtttatggtagaagaggttccggatggcgttgaaaacagtttttataaattggtagatgtggttaagagctcaggattacacgggatttctcataagaagcttaaattggaatttaaacttgtgtatgagaagaaaccgtctaaaaaaagaaagtattctggggatttgattgctaataatgacttatcagttgagaatttggttaagattctgatttatgcagcatccgttctaaggcttgtaataatggtgccagatggaacagaatatttgtacatatactgggagtactgtaaagatctattcatagataaacaaggtgggattgaactaaatggaattgtagaacaaggatttgaaagaaagaggccagactatgtgcctgaattgatttggataatatgggaaagaaaaccatttgatataatacaagaaaatatggaacaatttctgagcaatacaagggctttgttgccagaagatttggagtcttacgcaaacacattaaaatcaacaacacaaaacacatttgtaacacttgatggtcacattaacgtgcatttggtaggattcttagcattaaaaatattctgtatggttaaagataaaccagggattacaacccatcaggtatgtcatttaattattaaatagtgtgtagatatggaaggatttggtgatactggacgaatgtgaagtggaagttctggcggaatcaatggttttagaaaaaattttaagtgcaaagaaaataaatgtggagaatctgtcaaattctacattcgaatcaattaaaggaagtgaacgtggtgtaatacacaacctatactatccccaagaaaccagttttgtactttggaagtttaaaaaattgttactttcgagttaattttaataaaataaatttatatattatttatctagataatggaagtatactcagcagtaggcctgagagacttgttctcaaacccaaacaaggcctggattgtactagcaacgcagtctcctcatagaccaatgataatgaagaatcatatgggagtaacgaatctgctaacaatggcctcagggttcgaagaagatctcaacaaggatgattatccaacaagaggagactattcagtggcaacagctgaaaataaagctaggatagtggcaaaaactatatttacagctaatgaccaagaatctaagaagaaagtgagagaacttttaagtaatccatttggagaaatgcacaaggatttcgacgtagataaggtatcttttaaaataggtaaatataatggaatttcattcagatacaagtggtaattggagcagatacaatagcagatatgaatggaacaatttatgaaaaaccagtggatagagaagatgcaaggaggcaactcagttcatatgtagaatcataccattatatctatactggagtcgcaatgtttgcaagaggtagaggatatgaagttccagaaaaaaagttttataccacaacaagagttaagtatcaaaggttatcaaaggaagatatagaggcacttttagatacaagagaacatgaaggctcagcaggtataaattcctagctaataataaatgttaaggatcatatcggataacaggattgggggaatcattaattgaggaagttgtaggttcatatactaatgttattggacttcctgcacaatgtgtatcatcagcactatgcgacttggcaaaatcatataaaatgtttaatttttaattaaaactttaatataatgtaaaatatttttttaattctattttcagaattaatgtcagtaatttttgtaaaatatgtgtacctggcccatgctaaggtttgatcacctatactattgcctaaaaccttacacatttgttttaaactctccagaaattttttattttcaattttatttgtaattatgataaattcggatagtttaatccctccagatgctgatggctttttcaatcgtctgaatcttccagtagaacaaaggcctgttttaggatatttcagtggtaaagtatataacatagataacgtagaagattatctcaattttgcatggaaatttgataatccctgcttatccgactttgaggataggttcacatggctagaaaactcttctgacgttttctctattgacttggaggatcagttaacatctaagtatgattcaggtttaattggtacgtctaatatatctttcattattattttagctttatcaacgttggaagagaaattacaggaatacttgtatggagttagtgtaactgacaatgaaacaccagagcactctagttggaatataccagattatcaccctttaaaggttaaacttgttcttccaggagatgaaaatttttgttcaaacacaaattgggaccaaaggttacagtctgcatttagaaatatttgtctttttaaaaataatgataaattgagtgaatttaacaatgattatgagcactcattattgaggtttgtatttatatattattaattgttagtgatgttggccattttgcaaattcatgtaaattgggttcaattaagcttttaaattgtttggtggcttcaaatttttcagaaattccatttggatttcttgaagtcactccacagtcacatccattaatttacaagttctactctcctaaatttaaagatggtatgtttttactttatttcatttttcagaccgactcttcgtgtatgacgggattgtattcactctagtcgttggaagcagctcctcttactcaaaaattaattataccacctgtaaaaaactgtattcaaacgactttaaggggaaacaagctctttgtgacgcaatacaactgattggtacaatttctaggtttgcagttccgttctgttgtgtaacagattacatgggtttcagagtcgtgtcagaaccattgataagtataaggtattacatttaatcaatcattataatttagcacaaatactaaatatttgttggatgatttgcttggtcgtgattcatactcaactttagagcacgatggtcatcttgtaacctcatcactattcgaaaatgaccaactctatcgcgattttattaaactgtctacacatcttagagtgtcttcattgcctctacccttcggctcttcagatcttggaggaactcaggatttcaataataactccaatgcagttgaatctaacggaaatttgtacttccgtaatacacatgaggttttaccaccactaccagatttaaacactggatatgatcagttatatactaatcgttttcgtcaagaattttacacagtccactacgaggggtttttaaaatgtacacttaattcacagtctctatttaataagcactttgatgatacagagttccaaaaagccgctgaactaaataactttgttcttgaaaacaatatagataaattccacaccattacgagttcatgggacattagcaacacactccattcattcggaataaatataaggtaagatttatttttcacaacaattcttagaaacatcggaaagatatatgaaaatacagactatagtgcactcaaagacttacttgcatgtgaaatggcagcccgagctttcaagcatctgtgggaccttgaattggaaaattttatcagaaataaaaatctaaacctggatttaattcaagagtaagttataagtaaatcatattctttaggctttttgttaaaatgttaaatgaccttctcggtcttagtctagattctctaatgttttggaaccaatatatccaccctcaaatatcaatccagtaagttaatatatgtttaatgtattatagtttcaatgtcatcgatttgcaagaaataacctttaaaactttgcctcaaatgttactaattaacgcagttgaatataacctgggaattgttatacctaaattctcaaacggccaaaagcatactttacagattgaattagaagattttaagtcttcaaactattctaacattctctataacggaccatttgatctaaaattttatccgaaagtttcagtttcatgccctaaatacaacttgtcaatatttaaggcttcatcaaagttgtgtgaccacaaaggtatgtttatttactcttttattgtatagatttccacggatacggatttcttttggattcatccagctttggaatgggattaccgagacacgtaaagtccaaaattgttggaactggttacccttgtaatccaatctgttcatacaactatgaattgttgtgcagtaaatttaaccagcacttaactggaattaacttatactgtttgatagaatctttggttcaaacagatccttttttgagatttaagctcttgttaactttgggatactcatttcttaaacatagattttataaaaaagctctccaaatagccaaattcttgtcatcgaattcattttcaatgacactttacgttgagtctaagatcctggaactacaatgctattgtttaacaggtatttttctatattttacaaataattaggggataatgaatcagtggagaatgaatacaagttgataaaggataatttgaagaacttggaagggtttgatggatttttgaacctgcagttactgatagtcaagtgttatcactcatggaatactaatgattacaaaccttgtatatcatacatagagaactacaaggagtcatttttgcacgtaagtttcataaaccaaattaaaatttgtagttgttctctgtaaaaaattatgagtgggtccctgttttctttctttccctgttaggctattgtaatgggaaactaaatgttcactttgactctactaaggttcaccacgaattagtgagatattgcaacttatcgaaccttccaacctatacaaagtgtaacttgttgtggcttctcttggaatcacttataaggttctttttaaccatttaaaaattttttagggtgggttcgtattcacatgcttccaaaatatcaacggatttattatcaattttggagtttcaattcggacctttgtcaatggaatacttgagatcattgtatgtttcagcatggttgcaccgtcaaatgggctctatacactttcttcacccatacctatacctttcaaactctgaaaatttgatagactacaaggtataacaaacaaaatagatatgatttttaggggcccgaccattggttcgaaaatgaagatttggttatggaagaactttcttcagggaataactgttttgagaagaggaaacacctgaaggaatctcaaaacctttatactactattttggacaagtttttatacctgtcaaggaaaaataatattaagattttggagattttaaacaatatagaccctgaattttgcacctccaaattggagaaacttgtaaatataactaagaaaagtattttgaaacatggaaatcagcaaattatcgacggactagaagacactattctactgggctatcttgaccagtctgaagtgtttcaatctaagattatgctagttctagagaattatttgactctaaagatactttctctggataccaaccaataccatgtattttttaacttaaatattgtttttaggaagtagccaataaactttacagtgcatatgcaagtcaagtctccagtgaatttacgaagcaactatctacaggaacaaggacagaatttggatatgttgagaccaaacagacatacagttatggatcacgggttataaggttaccagaatcattttcatcacacctatcaataaagaaaaacataataccaaaaaggtatttttatataaaactataactactttttagtggccatgatctaaggtcaatagagtgtttactaatgggagaacctgaatatagtaagaaaagaatatgtgaaatgagtctttcaagctgtgattcgggggttgattttaataactggtagatttaaccaaaaaatatacacatttaggttcgattcagtatttgattttatacatccaaaatgtgtgttatctggagataaatttcaattaagtttggacattttgaggaacttctcgacgccctgccaaaggctatttatattggggcatttggcaagtatctccagatcagatttaaaccaaacacttacatttaaattatttaaaagaaatatgttaaattcaatgaacagtaaagggaattttaaataataaatttaaaaataatgtaatatagttgcacactataatatttgctagaaaatgcagtcttcttacatacacatttagtctatttcgacccatgactgttcatttcaactttggaaatgtaataaacagttatgtgaatgtaattttcccaaattcagatcccttagacaaaacccatgattcctcggacccatacaaggatgatgatcaccctcatgatatccctttacgccataaaatagtctattcggccttttcaatattaattatcttaagtttggtgtttttgtgcgtaataactgtcaatatcaagtcagtttttatgaccaacaagtcactagactatgcaattgatgatatcgtagcaccaaatacagatggattaatttattttataaatgagataaacaaaaaaaatgaagaaatagtacctgaacctgattctaaaggtgggccctcccagccccttgttaaggatatttcaatctccctttctcataatggtcaaattaataaaataaatgaacttaaaacaagaactgatatagctctttggatacaattcggtttgatcccgaatctttaccaagggttaaacacatttaacaagtcagtagcaaatgcagttttaatatcgttcaaaggaaaagataaagaatacagacgtgacatccctgaagatattttagcagcttcaaaaatacttttacattcagacccttcaaaatacaatatgataaagtccgaaacaggggtttacatgtattataaatattcttatgatgataaaacctcatcgaattatcaatacctttacggagaagatattgacgagataatgtcaaaactaatgcagggcacaggatatttaaaggaatttccttattttcctctaaattcgatcatatcagatgagtcaatagatgaaatttcagtagattttctaacatataatgtaatatcggatgtaatcagttccgtaaatataaagtttgatttttccaacagtgaaactactgttaatggatcaaaagagtctgagactaaaataaataaccacttaaatgttttatcctatcgcataaatactactctgtttcctctggttatagacggaggcttaatgctagttcttatcgcctttacaatatatacaataatcctgtacaagttatatccaaagtctttctttcttttcgattacatctttgactcgatttttaaaatatctgtagtgatttctttagtattttttaactcaattgtcttttttgcgaattattctgtacctagggtagggtcaacgaattgtgacactgggttttgtgtatccaaaattgtttttggatatgacgataacccattgaacgctgataaactgtttgatataacatttgattacttaagaggcagcataagaatttgtgttatagtgtttggatttctttgcttctttgcattactctctgttgttacatcactaatcgccacatggttggttatcaacaagaaccgacacctatccattgtatataaaaagtattactatcatttgaagattcccttaatttcactagttgccggaacaggtatttctatcctgttaatcgcagtttttaactcatctgtttcccacatgttcaagtcctcaactcagtcgatatttagaaactttttggctctatttaacttgatagtgggtgtttcaaatgacgcaacactcaaatacatcgacaattatagcattatatattcctttgtttttatcatgttactcttcatttcattttacctggcagtgatactcattacctcattattggttatgtttgacgacaatgataaagaacttaatttttacaaaagacctgtgtcgtggaaattcgataattatcgattattgaagttcttttataaaactgcaactaggtacaatagagttaagcgttttataaaagcaaaaatactaagaatgagtgttatcgcagatgattgtgctcgagaaagactgaaagctcaagttaatcagatacaggaacatgaatatgaaccacctgaaactaagaaaaagtttaaattttgcttaaccacgttttccagaataataacatacttagctatgttagcctgtatcattgcattcatatacattgaagttaactgtatcaaggtttcaagagtaatttataaaactgtggatgaattagtttacaaaaataaccaaaaatggttttttgatattaagttgtatgataccccttatacagaaatgttaaaggatgagaatctaaaacctaaaaatcacaagctaaacgtgaaaatggagtcaacactacccaatgtgaaaatcaagacctatgacgatctttacaactggttaaatggtggtgctataaaagagttatttaaatggattgataccagtcaatcggataatttgcctaaagacgaaactcaagtgatggctataaattcaagatactatctatatccctccaacaaagcactcttattaagtttgaatttctataaaactccccctaatggccttattactgatatgaaaaagataataaggcaggacaaatattatcagtttattacttatgataaagaaaaatgccagattagcacactttttgaaaccattccacacactgttaaagacgttggaattgacttcattattgtggactctaagtctaagaataagatatataatgggtttttgaatttttttatagagaaatctgggttgatggactatgatttgaagatttacaatgtattttcatttttccttccctctgaaaacagaagtgtatttttgttcatagtgctggcctctacttgcgctttcttcctcttcctactttccattatgataagagatattgtgaattttaaaaaaggatttagcatctattatccaagattaaacttcttttatatgattttaatgtactttttcaacgacatcaagagggtgtttgacctaattgtcattcctgttgtattgagccttgtggttatgtactctggaatagtaatttaccacaaaataatgagggatcacttcaatgatatggaagatatatactacagatactactaccatagactatctggaagaatcctctatatgcactcatccttgggcattcttcttttggttattatcttatttgggttcattctgaagaatgcaactgtgaggcactatttacatgtagtcatctctgtcctctatcagatgaggtatatgtatctcaacattgttttttactttatggtaatggttttcacattcctattctttttctacttcatttctagggactattttaaaggtaatgtttactatactaaataattttcagattttgttaagggaaataagtttttgaagaggtgtataaggctgatactacatgaccatcagttctttggagactttaagaataacaatttaactgagttaatccttttcccactatgtctcactttcaaaatatggttaactaaccttatattttaccatctatggtcagtatggcctaaatctgacgatccaaaattaggaaggcgttcggaagatacagattttctagatgatacaaacgagttagaggagaagttcaagcactctgacttggaagtaacaggtttaactcagagccaacttgacgtagtccccaaagaagtcaaaactcaggctgcacaggaaacactaaacctatacagtaaattcgaagaatatatcaacacattcaatcatagaggtttgatttacacacttttcattggatctaggtaaacataaactgaggtatatggagtctttacacaacgaggttggagatgaaatgaacgaactgttagatattagcaacaaactcgaattcaaagttggaataataacgaagcagactgagattctaagggataagtcatacagggatttggatgagcaaatttctattttagaacaatcactaaatgaaaagcgtgaagaattaaacacgattttcacattatacaccgaaaaatccaaatcatgagagtgattcttccacacattttgaggattcctcacttatactatatttaattatttttgtaatttattatatataaaatgtgtaaaatatactattatgaatcttaatcttgtatccagtccccttttgtttatcggttcaaacttaaatatacacaaatttaatgagtttaataaaattttaactacacataacaaatatgattttaatattaaatccagaccattaattccttctgaagatttcttaaatcaaacccaaacaagttttaaatcggataaattaagaaagaatcctcacttggattctgatttggtaacatatactggatcagctcttcagtacgataataaacataaagattctacacctgttaatgatttttctacagttttctcctctaaacccctaattaatacactttctaagatttttgcaaaggaaggtttgtcaaaattgaatgaataccaattatctctttttgatgaactgttgaatggaagagatgttatacttcatagttacacatcttccgggaaaacattttctgtacttttatacatggcccttcgatactattatcagttggacccaaagtttctatcatcggtttcattttctcaaattctaaatcggattaaagatgtacaatataacgatacattacattttaagagacaacaaactcctttaaaccgtagagttttggttttatgtccaacaaaggagctagcagcccagtctgcaaatcaggtatacacattttacacattattttcagcttattaattttactggtggaaagaaggatgtagttcacttaataatagatgagcatgatgtttgccctaaaatgtaagagtaactatagttcattatttatagagcccctgaatcgatatttatagttgggtcatcaaaccaggttgagtcatattttttggtaaattcctatgaatttaaacatgtttagcatgaagaccagaaacacacaagatccattctccaaacgattgattatgtattcttagatgaaatggacagattaatcaaagtgccaagtttgtgtaaaatttccacaaatatttacagatcaatatgcaaatgttaagaagaaaaggattctaaatgagaagccaggttcatcatataatatttgtcaggttatacttttaaaattaacttgaatttagactttgctttccatatcgcctaacaaactaagatttgtttgtgcctcggcttcaataaccagacaacacatacgcaaagtcaacagcttgattaggatgtacagaaatagtagagataacttgacggcattgataaggtatttataaagtttatttaatttctgtaggaagaagataagcgcaacagacactggaagatacgtctcaattcctgaaactattaaccatttttactctatatcttctcaagatactcaaggtattttgtttaaaattaactcaaatttagagtccaaagttaggaacttgttgaatatgttgaagagggatactgggactgccatcgtgttccttagttcaggctctctgttttcactaaaagaaagtttagagaaaaataatattaaggtaaattaagcctttattaataaatttagtgtaaaatactacaccatgagtttggaattagagacgattacaataaagaggaaggtgaatcggggggaaataggtcgagtacgtcagttgaaaagattacgaaattgcaaaacagtattaaagaaggagatagtaagttgaaatattaaataaataaaaattcagatggacatgtcctactagcatctacagattccgccagaggaatacacctgtcaatggtaattaaatttatattaaagtatttttagctggactcagtatatatacttggaagaccaagaaatgtaaatgaatacatacatatatcaggtataaaaatgagtagttaaaatgtgcagggagagttggaagatgttcaagaacaggaaggtgtataactattgatactgacgagagtataaagtaggttatgttaaagttaattttaatttcaggatattgctatcatggcaaaaacaaatcaacacagagatttcacaaatttctaagtcaaaacaacacagtgaagtgagtgtaccatggtcataacattattccaattaaggaatccttgataaattaaatatcttactattccatatatgtgttattgtgccattaattgtcttggtgagatggggttactaaattcaacattataaagtagattccatattttatctctgatcaattggtagtatcatatatttatttaatattttcgtagttttcaaggatttataaactttatcgggaattaaaggtattgtcagatacccaatatcgttatttatttataagttttttccccttataatattaacaacatattattaatataacaacaattgatagaatctgagatattttatacagtaaagccgttattgtacccttgaaacaatagtattataattatatatcagaacaccatattctatttttattactaatttgattttagaaataatttctaacatataagatgtcgacagttccagttagtgaattaaccaaggagcagagggaagaattgatgtgcgtttattcctcccttgtcctctacgatgatggcctagatgttactcaagacaacattcttaaactagttaaagcagcaaagggagacatgcaaccatttactccgatgcttttcgcccgcgcattgaagggaaaggacctaggatcattattatcagctgttggatccggtgccgccgcagctcctgccgctgcttccgcttcatcagcagccgcacctgaagaatctgcaaagaaggaggaaaagaaagaagaagaggaggaagacgaagatatgggattctcactctttgattaatctcaaccacccaattcttctaatttactctttttcatatcagttattacattttcaaaaatatatttatttttacaaattttaatttaaaattttttaataatatttggccacttgttttttaggctattttcccttttcagtttacattttctagtataatatctgtaatatatgtcaacttcagatgactggaatgacattccggatgattttgtactcccggaaggctcggctgaaagaggagcaaagcttttcaaaaaacattgcaagcaatgtcattctatgagaccagataatcgccaaactggaggtatagtggatctaaaatctaaattttaaaattttaggattcagctcaattggtcccactttattcaatgtttatggtcgcacttcggggatccagaaccttggaggactgaacctgatgacccattccatgaagtcatcaggaatcgtatgggacgacgcaaatttgatgaggtttgattctttgttaatttaaagtgtttaggtacatgaaaaacccgcaattgtttgtaaataataaaatcgggatgaattttgccggacttccaaggttccaggaccgggtggatattgtacacttccttcgccaactaaactatgaaggaaaatatggaaaggaagtgttaaaggaatgcgagaagaaatagttcaagtaaaatgtattttaataccaaattaaaatatttcaatgtagtttagctgttgaatattatattaaaatatgtgttaagtattaactaaagttttgaaaccatataaaacactacatgatcctacaactgtatggaagttttacaatggagttgtcattgtcgtctctcaaaattatctcaatatcatcgtattgaacctcgtcccagtgtaatgtgtgatgacggatatgatcctcaaaacgctcacgtgcactatcatcctgtggctctgagtcctgatagctaggcttcctagaaaaaacgttgaaatacgtacgagcattccacttattctgattttctccagaactgtctcgagtgcgcttagataaatactctgtaaaagtggaaaatctttgtttaaaatagtcatggacaggctcatcaacatctaaagatttataaaattgtaaaaacataccattcttcatctttttcgagtcttttctgccgagattctttattttatggaagaatcgtaccttaccctttttcactgaaacgccacaaagcatctcgtcgagtaaggagttatcagttattgagtcaacattgtgttcatataggcatttatatggtccagattctgaaataacttccaaagaacgcttattaacgacttcgcattttatgttgtcggggattttatccaaatcggaagcctccaccgtcgatgggtctaggtcaggcggttgttctataaaaagtgcgaaacactcggataggctatagtcgaaattagtgaaatatttataaaaatcaaatttgtcgagatgtaggggaacgcttgtaatcattgcaaccagcctatctgtggccttacgattatacttaattaaataatccatggtatcataaatcttatctttaagcctcaaatcataaagcatgctaaatgacctaacgaatggaactatgcttgcctcgtttgaaacaaccggaatttcagctggaatatcacttggtatgtcgctggagactgaaaacctgttgaaaacgaagaaaaaggcggcgattttcttatatatgtaactcagtgtcgtaacagactctttttcgtcattttgatcatcatatactatgtgtacgctagaagagcgaattcttgagccagaaaccacatttcggggaagctccctatagctgtcaatggttattgagctgtcaaagtcggtagtgtcgtaaggcccacatgattgaattcttttgagctctcttttgttcaaatctgaacatattaaagattcgtgggaaatatttgccatagcaactgaagcgagtgaaatgttagggcagcgtatttattccaatatcatgttataaccataaatgcctgattatttgccatcatatatatttaaaaattatattaaaaaaataaaacccagtgaatataacatttcacgtgaaatattaaaaaattaccacaaaataaatccggctaatttataacaacacaaacataaattcttatcaacctacttcaattctccataatatttttatgattttttaatttaataaattaaaatttatggaattcaaaattcttgatttaccatcttatttttttactttaaaaaaagtctagcttaatcgttattaaaccaaaccattttatcaattaatttatctttcatatagattaaaaacttatttttattaaaacgtatttggtaatttttgtttaagatgtacatatgaaccaaaataaatatatattaatccattttaaccagcaatagaatttattctattttaattgatactaatatattttgttaaatatctatatcattgtcaatgaaaataataattaatatatgttaaaataaatggttaaattgatgattaataaaaaacaacgctattttggcatttttatattaattattccataaacaatttttatctacagaatctttaattattttcattaaaaataagtaatatagctgattcgtttctgtaatatcccaactgtttatgttgtgtatggtgtttgtatatttattctgtagttgatcaaatactaataataatgggtgaaaactttaaagaaactaaatatggtaccatctatagagtatctggcccatgtaagtatataaataggatttagactattaataatcaaaattcctataattttatctttatatagtggttatcgccaatgaaatgcctggaactaagatgtttgagctcgtacatgtcggccataataacataattggagaaattattcaaatcgatggcgattctgtatatattcaagtttatgaggacacgtgtacgtttatatttagatatatatgccataaaaagattatatgttcatttaatttattataaaacatgaatctaatttttacagccgggttacgtgtcggagatccagttaaaaatactgggaaacctttatcggtagaactaggaccaggcttactggattctgtttttgacggcacacaaaggccgttaatacaaattagagatgtgtttcaaaaatactatgtaccagttggagtcaatatgcctcccctagatagaaaaagattgtggaaatacgacccatctcccaacttcaaggtgggagatctaataacaggaggggatattttcggaactgtatacgaaactgaaatattcccaaaccaccagttagtcaatttagtagtctaatgataatttagtataatgcttccaccaaatctaagcggtagaattacttacatggcgccatccggtgaatacacagttgaggagaagctgttggaactagaatatctagataagaaaataacgtgtaatatgtatcaaatttggcctgtcagacaaccacgtccaattctgaagaaactccaaggaactgttagtgtcacttttgtaatattttatttaggaaccgctgctaaccggccaaagagttttagattcattgtttccctcagttaagggtggaacctgtgcaataccaggagcatttggatgtggaaagacgtgtatttcacatgtaagaaaaattatgtttacttgattgtaggcgttggcaaaatacagtaataccgacgttacagtatatgtgggatgcggagaaagaggaaatgagatcgctgaggtccttaaagaattccctcaccttaccaccagagtaaatgggaaggatgtgcccatcatgggtagaacctgcctagtagcaaacacctccaacatgccagtcgctgccagagaagcgagcatttatactggaattacaatttcagaatactttagagacatgggttttaacgcctgtatgatggcagactccacaagtagatgggcagaagctctgagagaaatatctggccgtctcggagagatgcctgcagattcgggctaccctgcttacctttcttctagattatcggctttttatgaaagagcaggtatgtattaattaatattgaatgtattcaaaattgagtaaatccatattttaacaaaactataatattgtttaggtgttgcccaatgtttaggttcttcagatagaaccgggtcagtaacaatagtgggagccatatcaccgcctggaggagacttttctgaccctgtaactgctgccacaatgtcgatagtccatgtattctggggtctcgataaaaagcttgcccagagaaagcatttcccctcagtaaactggactaactcgttcacaaagtacgacaagttgcttgagacgtactttgaggataaaatgcctcgattcggctacctcgtgaccagcatcaagtcgatactacagaaggaatcggagttgtcggaaattgtacaactagtaggaaaggattcactttcggaagatcaaaaactgtgtttagaggtggcaaagatgatcagagaggactttttacagcagaattcattcacagattacgacttcaggtgcccactctacaaaacgtttgggatgatggataccataatcacgttctataacgagtgtctgaaagttataaacggtaattttaaatttagataaaaaatttttagattctacgaaaagaggaaaccctattggatggagttcaatatacaacatcatgagggagtcagtgaacaagataaccagactaaagttcacagaccctaggctagaagaagaagaatatgctaaaatattcaaagatttacatgaagagattgttactggtcttcgctcaatgttagacgtctagaattaacattttaactaaattcttgactggttggagattcatccaaaagttgactgtcaaacctgtgagtgaccttcctcgaattcactctctgaagatgcgcctcagcttcctttaaattatcttctactctcttttttaatatagtttttgtttgcgccttatgtagttcttcattattaaattcaaaagcgctgttaggagaatggaactcagcgctagattggggtgaaacggtggcgtacatgttatctgtgcttaatcgaacatcatcagcctgtttaaaggcagaaactccatcaggaagttgagcaccgtcgaaaactgtacagtcttcaattgaataaaaattctccatgaaatgtgtacaggtgaagagattattcgagtgactcttcacatcctcgacaatggtatcaagatactaaaaaatatttaaaaaataaaagttacgtttaaaagagtgttaaagttagaaggtgtgccgttgaacgtatcctggatgaaaaacgctgaattctcctcaaagtagtttgaattaatataaaacaaaataaagaaactgtcaaatgggccctgttggactccataattgtcctaaaatagactaaaaacaatgaaacgtaccatataataccatttgtgtaaggaatttagtgcctcttgacacttaacacaacactgctcatcactaaattcataatccattttgaggactattactcaatacatttacaaaattttaaattatcttaaataaaaattgaaaaataaacattatcaactagttaatattatacacatttaatatacaatattcattcaggttttcttactcatggggaaatttattcatagaatttttattccctgggttatgtacccatttaaataatcatttgtaacatattaaaatataaacaatataatggactgttattcgattctaatataatgtagtattttgttgttttgttaaactaattacaatattagtattctttcaatattcttctaaaattttacgaaattcctttgttcattaaagttattctttattttaataattgttaaatctaaaaaatgtgttcaatgttttaattccacacctgttttgttttaaaagttgatgaataatgtcaaacacgaatcctaagttttccactctggatgatatacttgtcaggctgttgtcgtttgatttctatagagatttgatccaggatgggaacgataaccttaagttaatccagaagagaataaagtggcactcacctctaaagcctctgccttcgcaaatcactaatgttgaagattatcacacatctttcttctctttgttcatggtagaatgccttgagatactaacgcagtcaaagtataatgatctcacactaccagtggtagttgagccggtaagttaatagtttgataatcgtgtttagatatcatgtaacatctctggagttttcggttcagtcacttttacccttagccaaccacttctggatttctcggctggagatttagtgttcttgcatatctcaaaacctaattttgttaatctcaaaagagacattaatagtaaattcattaatcacaacggtgattcaactaaatcagtgttaactgagatgagtctgtcacatccaatatatgaagataacttgaaacactgtttgggatatgtaatatcaattatgaagaatagaattttggtaaaaatacttctacttccgccaaaatttgcaacaccagagacttttgatgatagggatttggacagggtcaaggcgattcaacaacagctgagttcaattctttcaactcacaagccaattggtaactcaacaataaagaatgcatctgaggagtggcatatatcaaagctgatatcactaactacgattatgagagaatttaaggggctttgtatgctagagcatatgcccctcaaagaatatctactaacaaaagttccggaaaataaggactctcaagacccagatacctgtaaggaacttgttcttgattttgagatcccgaaacagttgaagaaaactatagagtcaaactataactcagggcaactctcagctctgtcaaacagcttaaagaacacaggcatatcactgattcagggaccaccagggacgggcaagaccacaaccatcatgggcatagttagcgttattttatactcttcacttccgtcaaataagaagaaaaacattaaagaatcgcagaagagacttgtcacaaagtcgaatttcagaaaaaagaatttttggttttttggtgatgaaaatgatgttgaggataaaattacatttgatgagcttcaatctgatgaaaactacgactactgctcaattacagaccacaatatatttgactgcttcaataagaagaatagtaaaaacaacgagaacaaaatacacatcggttcagagaaacagagtaataagagaatattaatttgtgcaccatcgaatgcagcaattgatgagatagtaaagagacttgtgagccctgacggagggatttttgacgcgaatggaaacagatacaacccaacggttactcgcgttggacctaattttaacgaagatttgagggaatatagtcttcagactaaagttaaaaactgggactcgaaaaataatttatccaccattagaggagatagaagtaacacgataaagaagccaacaatcataatggacatacttttgaatagtgaagtggtgtgttcaacactttcaggatgtggttctaaggagttacacggcctactaaactgttttgataccttaattgttgatgaagccacacaagcagtggagctgtctactctgattccatttaatctgggctgtaaaagagcaatactggttggagacccatgccagctctcagcgacagtttgttccaaggtagcaattcagttaaattatgaccagtctcttttcaagagactccagctatgtggatacccagtaaacttcctgaaactacagtaccgtatggacccactgataaccaggttcccatcaatgtatttctatcaaaaccagctaataaacgctaaagaaacaacaagtgcgcctgaagaggactggagacagttcccactccttagacccacggtgttctttgcacttgactcacaggagtccatgagtgacacttcatacgtgaatgagatggaggttgacctggtgtgccagctcctagacatcattgtggagattttctccagtattccaggcatcactgaggaggaaatctccaagaaaatcgcagtaattagtccatacgcagcgcaggctgagattttaaagaacacgatatcgcaaaggattaaaatccttccgacactcgcctcacagttcagggcacttgcaggagcaaagacgcatcaaatatacgttagcacagtggatgggttccagggaatggaaaaggagattattatctttagtgctgtaaggactaactatgtagggaacagaaaagctaggaattccaggattgaggatctcacctcacggtcaatactgactataaattctgagcctcatgaccccagggaagctaagaagttttcaaagctcactgacgaatacttgaggaatattagtgagaatactccagacttgaccaccaatgttattgatgcttcatttatagcagacaggagaaggattaatgtggcaatcaccagagcctgcagtaatttgtttatagttggtacgtttttattctgtttaatttcatttttaggaaatcctaggtacttgctggatcacaagcattggtcagcactctataaccactacgctaaaacagggtcaatttttatttgcaagactgtaaacaactctttggaccctaaatttctgaggaactggtcccgagagtatctaagtcgttccccggtaagttaatctagtgtttaatacgtgtaggaacagtataaaaagttgctgaagaacaaataccttaaagattttgtaactaaattagtctcttaaatattttacatgcttattacaagagattcctgtacttcattattttaatttatttcgtttctggagtggcaagtggtaactccataatgatgaaggagggagatacattagagtcaggcctgctaacttttaaattagaaactacatcaggaaaagtggacgatgaccggtgaaaaccatgcttagtgtagaagtcgattgttgaactattgtactcatctgcgatagcgtaaaccttggaaagtttagcgtcctttaccttgttgattgtgtactcaaggagcctaacagctaaaaaataaaaattgtgaacttacataatccaatgccggtgtgatttgacaagactgaaactgctacaatgataactgagaatggatccggtttgattttagatttactgctttttccagaaccatgcttagagcttgaaggcgataaatccggggtacagacctcgcaaatcatggtagctgccgaataaacggaaacaaaggctaaattttaattgtttaataaattttgtaaaaattacctaatgaagagaacttcacatatcttttcatgtgattgaagtcagggaattttttcccctcgtctaggtagaaactgagatcatatggtagagattcctttagaagaatccacgactgacgtactgagtgaatagtgacgtcaacaattctaagaaggccgtagttgaaagagtatttgcctgaaatgttgagttcttgatatctgcgattaagatcatctagaggatccgattccttatctgacattgaatattaatacaaaatagagtatcgtaaaatcatgataaataaatctataatttacaaaacataactaataatagttggctataattttttttatagtgtatctgtaatacacattgataaattttagaataattttgattatttttatatttttaactaatgaatttgaatttaaattttataaaatgtaccatagtttctaattgaccctgtttatttaatggataaatcctgcgatttcaggaccaagtcgttgtactggtattctgccatcactggtaactcggatcctccatcacgaccttcttttgatgaaacgattgttgacagatactctgctatctcagcgttgttatttaatcgcctgctctcctttgattcaatagtttctccgtacattatccttaataatgaacaaactttcaagagtaatccctacgggaacctgattctacctaaaatttcaaatttaatcctctttataaagtctaaaagactatcttttaacaaaataggcatagagctaatagtccatgataccaaagtcattggcgactttataaatcaacttgagcagacaattacgagtagtaaggagtcaggaaacaaaggggcaattcgaaaacaccgtgaaggtattattagttgtttgagatacatttttcaaattgttagggacaatgtacagaactatgaaagactcaaactcaagtatgattcaaccattgacaactacatgaaggtgatgagtgaaaatcttactgagattaacagcctagacgacactagttctgtggattctatccctaactcatatttacagcattttgttccgtcagaaaagtctgatttatctcatattttatacgtcgaccctgaggatgacaaacctaaacctccgtcgcagaaccagaataatactgtccaaccacctatagatcatgatgtgaacattattggcttaacgcgttctcttggtgaaaacttaggctcactcaggtatgagaagggctcttacaacatcgcaactaattttttggaccagtctgagatgaacgatgagcaaatttcaggcactttaatgatgcagtatgctaagactgtaaataacattaaggaccatctgaaagctactcaactgagcacaatcaccaacgttcaacagcggctcactgagatttcctccatgtttgagaagttcactgggactgtggttggccagatgggtctgttcgagaacattaatgccaacgtcatggagtcaataacaaatatagagaagacacacgagactttaaaaaagactagtaaagagcggttaccttatcatcatttaattctttgttacgctctcgtgggactttcaattttccttctatttgtcgattacttaaagagtggcgggggctcatacttgttttaatttcgcaatttaatatattttaataatagtttaataatatctcaaatttttaataatatgatgggatataatattttaatataaattatacattatccttttttaataatgataaattatactaatataacataacgtatatacaacaatttaacaacagattatcgttacagaataatttgtcttctttacagtaaatttatcataggtttggaggttaaacattaattactgaacatagaacttagtttctgatatagttttactctcctaaccctctgtacttggaaagatcgtacttgtccttatacttctccaagtgctccttaagttccctcctttgtgcctaaaataattttagggtaatcgaacaaaccaataagtcagggtgaggggcgtcatagacgtcatcaaatagtcctggaaggagctcatatgccttggtgttttcatattccttgatttttttgagcatgtaggaagttgcggactttcggagtgcagcttcctcctccttagaccacaggcctttagattcaaggtataatccaaggcgctctaaatgatttattaaagttaattttcttacttattgggttaactccatccattgcccatgcctcaaactcgccctttcctctgtactgtgaggactcatctgaggtgctgtggtgcccaatcctgaagtttttaataaactgtttaaaacaaacctgtaggtcatgtactcaatcacgattggagtggagtgtttaacgcagtactctctgcagtatttggtggccatgtaagaagcaaaaagatcattcccgtcaactctaagtaaatttagggtgcataaattcaaacctgatggaaggaatacctagtgcaacacctctaattgcaataccatctccaatgtactggtctctaacgggggtagaaatggagtatgagttgtttcggcaagcaaaaatagtctgagcctgacgcactgctgcaaaattcattgctgcatggcaatctccttcagaagctgctccttctccgaaaaacaccatggccactgcatcggctccttgcatcttaagggcatagccggatcctgatgcttgtgggatttgagaggagagtggagtggtaatggtgtgaaggttaacttccttctttgagtaggaaataggcatctgcctacccttaccctcatctttgtgtgttctaaataattttatatagtgaaaacatacgagaaaagttgtgcaagaacgtcgtcttcggtgcaacccttaacgtaaataactcccaactccctaaaattcttatagtctttagtaaagtacctgtattggcagaacaaatggtcttgaggctggagagctaagcccgctcccagttgagtggcttcttcaccctggttttggatatagaatgaaatcctccctattgaaatattaagtttaaaaactaaccctgtctctggatgttataaaagaggttatcccaaacattcagttttaccattatctgcaagtattccttaaccttctcgtcggattcaaagggtgatttgtgcccttcatgtaatgttccgtcggtcttcatgacttgaaagatgggcataacttgagaatctgtgaccatttccagctcagttgtgaactcagtgtatctgagtccctggacatatggcttgacctccgagggatcattgaatactcttggattttcaggtcttttagaatgcgtggtgtagaatgaaattgaggcattgaggtttcttttatttaaaagaccgaaaatggatgagccatatttcctgattgaggcggggttgatgggtgataatttggacaacatggtaaaaaaatacagtaactaatagtatagaaattttatatcaaaataaattgataaaatgtcttaatttacatattatttaagcagaatagggtgaaattctataaaaatatatagaattatggaaataatgtagtaaataatataaatttggtcatgaaagaccccatctctacttccaaccacgatgaatcacacatatgtgacaaatgaccttaatttgtattataaaatgtagaatcttattagaaagttatataagatattatatttaataggattatcttagaatccttttataattttaatcctaaaagtttttaaattctcatgttattaattgattccgttaaatacttctttttatatatttttgactaattgtcatttatttttgtaatttatttatattatgttaattttgtcaaaattcagatttaaacaaaacgttttttcttcctgtgttagctcattcattaatgatagaaataactggtcaaatatagatgatttggtaaccaaaactctaggatcggtagacgctaaagttcattcgccggattcccttttaaaacttgcttataaaggactaaaatatcagatatttgacgcatatttttggaatgatgtgtatgataaaaccttcagatctaaggacttatttactccttctcagtgggttagacttctacacatatacaaacgtattaaggttcgtaactcggaattgtacaatatagcactttctggtattgagaggaacttggatagcttatccctaaaggacctttccttactttcattatctttttcatacttttcattttgtcccaagtcattgttttccaaaatctcgaagactgtttgtgatcgtcatagagaatctaaacttaaggagtttgactcatctttagactctaaccacattggtgaaaatgatagtcacaccaaggccactgtgtttaaaaagttgaaaactagtgagacggtatcgtatattcacatgattggatcttacgccaagtgtggattcgatgataaagagctctttgaggttgtaactgagaacctaattgagaatattagtaaccatcatgtgacgatatcttctaacctactgatgaagacattggattcctactctaggtatctaaacttaatatttaaccttttcaggtttggttacagaaatgttcgactccttgatactctcagcaatcaaattattacagctaaactgtcagctgaagaactttcaagggtaaagaacatattctcacaacttgaatatgaaaatgacacaatgaataatatcttttcatacagactgggcaatgtaaattagtgtaaatttttaacaactttcatcaatttctcagtaatgtcacctaaattcaatacacattatgtatactacctaggtatgatgcattttggttcaagttatcaaacaaatcagactccaaaacacagattccgctctttaaatcatatcttttcggccctaaaatttccttcaagccttcaagttgtctacaattattacaggttataaaacaattcttacttgtaagttagattcaaatccttaaaattaaatgaaacgtaacatcgattgtcaggaggatgagggtgaggagtagaggatccgtaccaatctaccttgtaatgcaaagtgtgaggaaagtcgtgcctagtgtggtctaaaaaaatcaacacagttataaacaaactcaaggttttagggagctcagattcatgctgtagtctggtaagaggtgttacaaaagaactcttaagcgaatttggagaatcatgagttttaccaagttctcgtaaagccttaaaatataaaagtttgtggacaaaccttgtatttgcggaatcttgcgatgtgttttctagttatataacccttagaaattagggttaattggcccttaatggttttagaaatagattctggagtttctggcgtcccaaccatatcctgtcgacgaataacattgctaaaatcattcatataatgttaaaataagtacctggaagaagtttcaacttgttctggagtctttacaaccttctcaaccttccttctcttcttcttacccatagtttgggttagcacaaacaaattcgattccattagatggaatccagtacaaatataatattttgagggaggaaagaaatattttacgagtaaactcatgttgtgtataataaataaatcaatgttacatatgctagcttggggtaacaaatgtgttttaagatttttactcattattaaaaattctcatttattaaagataatctaatttttataaataattagcttgtgcaattgcaaatctaatgtgttatcactcatagttaaattttaacagggatattaaagtgatataaaattggtgatcattttgaattttttatataaaatactttttaaaattatatttattaatttctaattttataaaataaaatttttattttgcacctttctcctaagtcctctataaataatatccatgagttttattaggtaattttttaacaaattttttcaagaatttttgtggctagcttgattttacaaatgttttttattttttattttatttttaataactttggataatttattgaaatggaaagcacgaaatttattcacgttggactgggtccgccttcaagataccctcagcttcgtagaagtggatatcaggaacttcagccaaacatcttaaatgatttaaaatcaaatttaaatgaagatgagtcaagtaaactcataaaaggagaaacttccagagttaatatcacggttgcaaaattcaacccgaaaactgtcaaatttgggcaaagaaaccaaaattctggttcaaaactgtccatcattaaccaaattagtaataagtcatcaataaaatcaggatcagagtttaattttgatgacttgagttccttatccagttatgacttctcaaaacttggctcaaattcaacaaataaaagtgtcatttcagaacctgaaagaaagaaatcaataagattttctattgataacttgtcttcatctgatagttttaaaataggccagtttaagagccttgagtactccaaaaccccctcagatataagtaaccgagggattgaacacctaaagtccgacactggacttgatacaacgtttgaaggttccgctggagatgacaagtcaggatatctgcttgatgaacttagaaaagttgtcaaacatgtaattaacgttaataggataagaaaccagggttcagatttcatctcgaatttaatcggtgttaattcgcaggggatggaaaacgttggatttagcgatgatccaaaaaataaaactagctcaaacccatccagatcatttgagaatgtacctctaattaacaaaggaacaaccacatccctatttgaatctcaaatcaattctccaaatccagtcgataggactgtgttaaacaagaattttaatagaaaactaattaaaatagtaagttttttacatttgactcttatttagagggaaaaatatagtaggattgaaagtctactacaagagttaggtgaccccctaaagcttataaacgtaagtttcccatattaatattttacttaaggacgatgctcctttatcaaacattattgaggaccatgttaacacaaagcgtctagttcatccttttcacattaattactatcccatgaaggttgaagaggaggaagaagaagactatgaggagatagagtatgaagtgacaacaaaaaaagaaccaactccagagaagtacgtttaaggtgtgtttaaatatttattaggagggtgaacttaaggcgagaagactatccttcgttgtgggcggtaagattaacatcatttaaaacaatggcaatatagatttttactaatcctaagaacggaataacatctgctggatgatccctaacttttaattaaattttttgaatgttgtaatttcattttttacattggcagatgtgtggaacttccacccttcattatcctaatttttaaatgtattcaaggattccatgggtatttattataatttaaaaatagcaaatatggaatcatagatattcttgttaaatttactctgaatatgattttgttgttttattgggtgtatgtcaaatattagttaactgatttctgtaatatagatgatctatggaggaaaaacgagaagacgaagaatgtgccgtttatgtatacccgttgactaagaatttaacctcagaacacttacgtgagatttttggccactttggaaaacttaaggacgtagaattaaataaatctacaaaggttttaatctaaaaatacgcataacgataatatataataaagcttatataaatactaccatgaaagacttgtttaattaataatatatagttttgtgtttatcatattaattataggaacactctgaggatagatatggagtcgtttactttgagaaatatggtgacgccaagttctccatattgcacctagaccaggtttctattttactttaattagttttagggcgagatagatggaacgaaggtgaaagtcacccttaccaaaccaaattactaaccgtgaattgtgaccgattttcaaaaggtctttgaaatctgcattggaataaaacgagttttgttgaacatataatcctttacatttaatattaaccgattttttaccgattgaatttaataatttgaataatccattttgataattatttccgtgatcccgatttagggatgagtgagtttaactattgttacacgctttgagagctggctgtggaactcttgctaatggactcgatataatcaactgtgagcgcgtcggctactacgttggctacgattctaaatctgtccataagccaatctacgagtaaaataagaataataaaatccgggtttatcatcgaggtgttcagaaaatatataattccaaacatatatccctggatgaactctgggagtgcgagactcactagtaggccactaagtacgattttgagaatcactgcccagtcgaagtcgttatcatttagtttgagagaaaaaattgcattgattacgaacccggacgctattcctgagccgtttatcaacgtgcaataattgagatatgtgtcaacggcctcaacgctgaaccttttactctttaggtacattttagtcttttcgaccatgcgtactgaagagcctccgacgaaggtgttcggcatgattgcaaaaagtctagttatgacctcgtatccaaactttctagttctacagaagtgtaaacaaggaaggagaacaaagatttggaacagtgttacgaatactacgcaggcaagaaggagcaaatatctcagacacagaaagccaaacataccttcctgctgaaccaaatcatactgaacaatcccggcaaaataaagcgccaggggactgtaacaaagcagaatccagtataccgccaacatgcttctgtgtataagctgcattaggtttctcaaaatctctccgtccttacccaaaaaatatgttgagacggagagaaatgctccgaaaacaacaaagccgggtgcgttgtagccatcacccaggcctccttctaatctttcagagcccagttcgctgtaattttcaactctcgtagttattatattacctgggatgtcgtgaatagccaatcctctgaaaaattttacaaaattggttagtggcctgtatgactcagaaataaatttagcaaaatatgtggttttggctgaggaatcccttcgcataattattagatacgcagccacgaagcttacaaataaggttagtactgtatttaagaaatagtgaaatagtattttacgtttaacagttgatcttttggtttcaaagagcaaagtcgttttagttgctgcggaaaagaccatgaataaaactacaaagccacgcacgtgccttaagaaaaaatttgccggcaacatgagcagtggcactcccgtttccttggtaagatttaatttaatgcaagaaccttgaattatggctataacgcaggccaggcatgtcacaattgccaaccagaactctttaaagtaggcccataggtgagatcgtttggggatgttgttatagctttcgttagcgtcgacgaaccggtccaagtcgtccattttgttgaaatgatgttgaatttaattaggaaaagataaaaatacactcaacataaatgtgaattaagataatacattttaatttaagggaatagagcgttatatgtttatacttaaataatttaatgtctatgtacacttgaggaaggcccgatttaaagttcaagattatgataaaatataaaattctcaaaatccatttaaattactgtaaaaatactaatattaaaatttactttaatttttgagaaaacattatgattaaaataatattaaaatagttatttccatcatatctgtaattggcacattgatccctgttgtattaacgaattagtgaaatctttagtcctcatctgcctctttcttattctttaatctgttatccagatacttttcaaatttacaaaataacctccctagactactttccggccatttactgttagaaacatcatccttgacaccagtctcagttttcacgtagaaactgcttgataaatccgttctgtatagtttcccctcaagagaagtgttagggaacatgtccttgtatgagctcaggcacattatccttggcataggaagaaatagaggaacgagatatgctgctagaaaacttgatagtagccttaccagcagtaatacaaaattcccctcctcgaaaaataaaaccattgacttcgattcatccagagttactttccctaaataacagttattttgatcaaactaaccttcaagcttactgagaaacatatttccgcatgtggcgaaaactcctctaactagcgtgtttagcatcatattcgccttcggtgttgttcttgatcttaagagtaagtacgatagggtatataagaaaaggcagaatgtgaattcgacggcaaagtactcgaaaagtagagctacgtacttctcggccaaatcataatatttatcctcgtatttaagagattgtaaaactaaaagtccagataaaaacttctttgtaaaccagtgcctttcgctttttttaaagtttgaatataccagccattccataagtgtgtggcatgtgtttgactccaccattgtgtacagtgttttcttgagactggagttgtaggaattattggtcacattgaaaactctgtggtatagatatccgaaaaatgacgcggcactgagagttcccagaactctagataccatgtcctctaaaaacaataattaaactaaaacgtactgaagttaatgattccatatcggtaatggaaaaaatgatggaaagcatatccatcaaatttggaggagtatcttcggagccatgtaaaaattactaaaaatgatacagaatactcaagccacttcgtcagaaaaaataaattgcctgtgtagaggttgtttaaacatttaaatagagagaaaagggtcttggaaaccgcaaggtagtagcaattgaataagaaattgtttataaaatatgataaaaacactaaaaggttatgaactagtgaaacggtcacattgggaagatataaatcagaatacacagatagattttttgaagtagatttattcttagtcatagataattcttaaattaaattttactaatatagttaatttcattgaatatgaggaaaatgtggtaataaatccattaataagttccattaataatatgttatggtgtaatgagctcattctttataacatgaattatttgtataatgttgatttttataatgtaattgaattaattatggcatgatatatgaattattccttttctaaccttgatttagatgaatctctgatatcatcgctagcaaaattaggaattacagagccatccccaatccagtacagtttaataaagtcttctacagatgaaaacagtaattttataaatttatttatattttattctttaggtatcatatttcaatcaaaatctggaactgggaagactgtttcattgtgtatattacttataaacaagattataaagaggaagttctcagaaaatgagaattccaaatcatatcttgaggatttatctcattttccaaaccctccaagtattttgtttggagaagttgtgttcatagtccctacaagtgagcttgcataccagatttatctctttttctcatcacttaaacaatatttggaatgtgtaaatcctgtattattgacatctgactcaaaattattggaactaataaaccgcctgaaaactaacgaattcaatatcgttatttcaactcctggaaagtttataacaatccttaaaaagaaaccaaaagataatgaaactgctgaattcggtataaagtcaaatcatttgcttcttaaaactaatttactcatattcgatgaagctgatttactacttgatgatcactttcttggacaaaccagatacatatgtaacaaggtagttaacccctttgtacaagtgatagcagtttcagcaacattcatgaaacctcagtttaagtcatttgaagatatgataaaccaaatcgatgtaaattacatagataaatttacaaatttggaagttgaggataataacaataatgttgaatctttggttaaagttgagcccagattaacatatttccttaggcacctactaatttctaaaagaatatcaaaatccgctgatatttttgaatatttatcaacatatgaaaggaaaataacaaaaattatattatcaaccagttacttgagcaggtacatggatcctaaaaccgctggctcaaataaggaatcatattacctaacctctgaaactacagaaactatggaccaggaaattgatttaaaccctccaagtttggttcttgataaggttaaattctacatgggaagtgttccagacgctccaaatattgttatgcaaattgggcttaaagtggaggtagtcgccagggttctgtttaatgttgattataaaaagtgtattatcttctgcaatcaaacccatacaagagtccaaacatgcaaactcctccaaagtctagggtttcagtgctacattaacagctcaagactgtcccatgctgacagaatgaagatgtttgagtacatctcaatagataaggtgattatcctgtgcacggacataatgagtagaggaattggctttccaaacgtagacctggttataaatatggacatgccaagctcaaaagaggtgtttttacatagatcaggacgctcaggtagatttggagccagagggacgtgcgtgtcagtttgcatggaatcagaagttgaaacttataaatatttcatgtactcacttaattttaaatcattaccagtagaggagctgcacaacagtgaatatcaggagtctgtttctacaatatttaagaattcagtcaattttacccctttattccagccagagtctgacctttcaaagattattagccctactcttaccacctgtatgatggattttgaaccgtttaaattcaaggtttcaataattggactggtttctacaaattacttaaggatatttaaccctgatgcttctagaacatttatgtactttgaggcgaatggttcagaattatctgtttacattagaaccctcgaagatggattttcctcattcgaaactatctttcatttagatgttccaaaaatattagtttatatcgacaagcatatccacaaagatccagaattttatagaaataagtctgatgtaactcacatcattttagaaacaagtaacacttcacttttaattacactcttcgcatttgagttttataaaatactaacctgctccagtaataatttgttggaattcgttccagttgaattagaatcacgttgtaacatagattaccaagacttagagtctgtattggacaatattccaaacttaacctgtaaaataggaactgaagaggaactttcactgcttttcagcacgctcacactagaccaaaggtctattaagagccatactgtaaaatattttattcaaaaaatgaagtttgatagagattttaatggattaatttatgtgtacactgtatattcagagaaaatacagccaagtaaagactcacaaacaaaaattatggcttttaacccacacacagttagcagatactttctgtcaaagcatgtatcacactggatgagcttagaaacttaatatattaaaacttataaatatgcgttaaatagttatttgcgatacgatgtagaaatttgaagttatttaaaaaaaattctaaatagtagaaaataaatcaaggcattggagggccaggttgtaaacccataggactcatatgttctaaggaatatttttggcttaaaacatactgttgtaaggcttatcctttaaaagacctccaggagatttgttatctaacaaataatactgttcttgtagttgttggatctaaaaaaggtgaaattacgattaatttacgtgtttacagagttcagaagcctcggcaagtaaccgataagtttcattttggaagtaagattgactgcaaatgtatctgcagacagtttccttctctttttgatcaaaattccaaactaggaaaatatatcaaaatctaaatcttacagtagtctctatatttactgggagggagcttatcacatgagctcctaataagcctgtcataaaaccactcgtgaggctcattgaaaattagttcatcataggtttcattcacagcagtagtaatgacgtttgttccgtcaccggaatttagctaagaatttattaagagctaaaacgataccctcaaaaggtgttgaagagtcacagggtctagagaatcatccacaaaacttatcttcactccaatataaaactctccccaaccaacttcagtaacttcgtacggaattgatgtaaaaactagataatcttaatgagtggagtaagtacctcttttaggatttaagaaggaagggtccaagtcaaactggactcgtttgacgtaatgtgtcatattctcgtcatccaaagaccttaaaatacaaacccatctgtgagtcatggaaccatatctctttttctcctaaattgaaggttaaagtggtggtagaaaatttgaatatagtaattcaggtaaacaaaccgaaggattgagaggaaaagcataggttccaacaacaattcttttacctatcttaatgtcttttaatctattgtgtttcattttataaaatagaataattataatgagaatggtatgtgatggattatatacccactagaatgataaaacgatgaagataaattatatcggggttttttattaataaacctaaaataatattagaaaattgatgtttgataaatttttatgttgagaagacgtaaataattgattttgtaattaacacctatcatacatttgattccatctttaatccctttaaatatttattaaatatgagatattatgttcatattccctttattattattaattttgagtcctctttgtttttcatatcttctccgcaataaaactcacacaccgtttacacattttaaatcgcagtcctatgacgattccgcctttagaacaccgcttccaggagaagaaatcagactacccaaagttaatgaaccttccggtgaaattctgttagataggcctttgattgagaaggtggcctatctgagaaccttcattgaaagtatagagataaacagaggtaaaaagccggataatgaagaatgtgagcagacagaagataaggattcaaatgtacaaaattctgagaatggaaacaagattgttgaaattaatgaagagaacttggaaccaataagggagctgttggccgaggaagacctcttggaggaagttctatccaacgccttttttacgtataaaaatagtaaagatggtgaatcgattcaaagacttcaagcaatcgcagaacaaatagtaccaatagcttctaaacttagaaaagaaaagtcagaactaaacattagcagactgatagcatgttatatggtaagtattataaataactaggcattaattttaaacagaacggagaagaggatttggacaaggttctacatgaacttcaggagaaaagagctcttgataagtatttattgaaaagattggatgagttaataaacttaactgctaagaaatacaggataagtgatagtcacccagcagtttcagaggagtttctgaaggttttaaaggacaggatagctgcagaaagaataacatacatcagaggaacagatgtgtatgttaaaactctggcacggtgttttacagtattttttaacgatcacacatttcattttagacagaagatgaggaagattggaacattatcataaaggtatgaatgagaacaactaatttttaaaacaggaaaacataaaaacgatggaagaattggaggagttctatgaatggatccaagatgggatagaatattgcagtaagtaaataaatagataaatataactgaaaactaaaatgtgtataggaaaaaacaacagaatgatggataaagtggaaataatggagaagataattccattggttgtaagacaacatccagtatggactccgagagatgaacacatagaatatgaggaaaatccaatggatgaagaaaagtataaggagtacaaaaagtatcttgaaggggactattttgaaaagaagggactaaactgatgaatttgttaaatctttcaatacattcaacatactccagtagatattttgtagatcaatttaaaataaagttttaaaatttctgaaataacaaatttgtaattaaatgaaataaataaaaatatacatgtgcacactcagactagcgatggcttcaccacatctaccatgtcgtacataattttatcaaacaattgattttttattttaagatatgtatttctctgttgtattgtaatttaaaattttttaaatataattccaagttttttgtttagttttttaacttgttgcgttttccctcaaaacaacctttccttggtgatttttttgactgtataatatttttatttcaattaagttttgattctagctgatctcgatgttttaaaaaatatcacgatctaacatattaaaatttcagtgatgaaaccctaaaatttggaacaatgggaatattcagatctgaaactatggtacacggtaccctagtaattcctcacgaaagagctagaaactgcatagacctcctaagcagacatacaaacatacagtatatcgacatgaacgagagacgaatggatagaccatataagaagtatgttcagcgtatcgaccacatggaacgaatgataagggttttgtatgaagaaatagccaagctcccaaactcaaagatagttcggcataacatagataactttctagaacatgataacatgtacagactagatcaagttgaggaatcactagttaaactgtacgaccagttccaaatgttcaaggaaaatgattccctactaaggcgtgaaagagatgaagctcttagtgaatactatgtgcttcttgtagcctctaagcagcttaatcttctaactccagagaaatcttactcagacatcccaaatacaatctcgttgcccgttacgaacctcgatgagtcgtctgattccagagaacacttgttaaacgacaacactcaatcggatactgaaatgattaatctttcgccttacgactcaaccgcaagagttacctcctcaatctcttttactaacatttcagggttaataagttctcaggaaaaggaagcgttttccagagctatattcagagctatgcgtggcaacgtttttacacttttgcatgacactaacgatttgagaagtatggttttgagtaagggtttggtagatcaagaggagctggacaccgataacgacaagacggtttttgtaatctactgccagtcctcaaacaacgacgcaacctacaataagataaagaagctgtgtacaggatttcaagccaagttgtttaactggtgtaagacccaatctgagttggctcccaggctaaaaacgctggaagatgtcattaaggacaagaagagagcgttagaggcttacaaggattattttaggggtgaaatagcatgcctcctggaagttataaggccgggaggaaacagcgtgatagaggaatggttcctattttgcaagaaggaaaaatatttgtactatattcttaatcactttgaaggcagtgatattacactgagggcagattgctggtttccagcagatgaggaggagaagataagagaacaccttttggctgagaaggcgtcaggatctgttagcgcccttttgcttgtggatattcaggctcctttcgtatcagttcatccatcacaccccggctctcacgagaatctgtcccacatccctccaacatataataaaactaacatgatttcaaagtcatttcagaatgtggtggacacttacggtatacccagatataaagaggttaacccggctccattcacagtgatgacgttcccgttcctgttcggcctaatgtttggtgatattgctcacggtatatgcgtgattttgtttgctctcttcctcatactctactatcgcaagcttaagaggaagttcacaggggatattgccaacatgattctggagggaaggtacatgattttactgatggggatcatggccacatacacgggttttatatacaatgatttcctgtcaattccgaactcgttctttggaacaggctggatttcaaatgggactcctccggaaggaggttcagagagtgacgggacttacgtagaaacgttggtgaggtcagctaaaaatttcccagttgttttcgggctcgacccagcctggataggagcagtgaacgagcaatcagtgctacattcatttaagatgaagttttcggtgatcttcggcttcttccagatgacgctggggattctccttaagggcttcaacgcgatttacttctcaagtgctatcgacttcttttttgagtttatgcctcagctggcaatgatgtgctcgttcgtggggtacatgaattttctgatcttccacaagtggctaactccacttgacaacggatatgcaaagcccagcatcatcaccacactgattgatatgtgcctgatgaagactctagagcagcacgagataatgtacgagggccaacaaactgttcagagggttttgatgtccattctcattgtttcagtccccttgatgctaattccgaagcctctgatcctctacttcagactcaagaaacagggaagaacacgcgccaataataactcaacgcgagactacgagatggtttactgcggccctgaagaggaagacctcgaggctatcgcaagagagagtgttccaaactacccacacagaagaagtagccttgatctcggtctcgacaaattcaagaaagttgatgccaagaacaaggataaccagttctcagtaacaattcagaaggatgaaaacgaagcttcacctgctgagcaacctcattctcttaagctttcagagcttttcatacaccaatttatagaaaccatcgagttcactctaggcactatcagtaataccgcctcctatttgaggctttgggctttatcactctcacaccaacagttatcattggttctgttcaagcaactgattttcaactgcctggacaattcgacgagcttacttgtaatgatttttggcctcttcatcaggtccatattcttctcaatcttcacatttttcattatgctttgtatggactcactcgagtgctatctgcacgcactacgtctacagtgggttgagttccagaacaagttcttcaaggctgacgggaggttcttcagacccttcaacattaaattactactagacgatccgacgattatggaacccaaataatgtactataaatttttcgcaatatattaagttatttagatttagttagattgtgcttcagttgcacaaggtctatgggctttttctgaagctcaaaggtcctatcagcttgaagttttaaaatgtcaagaagcccgtctcggtccatagaatcaatatcgagagtcttggcactttcagggagcatgtcgtagttcttgtaaacgagttttctaaggtctttgagtgaaatcttggcctgagactccacgaaacgtgagtagtctggctcaatattctcaaatttatctaaatccacgcttaaaagaagttttaaataatgttattaggttggataaagtgcgtaaaagaatattacttaaggtaaactaaatttagccataaaaacaatgaaaaaacctgtaatgttaagttttgagatatcaaaggaatcagtgcaagcatctaaaatggctttccaaatactgccgaggtctccgcctccaagctttgaaaacgggataggtaaagggcttttaaggtcgaaaaactgtctgaagttcaggatctgggcaggagtttcaggtacattaaccttgtccattttagtgagtatgaagaggtgaggcattccaacttccctgaagtactttaggacttcataatcgtcatcttggggctcccaactaccatccacaaggaataaaacgagcttaagttcatgtctccgctttaagtaagctttcataatgctctgcatattcttcctggtctcagcgttttttacttcagtgtggccgtaacctgggaggtccaccaaggataaaacaccacgatccctggagtcaacagcctcaaagatgttaatggattttgtgtacccaggggttttagacacaaaggccatgtcacatttcctagacttgttctttatatatgacatcagggagttaatgaaggatgactttcccacattacttctacctaccagacaaatctcaggtaatcccagcgagggaagcatagtcgtgtggaggtaacttccaatgaagtttaaagttgatattttcctgtgatgagggtcaaagtccttcattaaagaagcccctccaaaggcctcagaagccaaatcaagacttaaacccagtctaacaggttttggccccaattttgcagatttagagtttttatccttcgatttactcgcttgaatcaaaaatggattagaaccttttttatccaattttctaaatatttatttactaagcaaaataaatatacaatattgtaaataaataatgtctaattgatcaatgtttactaagtagaaaatactttttagtgtctgatttaatctcggtggttaatctttgttgagactttagagtgttttttcgacccttaattattctcctctcctccattctcttgtatttctttagagcctttcgaatttctctgacctcagtgtaagtttcaaggccaaactgttgcttgaacctctttgcgaccctagccccaatacccgtgtaagtattcttagatttagcatttaaaactgacattttatggaatgaatgagttggggttgggaaaagaccaaaaggattaatattaaaattttgaggaaccttgaaagaaagggactttttaaaatacaatattattaatatggaaactaacatttgaactatttatgcgatttaaagtcatacattgggtcttcggagaacaaaaatggatccctttcattcacaggttcctggattgtcactggatagggatggtttggtattggtaaaaaagttggatagtgtatgtgaagtcccttgtttttcctagcactaatccccagtgcgtctcgtatcttaactacactccctatttccccaggaattgcaccttttaagaatattaaatttctatgggtttcaattctaaaaactctgcagtttgtaactcttggatcaggaccaacgtgaccacccattttagtgtttctccatactatgtgtacagatttgccctgggaaattgagcctggagcactatgggctttacattctgttccatgactttggttttggcctccaaaagaccaccttctcattgctcctttaaaccccttagccttagaccaccctgaaacaaaaacccactgacctggagtaaagtgcctgacactaaagtagtggccttctggaagaaggcagtcactggaacatttgaactctgcaatatggttttttgaacctgttcccagtttaataaaccttccaatgtttggtttcgactgctgtttaatgtttttatatcctagtccaagttgtaaagcttcatatccatttttctctattgttcttttttccaggactacacacctgtcaacatggcacacagtcactgcgtgacgaactccccagtcgtcccaaagcgacatgcatccaattttatatgccaaaactccactcctaaaatccgtttggttacgttatatctataaatgttactatttaaataccttcgtgtgttccaaatgggctttgtgggtgttattgacagttttttaacatcttcctctgtgaaaacttcagtttccggtatggaatctagatatttggtaggtttttctatccttctattcgcgttcatgcgttctaaccttttaatccatctgctacagtaaggtgttttgatatccaactttttagtagttgataaattgcgataagagattaaattacacaatcggcccattttaaaggccgaaaaactattaaacatagtacaacattgtaattaatatgaatgttcactacacaactgcctgcgatacaataattatttcagtttttaaattttataaaaattcttccaaataattataatcataattatattgatgtgtatacatgaattttgggggaaattaatattctacaggttcatcaaggtctgcattgaaatgcgaatcattataatggcatccattatctgacttccaccacacatcggcctaaatctcatttatctaacaattgtttcattactattcttggataagaataaaatcccgagtgatctgggatcttccacctcttcttgatcatttgtagcctggtcataactttttttgtgtttctcatcctgtcaaactctaagaaagcgcaagtttcactcttttcagggtcttttgagttgattttgaaaacctttatatctttcgggtaaaacttaaggctttcagtaagagtccttagttcagactcgtcaacgtcagaatgccaacccattgtaaatatctaacaaacacaattttatactaattattacctgatatttacttctgtttgttataaaatcaagtgatggatgcgataagaagaatgagcttctagaggaatacagaaatgaagcgcccattaaatttccatattggtatcttcttggtattgggacttcctaaactcaacttagtcaatttaaacattacctgaagcttagatatgatggtgttaacttctttatcagaattgcaaattacccaagccaatgaatcctgatcgccgttagctttgaagcgaaatattatatttttcgggtcctaaaacgttaaataattgttcatataatttatattaaacataccactttgaccctggtattgtcgtatataacattggagagttcaactcttccgtaagatctaggagctcctgttactgtaactaccctgtggaggagttcaggattagaaagtctccttaaatcatgtggaagtgttaaaagtctttcacaccttaaaaaaatataaaatttttttcttactgttcaacaaagcaagaaacttcgtgttcgtcacacaggtaggcgctggactctttaggtaagttgtcaagtattgaattataaacaagtctaatagaacttgcgttggtagaatccgagtttttagagggatgtgataagttttcagaagaatttgatgagtcattggcggtggtatcgtcaaatttaaaatcatagttaggtgtaagtcggtcaattaaaattaatgcctttcccagaggaaacccaaatcttgtcctcataatatggacatcatcgttacatatgtttatattctgaaaataataatatatttaaaacatacacattttgaaagaagttttacaacggaatcattagaatccagtgtttcagggggaagattgtacaatagaaggcccctttgcctcaattgatttatcctgaaaaaaataaaattatataagtgagagaagatactttaaaaaatcatgttttctagttaaattagaaaggtgccgataaaaatgtcggttcattggttaaattgtggaattgtgcattttgaaaaatatgaaataaaaatatttaacatataaggctaaaattggtgataagaggaacagagaagattccactagaattaacattctatgtgtagtagttggaatttagttcccacttattttaaattttttaattttatttatgtaatttcacatttttgtagtattaaacatttaaattactataaaatgattttaatttttcaagtttttattaaattactatttcattgtaattttaaatctcacatttaaatatgtttggaaatactaatacctctggatcattttggaatactaataatcagcaaaatacaaatttatcaaacactttttcatcgctaactaatacagaccaaaaacctaattactcctttggatcttttggcttaaataacacttccaccactcaaagtgctaatttacaaaatagcagtttcatgaattccgggacaaatagtttgttcgggtctaatcagccctctctttttggccagagtagcaccatgggtggttctactttgttcggaaacactggccagtccaacaccttcttcggaagtaacatgaataatacttcacagcaactaggctcttctaattctaatgtttttggaagctctttatttggatccgataataaacaaactgggagtttctatcagaccaatacaggccaaaatcaaaccggatttggccaaattactggaaacgagactgccgatcctaaaaattttgacggttctaccattgtaaatgtagcttatgaaacaaataatatcccagatgagtataggtgggagtattataggaaaaatgacccttcgttgggtggtttgggtgctggatttgcaaacaccactggaactggattgtttggcggtaccactggacttggttctgcaactggcactggtttatttggtagcactaatactggactattcggttcgactaccggtctgggatcaacaactagtaccaccggaactggcctctttggttcaactactggacttggttccaccactggaacagggcttttcggatctaacaccggaataaataccaatactggcactggattattcggttcaaccacgaccggtctagggtcaaccacaggattaggctcaacaactggatcgggtttattcggaagtaatacagggaccacttctactaccggaactggcctctttggatcaaccaacacaggtttgggctcaaccactggtgctggactgtttggaagtactactcaaactggcactactggaactggattgttcggatcatccaatactggcttaggttcaacaacgggtactggattatttggtagtacaactggactaggaacaacaactggtacaaatacaggtacaggattgtttggaagtactacgcaaactggtcttggttctaccacagggacttcaggaactggtctgttcggtggcactacaactggcacgacaggttctggcctatttggttccactaatacttttgggagtactacaactgggctaggttctacaagtggtaccacaggcactgggttatttggatcaacgaatactggattgggctcgacaacaggcacgacaggtactggattgttcggatcaactacgtcgactgctgggacaactggaactggtctattcggtagctcaaacacaggattaaacaccactaccggtactggcctgtttggtggcaccacaactggcctaggatctactactggttctactggaactggattgtttggatcctcggctacaactcaaccaggcggtttattcggcagtaccacaagtggcctgggttctaccactggaactacaggaactggactgtttggtagtactactggactaggaaccatgagtggtaccactggaactggtttgttcggatctagcactggatttggttctacaactacgggcctcggatcacttggaagccagtacggtacttcaaatttgtttggagccacgggaacatctcaatttaacaaccaaatgcaacagaacaatcctaagctcggatgtctgtacctttgggacttgaactcaccctcacctggtttatccagcttttggtctagcaacgtgagtcttccccctgaggcaattgaatatttgaacaaggttaactccctaaacaaagaaccggtccagccccaaaatcccaacgtttcaaacagcttgtacaccaatgaccataaggataggtttggaatcagaaaagtcctcaacgatcttggaatttctattcccagatattacatgaatgcacttaacacccctaacacgtataatacagatactacaaataattataatgaagataagcgagtaaacgaacataaaagagttaatggagatagagacgtggaatctggatcaaactcgttacatagacattttgaaaagatcaggtcacttcaggaagatagacgcactgaggcggacttacttaaattttacactaaaggaggaaaacttaaaatactcaaggatacaaatcaactaaaacaacacccgaactcaaatcataaaactggtaataacaccaataacatatctaataatatgactaataacgtgaggaataatgtaaatagtgtaaataatattgacgggctggaggtagggatgttaggagggtatttgggcaggaatgggaagacaagactagatccaatatatttatcaaaggtagatgaggcggaaaagtttgtcgatactgaaagtgacatgaaatctcaattaactgaaaaggagtcggcggagtctgaaagtgcagatgatgtaacaccaagtcatagacctccaaaattaacaaaggaaggctacagcacaaggcctacaatgcaaagtttgcaaaaaatgaccgacacacagttggcatcggtaatggacttccaggttatcaaggacggctacggggatatactctggcctggatacacagatttgagagggcttgatctggacaagattgtagacatcggatatcgcaaattatctgtgtataaggactctgatgacgtatcgcctgtgggcacaggcttaaacaagacagctctcataactctatacaactgcacacctaaagactatgatgagaggtccatttctaagcaaataacacaaattgagaagctgaaggaatataccgagtcaaacggctgtaaatttatatcggcgaacttcaaaaatggtatctggatgttcgaaacgccttattttgttaacacttcaggaaatctgcctgaaaatccaaagttcatggcatttgatcatgaccgacgctaattttctacgatttaatttttttaatccatctaaacattacattatttgtgttatgggggattccaccatctatacactttcaacaaaggttttacttagcttttactggtcaaattatttttgtttttacattccaatatatttattgaattttacatcttcacaacatatttgttgattgataagattcataaaattggttaattgataagattcgtaaaattggttaattgaataataaacttttttattgaaaatgattaacgaagacgggaaacttgtagatttatacattccaaggaaatgctctgggacaaatagaatcatctcagccaaagaccatggagcagtacaaatcaacattggactggtaaccaaattttcatatagctatatattaataaattaatataccaacatacttatatattagtatatttataaattaaattataaatttattaggttgatgaaagaggcgtttacaacaacacaaacttcagcttggctttgagtcctgaaatgaggcagaggggcgatgctgacgagactgtcaacaggcttctgagagaggaaggactcttatcctctaacaactaatcttcttttttacacttcatataatagttttagtacctaaatttattaattagaaattttcgatatcataaaataacattatgacatatggacgaacccgcaactaactagccattttttaatcttttttacatgcattccttgaacttcaagacttccaactcgctcccgaacaggtgattcacagaggattcttagctgctccttcatggcctaaataatgtgtaaacaaattggcgataaatattatttatttacctgaacatcgccataaatgtgtctcactaccgtatacaaaactgttccatgagcccttatctttaaataaaccgccaggttaccagagggtgtcctggttaccttatacacaatgtaacaatgttaattagggtgtaattaaaataaaatatgtttaatattattaccttgaatggaaggttattggttttcttagatttactgcttttggcaaaactcgactgcacaatacttctcaactgatttaaataaaacccattaaacctccaaactgaaaataatcctccatacattataatccacagtacattatattatgacatacacatgatataataatatatacaatataatagtcgtatataataatattatttattgtgtagtagaggttgtgcagattttttcaaaaactcaaccgctttttcatatcctggtcgagatgacattcttgggactaatgtatctgatattctcttatggtattcatttatccattcaacttcctaataaagtatgttctaaatgtgtacacacctgtttagtgagtaaggagtgatcgagtaaatctttacagtatggaacaagcgttaagtcatcaaattcatagtatttcctgttatctttagagaacctatcatctagttccttaacataaaacatattttcaattctaactccaaacttcccagcctcgtagaagccgggttcatttgacaggaccatcccaggcttcaagtacacaatgtttggtttccccaccttgggcttgtacaatgacgttatattacaggggccctcgtgtacgttcaggtatgaaccaactccgtgcccagttccatggtaatagttcattcctctttcccaaagtggcaattttgccaaaacatccaatgattctcccggtgtgccttctggaaatttggcatgtctcaacgcgagatggccctaatcattttttattacaatcaaacaattattctgtgctaatggtatcattaattgtattaatagcatatgttcaaatgttttaccttaagaacaagtgtgtaggccaacttttcttcgtctgttggagtgccaaagtggacagttctggtaacgtcagtggttccagtgagatactgacctcctgaatccagtaaatacatgtgaggaccgatcttagaacagtctccttttaaggctctaacaatgaaatttggaagttttaacctacctatagtgtacaactgctccgttttcagctattgatgatattggctcaaaagataatccaacattattctcctacaaatttattgtagttaatagtgtgtcggatgttgattaaactaaaaagattacctgctcgaatctgaatttactgcttaatttagccagatcatattcgtccttatcaaacaatgtaccattgtccttcatttcctaaaagaaattaaaattcaataacttacataaactgttgagaagaacttggccattgcaattccatctgctacgtgtgcttctgccatacacttaagctcagtgtcatttttacatgcctaacaactgtcatcaaaggttaaaatacctttaaatcacaaactggtgttgtctctaaaaacaactctctgggtgtagaatcactgtgattcttcagaaatgaattacatagatgaaccgaagaaaatgtagacgcccacatcttaaacggagatcctttttcactggttccaactgtttcaagataagaaaaaacgtcattgtaatccctaacaactataaggggtttggtaaaattacctagtttcaactgagaatgactttaagtaagatgtgacctcatcatttaacttccgtttatccacaaaaaggctaaaatagaatattaaagtagtgaaatttacattattttgtccatttcaaccactaggtatgagtagaagagtggtgaggtttcaacgtcagaccctcttaaattcaacatataggcgacttcatcaaggttctaaaacatatttacaccttaaccaataccgtgagggctaaaacgttgacattatttttcgtcatctccttccgaacctcaaccagtttatctgaaacagaaactcctgaatactttagcgggtgtaacttcagtggatttaatggcaaaggtggcctttccttgccccaaacaacatcaactgggttttcagttaaacctacaaactccttctcagtggcttttttcaccatgtgttcatgggatttgtaagttgtcgagtacaaatcaaatccgacagttttaactaaaatcaggtatagtaatgataacttactctctttggttctggacagaaactcagttaatgagggaacatccttctcaagaagcttcattaggacccagggacttgataactgcctctcagcttgtatgaagtaccttgaaatcaattaaaaatggtaaaattacctggaatcagtccataaataacacttatcatgtgtgaccagagcaagtccatagctacctgtaaaacctgaaatgaaggagagtctatcaaaagtggaatgtggaacctcagtattatgaggatcaactctatcaactatgaaggagtccagtttcttctcagttaagagctttaacattgaggatacacggctatggtggactgacattgtgggaattctaagaaaattactactattagatttcaaaaagttaattttactgcaataggaatggaatttacaaaaaatcatagaaggaaattgtattagtttcaacacatttcctgaaaagaatatccaaacaccataataaggcttgatgtgatggaagagaaaaaattaataatatctgtgtaattttaaggttaaaaaaagtggaatgatgcggaattttccaagataaaatattaattgaaactgtgggggattgatttgtaaaaattgattagatttatcagtttcagtttcaattatcttccagaatttttacaatatacttaattacactagaaataggatagaaggtttttattctcctccactttccatatttttaagatatttttataaaattgatctagtgtgtttttttaaccttattttccaaaatcattaaaagtattttaaagatattatatgaattttcgagtgttttataattttctacattttaacgaattgttgagttgatattttaagttaaaaatgcagtcgaagttttggggtgacgattccgatgattcctactcagactcctctgagtactcaagtaagtctgatgacaaggataatagacgtggagttgacgctaacaaatggactttggacagttcggacgacgagggagagtcaaggattgtgaagtcagcaaaggccaaggctctggaaaccatccaaaaccatgttaaaaccattgaacacttgagaaagatcaatgattactcagagttgttaaaggattacgatattcttgcaaaatttgtggataaacaatactcgtccacccgtttacctaaacttgttgttaagatgatagtggaactttctcagtttatggaggctcagcagaaggacaaggaaagctacaagaagctctcaaaggctaagacaatctcgtttaacacgctgagatcaagactcagaaagttcaacgagcaacacgctgatattattgaggagtacaacaaggaccctgacaatttctacgatgtgctccagcaatctgaggatgaagatgaggaatccactgaatccagctactctgagtgggacgaggatgaagaggaggaggctgaggaagaggctgaggctcctgaagaaaaatcgccaaaatctggcgatactagcgggtggtcagactcgggctcccatcccacatcagaagctgaggacggagataagcataacaaggcgatggataagtggggagtaaagaaggctgaggctcgaccggagatggttgagaagcccaagaaaaccaagactaaggccaagaagcgtgaagttcttgagaaacaaacaccaataacgagtattaccaagttctcagcagtgactgcagcctcagacgcacttgtcgagtactttaaggaggttaagcttggaaatgatgataacccattcgcagtgatgattcctgaggtccaagaaatgctagacactgtacacttgagtgaggaggctctaaggttgtttgtaaaatcgatagttgagaagagaggaaagaggggaacaaacaactttgaaaacctaaagatactccagtcgctgccttacattgcaaaaacaatttctcagtcactgtaccttgaagttttggaaacactcgtgcacgtgctttttgataattattcacatgcctacggagccatgacaccaactgagtggattaacacctaccgaattgcctcacatctagtctcagaactcatcagtaaccctaaatcttatttatcatcagaaatggtcaattctgcccaaaacaatctaatggatgacttagataaggctaatctagataaacttagtgctgaaaagcttaataatgtcgataaagttaaaatgatggacgacagagtgaaaacgtcactgacagttttatcaacaatagtgcaaaagttaaatgatgagttatataaaggtttgctatatacagaagtgcacaacccagattataaaacgatgttggcgtatacaattgacatgttgtatttattacacaggacattagtttattatcttaagtttgagaagggcaatgagtttgcagcaacaacagctctgatgattttagatcactgccactacaaggatgacgagatttccactaaaatctgggaactcgtcaggaataaaatcaaggataagaaacaaactgagaggttcttcccaaacgagaacaagaagccgagtgatctggttactgagcttgtaaactttgtatttgtgtatggaacacaacgggagaagataagagcttgtctacatttagcatataataaatcactacacggccactattacgaggcaaaggaccttttggcagcatcaaatctaactgacgtagctagtgaaactgatatttcaactcagattctggttaacagaaacttagctcagcttggaatctgtgcctttagagcaggtttaatcagcgaagctcattcttacctcatggacatgtgtgtgcaaaacagacataaagaattgttggctcaaggtgtgtcgaatttaaagaatgttgagaaaactcctgaacaggaacgcgctgagaagaggagacttttaccctaccacatgcacattagcattgagctgattgagtcagttaactacatttgtgctttattgttagaatctgcaaactacgtaagatatcccctaaaggcaaaggaggttatttcaagacagtttaggaggatgtacgacttgtatgagaggcaagtgtttgtagggcctccagagagcaacagagaagtaattttaaacgcctttaagcacttacaaaacggtgactggaaacaatgttttaactttattttgtccctaaatacctggaataacatgcctgatagggaaaaggtacaggagactttgaaagagctgatcaaggtcgagggtttcagaacctacatcttcaaatacgtcaacatctacgattcattctcagttgagcaactctcctcaatgtttagcctcgacgaaaatgtagttcactccctaatcagcaaaatgattgttaacggtgaaatactcggtagctgggactacagcagtaagtgctgcctcataaaccacagcgaacctactgaacttcagaaacttgcagtcaaacttgcagagaacctttctaccgcagttgagcagaacgaactaactctgaacatgaagaactccaagttcgcgctctctcaggacaggcgtttccagcaacgagacactcgctactcctacggctcacgtcatgacgacggcaggatgtccaccttcaactttaatagaaaccgcagattcatccaacaacccagacaaacaaagcaattccctgtgcccacaagataaatattaacacgttaataatgtatatattccatattacatacagtgtgtatggtacttatagtatactgtgtatagtgtatagtacttgtgttatataagttatatattacatatagcatgtacagtatacatactgttaccactacgaatactataccaattatactatacatgtgtataaatagtatacaagaaatattaaggattatttaaagttatttaatttgagtcttccaaggtccctgatggcttcttcaagctgctgtttttcgtgagacagctcctttatcttggagtcgttgagtgacctgacgtcagacgggaccttgtcttcatagttcggcacttctaacttctttaggtatgactcaagctaaaaatgattataaagtgtaatttagggtaaataccattttatttgtttttgaaagtctgtcattgagcattgacgaggttttaaccaagtccacagtctcgtcaacgttaatgtaagtgactagagaagatgaaactacattttgaacacaatgatacaactccgtactcgtattactcacaattgagatctaaacagtcattatattttatcaataaatattttaacaagatttgtaaatacataattttttaacccaaaactgtgactacacaacagttaactatacaacagttaactgtacaataggttaactacacaacagttttgaaaagtggttagatggcgaaagtaccgatttgaatttggagagcgtttctattaggtggagtttatcatataatagatggcgtgttggttcatcggtagttatgaatccaactttgttagtgttttgcgctagtcctagagttgttgccagtgatctgaagctgtgcactactgagaaaagtgtgtccatttcagcatcaagtgcttcgttctcccactcgacattgggtttcgggaacgttgaaatcgaaatcgactcgtgctttctaagatactcgggaaggtggtgataaagctcctcagttatgaatggcattatcgggtgaagtagtttcagagactcgctaaagcaggtgtggatcacgaaggcagcggcatttgactcgggcgttggtacaaatgaagaatcgtcaatcactgacgggagtctgttttttaccagttccaaatatacatcacatagttgatataaccaaaaatcatatgtcgcctgcaccacatcataaaactgataggcctccaatccatcagttacctaatcacattattaaatgagttatataattaacaaatattctaagggttgataatagcttaatcggtaaaatatataaaaaatcgcttatctaaatgtaactatagtatttaagtatataactagtatataatagagtatattgcaaatgtgtaaacatacccgtttagtgtattgattgagtttgtgtagaatccatttatcttcccatttgaatttgcattcaagactgttatcacccttataggatttaacggtgttataatggttataagtatgttgtacggatggcctgaagaacttggtgcgaagaattgcaaatttagtggcgttccaaatcttgtttccaaagtgccttgaagatacaagtttattcacgtccagtaaaatagctctattgtgcctcattaaggcgagaagtccaagtctgagtccatctacaccacatattgggatcccatcaggaaactgctgtttctgtagtgctaaagctctctttatctcgccctgagggagagaagaattcagaatattctggtttagcctctcaagcgtagtcccctctatgatgtcaatagggtcaacaacgtttcccttacttttactcatcttttcacctctcgaatccctaaccagtggatgcatgtaaatctcattaaacggaagcatatccacgaaatgtagagaaagcatgaccatccttgcgacccagaagaagataatgtcgttgcccgtctcgagtaggctggtggggaaaaacgacttgaaatcggaagtatcagtatcgggccacccaagtgtactaagcggaaataacccagaggaaaaccaagtatccaaaacatcctcatcctgagttagggttaggtctggtaagtttggaaagagagtttgtgcacgttgctgggcttcttcaaagtctcttccgacaacccacctttcctcagaagctggaatagcagatgaagtgacacggtaggctggaatcctatgaccccaccaaagttgtcttgaaatacaccagtcctggatattctcaagccactggttccacactgagacgtaggacgatgggatgatcttaagagagccgtttctcacaacttcaattgccctcttggccaagtccttgcagttcacataccactgtggaattagcatatattctacaatgtcgccagtcctcgaacaccttggcaccatcatcggcttagtgttcggcttcttatctagaaatagtccaatctctttcaacctcttttcaagtactttccggcactggaacctgtgcatggttgcgaattctcctccgttctcgtttatcttcccgtcgttggtgaaaatgttcaaaaacggaaggccatgcctctttgcaatttcaaaatcgttcttgtcatgggacggtgttattttaacagcgccagtgccaaactccatatccacgtgggagtcagccaccacgaccatttccctatccgggaaaaaggggtgctttattttacagcctaccatttccttataccttgcatcatcaggattgactgccactgcaacgtcacccagcatagtctccagcctagtcgtggctactggaaggtaacgtgtctcgcttccaaccatcacagggtactggaacacccacaacgaaccaacctccacagatgaatcatatcctaacaatgtttttaaccattaaaatatattattattaatacaataatttgttatattaattatttaaagtagtttaagggtattttttagtaattaggtaaatttataatttagagtgttttgtatagtagtgtaacctggaatggtaatgaaggttggggaagtaatttccatgggttcaacttcaatatctgagagtgcagtggagaggtatgggcaccaggataccaatcgagtgtttcgataaatatgtccagagtcgtaaagacgaacgaaagcctcgataacggcagttgaccgtggttgatccatagtgaaaacctctctagtccaatccaatgaagctcccaatctcctaaatattaattttaaatgagtaaaacagtacttaagctggtttttgatgttgcttccgtatttatcattccattcaaagactttttcaacgaattttgttcttccgagatcgtgccgtttgaggttttcatccttatacagagttctctcaaccactgactgagtggcaattccagcatggtcagttcctggtagccagagtgttacatcacccttcattcggtgcctacacatacttgatgagggttttagttaccatcttgttaaacagtcctggatcgaaacagttagggcgtgaccaatgtgcagagagccagtaacgttaggtggtggtagtagggacacccacttgtttttggtgttgagggcttcagggtcgctggagggtgtgaaaaatttcctggattcccacaaggtgtaccatccttcctccacggactttgggttataactcgactcgatctcagtcaaaagttctaaaaaaatccatttaattataaaaaagttactcatggactgacacttcgacatctaggaagtaaacttgatttcacttatcagaaatgaattaataataataatcaatgagtcgaaaggcatttttacaggtgtatatagaaacataaatactaaactgctatttgatgaaaaataattgaaaaaaactgcggtatgaaaatatttcaaaaagaaaactaactgaataatatatcgggtatcgagaatattaactataactaataattctggtacacatttttcaatcatcgctatatcgcaacttttttgttatattaaatttattattttactcctagttacgatatctcttggaatctattacttacaatacaccagtcacagctgaaaggattccgctttgtaaacacataccaacacactttttcctctaatttccctttaattatacttcttttttcttgaattaatgtttgatactgtctgaattaaaaaatctaccagggggacggttttagctaattaagcccatgatacgtgatcactttttcaatgaaatttacaaaaccttcccttaggcctggtgttagcttcgtcttatattttgccataattttatcttttctttcctacacatactgtttttcgcgtaaatttgccactaaatcactttttaacccaaatttaagtatcccattttcagttccaagccctttatcgcactttaataaagagggaaatggaagaaaggtatcggactcgtctagtttgcacagttttggctcaggatcgtcccccaacgagcttagagtcggagagattgtgcacggaacacccatcaagaggaacccagatggaacaactctagtagatgtaggcctcccccagcctctaatcgcagcgaagtcaactctatatttcatgaatgacgatgaacattatagactaaactctctcctgtctgccagggaagctgaaaatcctcagtttaacagacgtcagaagatgatttatgacaccattcacacttctaagaagttccctgaaaggaagaggcaaacgtattttaggccaaattatccttatccttacgattacttaaattcgatgaggaagaaggagaggtatattccatttgatatcggtataggggctgagattaggccccaggattactcagtaccttcagagcctaagacgcccaagtacctgaggaatcgggactctatggaatttgtagtaactgacatcaacccgtactcaaagtacatttatggcgagtttttctcagttaacattgtggaaactaagaggaaaacatactccctgatgtacctagactcgcttaacagtaagtaccactacacaccctatgaggctattgtgactgagatcatggatgatgttctcaaggtcagtctcacaaattgtagacgcagtgaaatgtacggagttaacgcatacactgtatcaactggtaatgacaaagttggtgatagaatacaggtaatagctctttaacatagtgaatatgatgatgtaggtgtatctggctggaagcgagattgtacctgagcaagtatatctgtttagaaatcaaataacccatgcaattcttcgaaaagagaatttgcagaggttgattgattcgataatacgttattatgcaaagactgggaaatggtttaaggcggaagttgataaggttttccgggattttctaacatttagacttaaaggagagtataaagatacgtatttggcctacattactaaggatcacttgccctataattacccagaggaccttgtcaatgagagctttatcaacagcaatagccctcaccgctactttacactgagagactcagaaatcagtatgggaaagcttaatcacatatatcactatgatcattcgatgtatgttagggcttgtgaattgagtaataggagagttgagcaaccaatttcaaaagttgatccaatttccaagttactcattttcacaaccaccaaaaaccactataaaccatcgccaactatggaaaagtacttccttcaaatgtaacaacctatatcatacaaattatatcgattttattatatccaatatactaattgaatgtgtaggataagacaggatgtggataagtatgagataaaaacgggtatttcatacccttgtatagtaataggaaatgatggagggatgatatatttcgctataaataacaagtttaagcctaattttacactaaatgatgattatctcattggagtaatggaagcaggccaatattccactaacataccaataggcacaatattacacgtaagtcctaacataccatactacaacatactatactacactatactacatcatactaattaaaataatttgtggattaatttgagtaataggcgaaagtgggaaaaattcaaccttataaattggaaggtcactatgctgtggaaaacaggaatagagatttaaaatatgttacaatgccaattacggagtggataaataaccttaccgaacacgaactcataaaacacaaaataaacccgaacaatatggaactaaagatattggtgatgagtacctttatttacccttcaagtgactctcctcagatgaacgagtttttaacgttgcagccagcttttatagatgccaatctcacagatatcctcgaggttgaagatgtcgcagacgccgtgataaactcaaatgtcagacgggatccgtctcacgaaagcttatctgaagaagaaaataccaaagcaaaagacgtggatccgaaccgcgagcttggaaatgttctactgagagatgaagaatcactgattcccttagattacttcaccaacaacgcagatatcagggacatatttataaaggagaacttggatcctgagaagtacgtgaagtttttaaggaatatcaacgccgcataccacgacccgaagtgtttattccttgagttctttataagctctacaaaccagcccttctttaagttcttagaaaggctgctgagtccacttgagaggagaaagattacgttaaaagaagcgttagaatttgagaggagtattttgaggcttttgtccaaaagccacaccttatacttggaaagaatatatgacatgctgccaaaggaaacaattatgtactcgagcatagtgccaaactcatatgattacacgttctacactatggatgagttatttaaatattacgacgctgtgagccatgattatgtcatggatagatcagtaaacaagtcgattataagactgttaaagattttaacgaatccaaacttctcattcatgtctctgctcagagagagacataggaagatggacaatgacgtgtttttctactcatcaaaggtgttgcactatgactcacttatgagcttaaacagacctaagatttcaagaaaccagaatgatactgaaataccatacgcaactgaagaggaggaatcacattcaattccaatggcaccctacgccgaaattgttaaaaccccaagaattttcgtcaatgaattagaaatatacggactctcaatgattcgaaaaatgtattctgaacttctcaggtatctccaaccacatttttatgtaattatttagttatatataccattgtttaattacactaatgtttatactattgttcctttgtttaattaatttgtctgggatttggttaattttattatagaattaatgacccttttaagactaagttagtgaggccagcccacgtggatgaaactgttgaggatatggattttggccctcatgacctgaaagattttaatgattcagatctaaagaaaatatttgatgatgtggacataaatgaatacgccctgaataaactcgacggatcaaagacgagcttaaaggaactttccaaatcgtggaaaaggcttaacaggtatccagaggacgtttcactacaggatttgagggaatacttggaagacatgcaaaaggtgaacagagttcacggaatcaagctaccaataatttagcttttcctcgaagaattttctcacttaatttcattcttctttcagcaaatatattatttattgtgtgtatttattgtaattagtgtttaattatttgttaaacttgtttaattattgcttaaatttgatgattagtcatttaaagttattgttttatgatggagcatggtgataaggcattaactgatatgcaagagaataataatttaaagctagaaaaagtaatttcctaatagaatacgtgtttttagataaatgaaactaaaacgttactgaaaaattataaattaaagcataaaaaggcattaaacaattataagaaagagataaaggtataatatacatacgtgtatagtcgtgtgagtagaagtgtctcaaggaagtagatgtgataatcgaagattatagaagggaatttaaaatattaagtaaaataactaaattaaatgaaattcaggatacaagaacacaatgactatgaataggttatatttatgggcaaagagggaaatacaaaaggtagggtaaaaacatagcacaattctctagtgtaatgacacggtgattgagaagtctggtatagataactgcgataaaataaaggaaaatgcttataatatattcaagaatttaaaatgatttcactattttacagatttactactttattaatcttaataaatcaacaattatgccgttattgttaaacatcatgagggtttcccattttagcctagaaactttcttgaaagaccttggggcaataacgtatactgaaggtgtttttgtagctttagacttgataaatttgataaattctctataataattagaatactgagccttcatttccttatttccataatacaggtttgttaaaattatacagttattaaggtcaagtgggacatcagttatgggcttacaatcaaattttatttcaacattcctagattgcgtatctgtttgatttgtatgaactgcattttggtctttaagcttagaaagaatatcgtttgcgaactaaaataggattaatttataacagttacattaatattatcggggataggatcagttccaagtaaagaatagccagagtttggcctaaaactaagttaaattaaaattcttacagatttgatcgtgttaaatgattatgttcgtaaaacaaagtacacaatgggaactaaaacattataatcactaacttcaatacgttattaagtgggtaatttgttgattcgggtctgaatttctcatctacataatttattaaaatataaaatcattaaattggtcaaattttgaattaaacaagtttataccatttaaatatgataatagttccaaaagtaatgcaccgttatgacaaaatgggtcccaaattgtggtcctaaaaataacatttcaatgtgaaaattagtaactgtgtggtacctgtctgaaagagcatctcctgttattagttcctgaattacagctgaagaagcactagaaaccatccgatcatccataattgacagtttattccagggcctttcgctcaagtcgccagacgcatcagccaacacctgacaagaaaattacgttaacctggtaatacttggcagttgttattatttatatcaacagtaatctttgggcaaagaggaatatctgaaaatgatatcaatgatgtaaaaatacatccacggttcttcatgaaacttggtaactcgtcgccctgcatcttcttatatcgataacagtgagaatttatcaccctttcaaccatgttcctgaccattccagtgtggtaaagcttagaattgcttgataaaacctaattaaataataagtttaaagttagaaccttaatagttggaggaggtaatttgtgagaaaatgggataaatgaggccctaatccatgattaacacgtttaagactttgaaacacaccaatcagcctgattcagcctgtttacgaaatgtttaggatttctaaagatgaaattaaatgatttttgtaatactcggcatcgaaaggatcgagaacgtgaatatagagttgtcgacatatccggctacattaataaattagctcgatctaattgtcaaatgtgtagaaatatgtgtaatagataagaacctattctgaataattgaccatattgtatctaatccagttaatatatcaacgtatgatttccctcttgaaaccaggttaaattttagggataaactctcgagttcatttaagagctgacgctctaaaccggtacaagtgcataattttactcttctttgaactaatctggaagttgaaagtaatgtgtcaacaaaactcataacaatagactaattatcatgaatagaatgaatattgaactttgtttaatagtagaagtatcaaaacggttgataaaaaaatattaaaaacattactatagtacaaaaataatatttaaaaatgaatttaaaattcactatgttttaaaactttggaatcttcctgcctgatagaatctcagaataaatacttataaaatgatttaatggaatatgaaataaacggattcaacgcccttattttaaagaaaacattgttattattcagacacatttcccaggacttgcagataatagcaagtgaaaacggactaaatttatacgcacttgaccaatccaactctgtatggctacacattcaactaggaaaaaatttttttgaaagaatccaatatagaagttcacaaacttcgcaatctgactcaccttctaaagttaaacactggtttgtgtcaaccaaacaactctgtcagtcactttcaattgtatttttataattacttaatgatgctgtaggtaattcccccttcacagaaaaaatcgccctttgatgccattcttattaaggatttacataatcacgagaatttgaaaagttcattcggcctagacagattgatcataaaggagtatcaagaaagtgtggatttcctatctcttatcttcgtttgttctaataagaatatcataagatcagcaacaattggatttcaggtaacatttcacattattaaagagtttaggagtataaactgagcatcccagacgatttgggctggtctaactggcactatcttagaatatctccaacggttttctacaaatccataagtcctttcagctcacagtacaatgatctctcaataacctataatgattctaaggaggatttactggtaacttaacattttttattttgtgttagcttaacgttattaataatacgtcgaaactcacaaagaataagaataggaagagaattgtctcaggcaatgttctaatcaatagtcgtcacttccacaaactggacctgggtatttttcaaatcttatctgatttttagatgacgacttgacttatcccacagatatcacaatctctattaaagaattcttatctctactttcattctgcggtatttctttattaactttagtccactaattatgtataaatgtaaaaaccactaatgtttcactttagaatccgtgaaatgcccattgtctatagtattgagaaacccaggagacccagtaatagctctgttcggaggctcagttgacgcgtgcgaatctgtaacaactaacttgaacattcataatattgtttataatggctgtaacgagtctaaagtcgaaacacaagaaactaaaataatcagtattcctttaccgtaattaattcatgtagatgacaacattgcactcagtggatcactctggattagttcattcaaagtactaaattacactattatcccataaatttccattaataataacaatttttaggctgaaaaatcatcccaacccacaaacgaagtaatttttaccctgatttaaagatgtgtaggaacaaagagatgaattggttgtgaaggaagttgacttgtttgaaacagaattctcgccaccgcaaaagacagctgagctcaaaaccagtaaatccaagtatacagacgaagaattggatgaagtttacaatgtattgctaaaagattttgaaacgtatttttaacaccagttatgtcatgtttttagcgataatatgcaagaacacgtaactagtaaagataaatcaggtattttcacttattttacccttttaaacataaatttatgcaggattgatatcacttttctgacgagtagttggtgttgataatttataatgagtgaagtgtttagtatatattgttttattatggtgttttgtatacaagtggagagttttagaggtaaaaatagcaggtaaaatcattaattagggtataaaaatagttttgagctggggtttaaacgctattgcaagagtaatgagaataatttaactgctccaaaagatttggttgaaactgtggaaatagcagatcaagtagcagattttatcactgataatagtaaacctgagattgccaataccagatttggtattgataagagtatgatttacacgttaagtaatgatgactatgtggttgtgggaaagattcttggggtttatggattgcatggcaatgttaaagttaagagttatacatcccagcctgagattagactatgtgagcctgggtataggtatcttaagatcccatttaatgacgagaaggttataccaattaacctccttagaggtagaatctcgggaaccaaggatgtttacattgtgaagtttgaaggttttgataacgtacaccaggcacaaaggataaccaacacttacctcacagtaccactatcaatcatgccaccgcttgaagagaatacctactacgcaagggatatcattggactgggattatacctctataatgacatcaataagaccaaattggggaacattatgtccttcatacattattcagatttagctttcaagaaggtacctgtttacataatttgaagaaagttgatagtttcagattatagttaaatatacataaacaattgaatgtaaatgtgatatagaagtatgaagaagcatgtgatgacttgattgaagttcagctagatatgaaggtttcattaaaaacattaattgatgtctcaagagcagcaattaataccacacaaaatagtgaggaggttaagaatgaacctccaaaaaaatgtagtttggtaatggatagggatttagaggaagccgatgaagtgattgaaccgtctcaggagtttgaaaatccatacttcaagtcagtgatgtacgtcaaatgttatgaatgctcaatatgtaaaaaggaattcactaatcaaacaaaggcactaatccatgaaaattcacataatactaattcgaacaaagaattagttaattctgtggagcagaaaaacactgaagaggagaaaagcgaccaaagtattgataaaaagataaaaataatgagtattgacgaaatagcggaaaatgaaattaaaagaccaatcagacgtttttatgtgcctttagttagaaatgaaactgtaaagtacattgatgtcgagaataaaagcgtttatgtagatccttacaccatatttataggagaagataagtaacccctctaacccactagttgtggtgatgagattatgtatctagtctgaagtggtctgcaatcgtgagataaagtgtattttgaggtcttggaccgaacctaaagtcccatttcaaagataactggacccaaattctgtgaacaagcccatgtttggcactggaaatgagttcagttcttctaaactctatttggccgtcatggtttaatatgcattcactaagggtctccaaatactaaagaatattttaataaaacaaatatttttaagtaagtaatatgagttacatgttttagtagaagacaaagggatttagggtttatgttatttgggttgaaggaccaaacaagctggtcatctctgacctgaagcctttgtttatactctgatataaattcagaacacgttattatctttgtagtggcattattatcccaatcaagtgcgctaaattaatgttattaagtattaattacatatatatagaatgagtaagatgatactttgatgaagaacaagtgtgtgacattgggttggagtggttacagtaaactatatagtgaggctgtaggcaatctatggtaacgtgaacttgtgaagacattgagtcatttggcactgggaacattgacttcacagtgttcaaatgtttggagatcggctggtactcagttctatcaataggttttagagtccctgtagacttgaaaaaaaagtcaattccctcaatccctgaatacaaaatacagtgatataatagagttaattaatattaaattagaataaattattattaaataatattaaattataattaattataattatgacgagaaacttacagaaaatgagattggtgcaaatactgtctttattgaaaggtaaatgatacagttccttatttaggtgaactttgactgcataaaaagtcttctttgaagctaaagagagtgacaatagagagtcaacgtcgagaaacgataaaattctagaaattttatcatgatttctgagagtaactccgtcagaaaaacgctccaaaataacctcttcaaaaccacatggaacaggttcaggaggttcacctgacaattataatattaagatagaattatgagtataattaggatattattagtatcatattatcatcaagaacattgtgacgaatgtaataataatataattaagagctgtagaacttactgttaattttgagaagtgtttcaacgatttcttgagtttctatttcatttaactttggttctaatgttcttaagtggtccacgaactcccgtaggatctctaagtaatcctctagggttagttcgggaacaatgataactggattgggggaaacttgattattcactgcatttgaaggttttttacgcttattttgagcgtttttttgctgaattatattatttactttggagtaatgaacgagatcagagaggtcgtagagaagatcacgattctgggtcaaaagagaccaaagtagctcaaacgcactaaattcttgcgtgatctcagctaaattctctgattccacatcgcacagtgacattattcgagaatcacattgactttacactacttacacatattttacacatttcaatgaatttacataaaattttaaaataaattaaaaaagttaaaataaaatataaattttataaaaaaatcagaatggtatttatataagttggcgagtataaaattaatttgagagtaaatttgaaatccactttatagtgtcgagactgatatttcttgagtccgactgcagtatgcacgtgaagaattcttcatttttgtttttcaccttgactggctgtgcgagcacgtcgagcaactcagtgttcacaaactgtgatagggtactagtcagcaagttcatacaattactgatctctgggttcgactgatccactattagccatgtcattgaatcatctgcaatgaccttatcatgtgtggccaattttcgtaccagagcatagattgagagtgttattattgatgcagcaaacctgtggaatgtgtcatcgatgagggccactctagccagaattgaggcggttttctggtaaatattgagctgcgatgggttctgtggatacggaagatcgaaggatgctataatcaacgcctgagtcatgtacgatacgaatggagtggtgatgacgtagtccagagtcctcaaaatgtcaaacattattgacataatcacggagagtgatacgtttttattccgtgcaatataaaatgatgcacatcgagttctggtaaaaagcttcgatattgatacccactgcatcaaaagaactcgaactgatacattcgcgagcccattataacgatctgcaataaagtaacaggctgcagatatcaaattataaacaatttcagaatttatccttacactatcaatgctattatttatatcatctagatcattattagcattattcgtcgcattgttattaaaaatatcattaacattagaatccatatgattaaaattatagtccctacgattagcactgttatcaaaagagttggaacaatcaatggtgtagaaatgaaatgaatccataagaaaatgagattgatcttgagaagaaacttcttcagattccaagcttgttctagaactgttattcaggctatctccgttactaacactggacctggcggtgttgtaacttaagggattgactatatcagttaataggtagagagaactgtcatctgagcttgaaaatctcaccctatcaagaacaaatttgaacaacttattcaaagagtttttattcctggacatgtaacgatccaggagattaattgctaaggggacaattgaagactgtacttcgttcctacgaacttccttatcagtgagaattatgcagaaaatcagtggaattctgcactctgcaaacgattccatgccccaactactcaaatactccttacagttgagtttatctgcgttatagcagtcggcaaagaacccggaccttgagtaaatggtgtaaattgacctgtcaattccccaatcttccacagactcactcacattctttgacgtcactgttttaaagaagttgttcattaagttataactctcagaatgaatgtcaattggaggagtgggagtgtagaagaagttacgtgcggtctcaactggttcctcagttattccgtcagaaattattgtgcttgtttcaactatttcactgtttaatctgttatatgccgatgttcctggtgttctaattccatctcctgcgtatctgtttactgtgctaactccctcgtaactagtgatgccatcaatggatcctgtataagtgttcacgtcagtgagagagtggacaaaatggttagcgttaacgtcaaattctccacttagtcccacagttccgtagtcatactggttataaggctgggtgtcttctaattcatggttataatcgttagtattggtttggatggtaggactagtggatgagagtgttgagtattccctcggcgttgtgtcgggatctgagtaattggtctgggatcgtgaatttgcgctctttgtgtagcacaaattgtcagaattcaggtcaaaccagtcacacagaagtgtcgagctagactcgtcatccagaagaggattcatcccaccactcggggaattcgaaagattattcttataaactctctcaccaaccattattattcaagaaatttaacggctatcttctatattgaagtggtggataataaaacattaatgataaaaaaacaatgtgttaataaacattatttaaaggaatcccaaaaatattaaaatgtattgattaaaaataaaattttaaaaaaacattttgaaaaaatttatcaaataagctcttttcattttacacatccacaccattactacacgacagttaacataagaattccttcaacacactcttatcactattttgactaagttaaaataataaaataacaagattcttggaattggcggttttttaaagaaatgcatttcccccaaaattcctcaaactctacaatcacaacacttcgctgagataacggctaataaatttaaaatgataaaatttaattaaaaaataaaaaaaattaacaataaatgagataccacataacaagacatactccacataagaactatattattaaagttattatcgaattactgccattgtgctctagtatctacgaaggacccccattcctcgtgtcctgcggccattactttccagtctgaggagtttgcgtgggctgggtccactgtgctccagtcagggagtgggtgtagtggtacagttggtcttgaggtcagcaagtcatcgtcgtgtgtattcactgtctcctctggtttctgttcaaactgctccgggtcacgccagaagaaggtgtcgacgagaacgtcccagggcatccagcgcttgagttggtctctgaggtatagtacctcacgggccaagagccagtacatgagcgcaattgactccttgcccttgttgttgcatgggattgcaatgtcgacgtagtttagtggcgagtctgtgtcacaaagagcaattactggcaaactgacgtaggaggattcccttagggattgtgcgtctgttcttgggtcagtggcaaccaatagccttggctcaatgaacttttgggtaatctggttagttagtgttcctgggatccagcgtcctgcaattgggtgtgagccaacgtagtgggagaacttgagtactgctctgcttccgtaggggcgggcactaactacaacgacttcctcggggttggagactgtgacaattgctcttgctgcaacctttaacttttcaagtgtatgggccaaattaattaagtggacgccttcttgtgtacggctatacacatactttctcattttattttcaacattctttgttccaatgtggacctacgtaatagttatattaccacaaatattgtatataccataccataactaatatacaaaattatatactaaatattatgggtttattaagtataaagtatgagagtatgtgattagtttagaatagtaccttagccgtaagcatcattctgatgctatcttcatcaggagtaagtttactggttggtgctgccatattaatgggattaattagttaaattcaaatctacaatatggggaacataaattcaaacttaagcaaatcagtcagtgatgtttatggtatccgtaattgttagaattgggaagtttttaaataaattaattaataagatagtagaggaatccaagacgaagcaaaatttccaatttaaaaagatgggaaaattatgtactaatcaataaattataacaagacaattatgtatatattgtgccccatcagtgattctacaaacaattttataccattactaccctttaccctcaaatagtaatattaagtttattaaagataaattaattgatttgcaaattttaaacaatttcctcaactttccaaaattatacctttaaacaatatttcaacacagtattactatataatagagtataaaatactatataatttagcatataagcgtgggtgtaatagtaaattaatgattaggacatttcttatcttcagatgaatcagaatcactatccgtctcttctaaaataaattaattaattacaatatactaataatagtagtagtgggagatacgatcaggatccggtggatttgacttttttttaccggtaaaaatacagcaacttttgctactctttttattcatatgctcattatcgattgtgttttgagcccatgtgaccgacttttcgttagaggtgtttggacagttttgtcccatttcagagtccatggaagtttcttctacatccttttcgatttctgtgctcacagtttctactgtcgttaatgtactcatttctttgtaatcattttttatttatataattactacgttaatatggtagggttttcttgaaaaattgctgcccctcccatacaaaactcgttatatattcattagatccaatatataatataggattaaacaaatataatatagtatatgataaaaagtaacagtttacaattacacaattaggtacccaacaacacatttataatattaattttattatttgtttttcttataaatatatgtttgttattatgtactgaataactcttataaatgagttttaacggtttattaagagcttccagatttctcaattctggcaaacatctttatctcggtacttttattcatactcttatttagtatatattcctcatataactgattgttcttgagggtgttgatatattttaataaaatttattttgtttgatattattacactggttaacccaattaaatactcatggtattgtaggaaactacagggatttcagtctgtatgagttctgtgcccctccaagacttcaaaatgttattgtacctgtagaaaaaaacgtgggagtacgatctgctaaaagtccgaagtgtacatcggtgtttatgcatatggaggatcctttggcgcacctaaacggagatgaccctcacacacccttggtcactgtcgacgacctaaccccggcaggaaagaccctcagaggaagtggtctgcacggtccagagcgtacagatgtatttcgacttgtactttataatcgattgaaagttcgccagctacaacgactagtgccgagcacaaaagagtcaatggaagaccacaaggttactgcttcttctttttggtttacactctcctcatttacagttatgttcatcatgttcaactacgggttggattatggtttataccacgaacattacccatggactccacctagagatgacggtacaaggggcccgggtcctctgtactggttcactatataacccagggtcttgaatattaatttttcaatgaagttttaaacattttaaattgattttaactaatatattacacaattttgcccgtttattgttattttatcctagagtattctgaagttgataatgtgttatcatggggtcaagaatctcttgaaataaaactaatcatttagtttattttgcaaatttataggtcaatgtgctattaaggatgctttcgttaatagcgaagcttaaaaaacagaaagaagctgaggaacagaagttaaaggttagtttaacattattgatggaatttataatatttataggataatcaagaaacagctaagatatatgcacaatatgtgaaatcatttgatgggaaaggtgaagaacaacctttaaaatttgttaaatctgacgtgtatgatccagcgactgggactacaacttccgttgctagtacaggagtaaatcaagtatttacacttggagaacaggtatcttttactaattttatactttatatatgaggtgttaatattactttacaggctgaggaggaaaatgaggagttatcgtcagagtatttatcgcaaatacaaggttccgctcctattcataggaatagaactacgtcaaaagtgcgagaaattgatacttttattgaaggtaatttttactattaagcgattcccaaaaattgtatacactataattgaacgtagagataaaggagaaacagagaactataactgaacggaaggaacttcaaaaaagatttctcacagctactacaggtacaataaaattataaaaaattttctgtagaatatgagagatatgaaataaatgaaagattaaatcgcatagaaaataatttaaacactggtgcgccagacctaaacactactaatattcacattggaaatttgtctccaaacgttacagaagatattctgatgagtcatttctccaaatttggtaccatagtgggcataaggttgatcccttcaagaactgacacccctccagataacaagcagactggatttgtatcatttatgacacatgaacaagctgaaaatgctaaagtaggaatggatggtgttgaaatattaggatttccatgtaaaataggctgggccaagaatttgattaagccgatgatatcaactgttccaatgtttgcccctgctactcctaccatgccaattccacaaccgatgccacccattattaaggaccagttagaagtatatgtgccgactccccagtataaaaaaagaattattgatttaacctcaaaatacgtttcagaagtttctttttattaagctattagaaagttgtatataacacacttaaactatttctatgaatacgtgattaaccttttttctatagtctgggaaggattttgaggaggtaataatgaagaatgaacccagaaacggtattgatttaccaaatctatgtttttataggattgttttcattcgtgtttgacagatttacaccggatagtgtctattacaggtttctacaactaaaatataatgttgcagatggagagtctattcattagttcaaggagatacgatgagggattggaataaaaatatgtttaaaattagtaattttgggaaatcctatataccacccaaccagtccactactcatgatactgctccggcccatagcttacagtatatccctactataatatgtatataactgagttaataatgtgtacagcagtagtagtgtgatacagaatggtaatgtaatactgagtgaagaaaagaagaacgaatttgattctatattaagaggagtaacgtctgttagaaatgacatctgtaatgcaatgttatttgtgataaacaacagtgaatcagcatatcatctcacagacttgctgttcaattattttaacgatcccaacacaaatgttcaacaaaaagtatgatttcctcattttttcttaaacttatacattttcacgatgaatctctgtagatatcgatactgtacgtaatatcggatgtattatataactcatcttcgtcaaaacaatattcttgggtatatcgaaactcaatagagaaacaccttccgcaactttttcattcaattaaacaatgtaattcgaatccaattaattattattttatagataaagagaagagtactagtaaaatatcatcacaacaattaattgatgctgtgatgaaattgttaagtatttgggactcctggacagtttattctcaacaatttctcaacgtattctttactgaattagttaaattgacttattttttcaatcattttgcattacggactcctaatatgtaatgtgtttagggacttgaggctacccttttgggggatgatttggactcattcaagacccttccaggtaaggaaccattttaatatttatttttagaatttgaacaacataaggatttattgagtacaaatgatggagttgtcgttgattactttgatctcctcgcaacattaccgcttaaatatagggagactgcatatgtaactctttaagcagttatgtatacaactaatctttcaatttttataaaaatattaatgagtttttagaaatatttgttaatgcggttgaaagaactaaaatcaatgtgtctacaacgaggattattagttcagcctagtgatagaaactctcttgtcatccgattaatcatttatgataaatacttacatcataaacaagtaacttatactatttaacacaaatatttatcttctgctgcattaatattctgtaggaaatggaagagaaaaggagggagattatgatggaggatgaggagaatatgagtgaggaagggtctgatatggagcaggatgatgacgaggcatatgagttggagcaaactagaatacaagaggcaacagcccaactccattatacgctaatgaagagagcccagtctcctgaggttgttaatccaccagttgtagagcaacagagtgaattaactgaggaaacaaatgatgaagctgatgctaaaactgaacccgtgcaacctgttgaggaagaggacgacatcgacgatatatttgcatcataatatactctaatatattttttattagcagttagaactttttcaaaaaataggaaataaatagtatgagattaagtagtgtatgtaaattgaaagataaaattattcctgagctgtgcttagataagtaagttgacagcgaccgcagtaggtgcgattgttatgtgcggccatgaagactccacgaccacagttttcaccagggcagtccttaagaagacgaacaacctggtcaccgtcgactttgtagtacttgaggacagccaacttcacctttttcttcttatgcttgactttcttgggagtggtgtattgcttcttcttacgcttcttaccacctcccaataactccaagtgatgatcaagagatatcgtagactcagaacccaataattctgataactcaagttcatcatcaagttcgttcaatccgtaccataaagaatggttgatattttcaagagtatactgacccaataaataattttttatttggccaatggtttggtattcgtcagaaccaaagacagctgtcctcccattaaaaagattaaccaaaacctggccaatagcaacgttggaatcttccattttcaataacttaatttattatattattacaatgttgggaaaatagataaaactataatctgataataataatataatttatattcagtaagatgaatatagtagaaaataattgggttaaaataaataataattttgttagaaggctctataatttgtcgggtcacttaacacatgagttagaattgtctcattatcactaattaatgtatattattgaataatatttttgaacattcgagaatatcgtataaacaagtgatagattttatatctattgagggttttcccattttaatagtctaattaaatttattcaaaatatcaacactgaatcattattttgttattatttactgttaatattatgtattttaatagtagaaattaatatttaattgtaatgtgggcgattttttagtttacacaattaatcgaatttagtttaatttttattgcaattatttaatttttaagaatgtttcaccatatttaataatttttggtataatcgatgtaaattatttgtaataattgtaaattagtagaaatgtctgagtattggatttctaccaaaaaacattactgtgaagtctgccgatgttggctttcaggacactcacaggtactttacatactattgttactttagaattacataaaaacgccattttcttcaaaaaatcaaataatgtcgtagaatgttaagaaacatgaggcgagtaatcgacatatatcatctttgcgcaataaaatgataacatcgcataagaagaaggttgaggaacgtaaacaaaaggagtttgaagccgctgaaatggaacggctgaacgccattactcttgaggatcccacgcctgctgagccttccaacaaacttcctttcatggatagtatgtttcagtatgggcctttggtacaaccaattggtgactttgaaactgagaaaaggagaattgaacaggcaattcatagaaaattacaagggattgaggaaccagaggccgtacagaaaaaggatactcgtaacttttacacatatacatattcctaaccattttattagttatatatatatatattggtacatatggtttataggatggatggctaccattgatcaagaagatggaaccttgatatattgtgatagagttactggcgtaataacaaagaaaagaccaaaggattttgacggagaattaccttctcaagcttatcttacctcaagtttctttttgcgcatagttatacttaggccatacccttaaatattatttcattctaatttgttttatagattgggtgttgaagtatgaccctaataaaagaagtagatattatcataatgtacaaacaaatgaagttcgatggttagatgatccggctccaacaacacatacgcctattactccacaggttaatgctcttcccactagtactccacaaaaatctgaagatagtactactaaaagtaatacagagaagactagtgttaaatctgaggaaaagaacggcaatatagtactaaatgtgaaagaagaaaagaaagaagatacaaaactaataaaagtcaattttaaacctgcggataacacctctaatagtgtagaatatacaactaataaggtggatagtagtagtgataaggtttatgataatattaaaaaagaagatgatagtgtagtaaaaaagtatgatgggcctgtaataggtcaatggcaagtagttaatccaaaagaaagtgtttttacacattgtacagaaaatgaacaattactcaataataataatgaattcaatcaacatgtatcaaacacatctaataatgattttaatgaagaaatatttaatgaaaatgtagaaaaacctgtttatagaaaacatacacaggtaattcctacacaactttttattattattttaggaatctcaagatacctcacaggaccaagttctatttataaaacgtaaaattaaaaaaaaataattttttccattttaaatgattttattttaattattttaaattataatgttattatcacatcttttattaataatgtgtaaacgttcgtgaatacatggaatccggattaattatcggtaaaagtaaagaatctaggaaagttcttgatcccaatccaaataaaattgttgaaaataaaattaataaacttatttcaatcaattcacagcattttacgggtaatttggtcatgaatatagcttatttgcctttgattatacagttaattaataaatttaagcctaattctcataaattataattagcctttaatggaaaattggaagaaatattaaccttggattatggaaaactattaccaaatgagttgctgaaaatattcgaaatattgagtaaaaacctgtactataatgagaagatctactcgttagtcttcaaagctgttttggacaaagttgtttatttcaacacagatgagttgatttcattgttaactcatattaataggatttctgctttttattcctctaatgatagtattaattccacatcagatggtacagaactagtattaaatagtcctacacactcaaaactagatgtccagaaagtaataaaaagagtattagaagttctagaaaataagctaaagtataaaaaggacgattatttgggattaaatattctgagcattattaataaattatctcattttaattgttggaacttgtcaacttacctatccacttctgttcttaacaatattctattaaacaccgacaatacaattaatgtagcggaatgtgtaaatataattctggataattgtagtttaaggataattgacataatttgctcaaatccacagctaggttgtggtgataacaactcaaatttagagttatttaacaataaaaatttattattatcctattactcagctggagatttcagcattcttccattactcactaatatagttaataatgaccatgtttctgacatttccagcagtgtatcacctctggattttggtactttgtccagtacaattaacagagtacataatatattactaaaatcagaagaacaactgtataatattgaatcaaactgcttaaattctctagtcgagtatgtctaatatatttaattagataaatcttatttttagggtttgcttcaagttgttttattgcactaagtttataaatctttcacaacaggaagttatttacgtcaatatattcaatagggtcgaaaagtattgttataatcaatttcactattaattaggcatataatcccaaaattgaactttgtaaatcccaaaaatcagtgctacttagtactccttttatcgcaatacgttaataacaccccaacacacatgaattccttaaatgaacatatatttaaagttgtcagaagaataaaccgtaatatttcaaatcaagcgaatctatccgttttggataaattggcagtaagtaattaaaaaagtgtaaatatgtgtaggttttggagagttgttatgagaagtttgggtatgtaaaccattttacagctaaaaaatttattaattcaacactttcgcaattcccaaggaaccctgtagattcgcttctaattcagagaacaaaaacattttcatctaaacttttcttttacccattccttaaaccatcaattgattgtaaaaataatggtaaactatactgtaaatgggacataaatagagtgagaactcgttgtaaattattttcaactagtggcattttaagtaaaattaaacggtttaaatgtattcccatataattcaatacatgtactacatagtatatagacgtttttgaacaatataaaattacgttggatgaaccatctttactaattgtggtaacagagactcaggtgataccaaagataaagcatatgaaaaaactaaaaaaaatgttaggagataacataattgtgtatgtgtttaactgactaattggtacgataaaggttgtcagctatttttgatcccgatttattacaatattgaatcaaattctaaaaacatattaggaaatgagatgtcatacttggagtaaattgtttaaagggaaaatgtgcgcagttatattttcagttggttctaaatgttgaactggatttaaattcaattcggagtctaaatttacctgggaaatataaagttaattttaaaaaaaataccaatactgttactaaacatgtgctatcatttcccagaacacttgtgggtaaatttggactattgttgagaagctctccagtatatcctataatgaaagttatttatattagatagttgtaatattaccagtttcctctcttaattcacgcaatgcacaccgagttacggattcgtctctatcacaaataccactggggaactcaagggtatttgagttcactgatggtctaaactgttcaactactgataaataaaacatgtaattcccattctctaaaattaattataatacttgggtactcaaaactattatataataagtgtaactaaataaaaagtacggcgggtgtaacaaaatgctaaggcagttgcggagttcgcagttactgactgcccgaaagtgttcctggagaagatatcccagtacttgatattgttccctaagtttaggggggatccattctcatcgcacagatacgattcaaaatgttctaagataaaataattaaaacaagaaaataaatttatatatcttgtgtatagacaattaccgcaatcgtctgtaaaattatcatcgtttaaagaaggttctcggtagaagatgcgctcaagtttaatccatggtgatttttcaatagtaattttcctgatgatgctggatgaagaagatggaacggattgttggcgcatttaacaaaaattgatatttaattgataattgacaggaaattttacagtttcaagatttattaataaataataaatcgatgaaattttacatcgaagaaagataatttaagtaaaaaattaaaaaagaattaaaaacaacatttcgaaattatttttgatttaataaagataggtaaatgaattttaaatcagcctaatttatacgttaacctttattgtgtatacttacacgacattatttaaaatatttttgttttacacaataattttggttattttacattaatttttgttaaaatgtgtaaataaaattaacttggttgtaaaatatgaagaatgggcccaaaaataattaaatgctagtaagatgtttaatgaaccacctgattacttatccgttcagagcggtaacacactaatttaattaaatattattaaaactatgtaatactaattagatactggagaaatgatgtaaatttttagggcaaacttctgataatccacttcttatgcccctggataacagccaactacttcacattctgctcaattttcaggatacaaattcattcctgactaatgataacactaaatcattcataggtataaattataaaacttctcagttacaatttatccaaataatacagaaattaaaccggtgtaggaaggaatcatggaatgtgtagtgaaaaggaatataatcagaaggtacagatgaacaccgcaaatgaccttgaacgtgacgcatcacgcaatgtaaacccgaaactaactttaaaaagcttccagaggtcagatgcatttagaacttttaagcccgaggatgtacgttcagccttctggtgccgtagaacggtttattactcacttacacattttattgatgctgatataaaccggaagccatatctgatggataagccttttggatacatagatgtatataactttttgagagataggctaaggagcatttggcaggatttaacagttcagcgctgtacaaagcatcgaggatatattgagtcctttgagatcagcgtacgatttctcatttactccaatgagttgttatcgcagaatgaagaatatgatgagaaacaaaacctagtcttacttaacacctgcttggataagttaatgaatgggtatgatgacgtaagagtgtcacttggtagagtccatggcactaatgcaccaggtgatggtagactgataaatctggataatcgactgtataacttagtgttaagtacattgacttacgtttcagagcatgagcctgaattctggtcataccgtctactattattaatacctcagatactaactccaggaagttctgcaacattttgtgacacttgccagaggatacctaaaccaattaagaatcacccactagtcaagtattctatttcatgctgtctggctgctgtatctggaaacgcatacctttactttaagctgatgaacagccccaagtgccacccccttcaggcggcactgatgaaccgcttctcttcctgtgtaagaattagatttctgttcaacgttgccaattttaagctagttaaagactcagttaatcctcttaactatgaaacgctaacgcaacttttggcctacgaagatataaatggactagttagcctattgcagagatataacgttaatgccagtaacatggctagaggatcggacctgctggagttggagaaaattgacatggaaaaactaatgcatgataataatcacttgtcaaaagtgttcggaaaggtacagactaccagcagagtagtcctggcaaagttttcaggctataaatacaggcagctgataatggacccggatttcagagctcctttcataacactagaagatattcccaataacagtcaatacggtctggaagttcagaaaggaagggaatttaaagtaccagatattccaaccactgtaaacgcccctaaaagtgtaaacaacgaagtaaagcaaccagttacgttcaataacgtagcagaacctgtaagcagaagagagtatgtgccagattttgtctataaacctgcacaaattgacgagaaaagtttctatggcgagaaaatacgatcaaagctgatggagctgagaaaaattaatatggttaagttggaactgaacaattcatcgccgaatttattctttgatcaaattaactccaaacaacttaattcaatattaaagtttttctacaacagtaatcatgtcgatgttcaaacagttaagagtattaagccggtggttagtaatcagttggatgataacgtgaccagattagtgagtagcaataagaggccaaaaacgggtgaagatacaaatagaaagcaaaaattaactaaacttaatgagatgaacgagaccaattacggccatgtcaaaagtaatgaaatatacttaagtatagaaggaagtaaaatatatttggaaaatgagtataataaggtaaaatcccaatataactttactaaatacactagcatgtgtaacgagtgtaatgatagagtgagggctagaatttgtacctttttatcccagtcactaaccgaaactaacaaggagctaaagcaaaaactatatagattgttgtgtgaattatataaactatcgcataaatttatgaaaaagaaaggaacatttaaaggtttgattagatttttcaagcatgttttctcaaaggatttctataaaattgaccccaaaactcttaaatcacacttaaaacagttattcattcccttagtggcacagttaccaggtcatatatttaaccttttattaaagaccattaatgcagtatcgactattaaaagcgaagatgctcaagttaatagtatatttaaggatataatgggggtattgaataatggagttgatagaatagtgaataaaacttatgaagggatggttgaaatggttgaaaatcgcgttgtggactatgacccaaccctttgggggactggtgtatctctacacatttctttatttaatttatacaccccagaactgagttttgatggactaagaagaggagttgggagcggaatagttggttttaaaaataatattcaagactattatcacaataattatgcaatccagcataaacaagacgtgataaatatgctagcacacaatgataacactcttaaaagtagttgtgagactacgaataagacgttgggagaagtaaggggaagggatatgatagcacaaagattgttggtaaatggagtagaatataaaaatagtagtatgaaaaacagtatcaacataccaattacactaaacgtatcatttaacgccacggacgctcctcttttaaagggtttgccgactagtaatactcttagtaacgagaatatggagtcctcgggaatgtataagattaatccacacgtggtgttgttttcatgtacaagaccgataataataaacaataacagttatgtgtttaacctttttaacggtattaaccaagataagaaggtaacttttggggatggactgtcaattattgattctttgacaattttgtcatatctggctaatttaaaacaagattgccgaaccaaactggtggtttgctatagattaagtgtaactaagttggatatgctactgttatataaattaattggcagatgtagaagtaatttttgtactcataaatcaggaaattattctgataaattgagtgaactcattaacaatcttaacaaagagttgttgggttcattgattgaacaaggacttgtacataatacaccaaatgcaaggactttaattacagagtcaataaacttttgttgcacagggtttgaataccacactcctctcactaattatacatattacaatacaccaaatagtattaataagtttttgaatggaaataacaccacgtacaatgatataaacggaatgaaagatactcaagagatattggtggtaagattatcatatgaacatgacctgataaaggtgttgttaggagtgtgcgaaggtttagtaagcagtggaagtgttaaattaatgcaaaacccagttgaattgccagatttatcaaaactgttgttggatatagtaaaggcggaaaattacatgaatgaagttttacttaatccacaagggctactttccaactcgttacagaaggtgattaacagcataatacttaaatttccagaggaggtgtggagtttgcatgacggagtcggtgacaagtcaggaagttactcaaaaaattcattgataacacttttgatgaatttaaaagatagaattagatgcactccactaccagctgttaacaataatctgcaaagagggttggaaagtaagaatagggtattagagaagtacatagggagtgtaatggaatgttatagaatagaaggatataaagtaccgtatattgtagctcattttctgaagcacattaatagtatttaattttttaacacaataattactttataaaatgaaggtgttagtgatacatatttatatgtacatgtaagtatgcttatggtgtcaaaaaaatgtatttagtataatttttaaaaatgttaggaaataacacagattctacgataaatgaagttgatcttaattgttcatcaatcgatgaagtaattttatttacaccgatatatataataccaattaaatattaaataaacaataatttttcaatatataaaccaattaataggtaaaacaattaagagggagattaagcttaaaattattgatgactttggacccttatatagagaccattttacatcaaacgcctttcgttactggatatcatatgacttcgcaggataagtaagtaatttaggccatttttccttgattatatacctttacaaacatacatttaccatataaattgttatattatgttaaacttaaaattatgggagtgataattctgttagatggtctaggatgggaattgaagggtttttatatgtagtaacaaggacaaagagtcccaaatatagctttattttagtgaataaaaagtcagaaaatcatctaatcgagcacttgactccagaatttcaaatgaattccagtggaaattttattttttatcgcagcttagatataaccagagtatgatttaactaattttagtactagatataaatatatttacataaaaattatacaatattaatattaatgtgtagaattttctgaataatctacaaggattatggttctttgatgaaaacgagtgtaaattaacgtacgaaaaacttggtgaaattacaaatagaaagtcgactctagatttcaatatcaacgccataagttcactatgcagtgaactaaatgaagtcaatactcttaatacaaatactcagtccaaaccagttagttttatacctataatactctagtctttatcttagaaatcaacttactcataaatatatgtatatatatattacataaatatgaatataggatgctagtccaacaagtcaaataaaatcaattggttcatttatacttaatgctataaactttaataaatcggtttctaacgctgattctaaaacttccactagtccaaaagctgatacaattagtattactaaaagtatctttaaaacaaatgaaacaagtaatcatgaggaagtggagaagaaagctgagaaattggaagtagagtcaaagaacgttcatggaaaacatctaatgagtttactaaaaacaagtaaaaatgaggaaaaatcacctaaacaaccacctaagcgtgcaccgaaatcaccagtaaacaggcctgaaacacctcaaagtcctgagactcgaacagtaaaagttacatacgagggcttaaagaaagtaatttctgaagttgtacaatctgaagagttcatttcactcatttggaaaaaattaaatcaacacaatccataacacaataatgtaatataacactgttatatttaatgtaatataataattaattcatcatgaatagaataataaattttaatataaaaaatataaaattaaatatagttaataatatatcaaaaccaacaaataaacagagtttgtttcatatttataccaatttaccctaattacactgtaattattctaataaattttccataaatcgtacacaacttaatagtcaattatgatattaatgagtaaaaataattagtttggcttgttggtccagaaggtcgtggaaaaacaaccttaatacatggaatcttggatcacttaaaaaataataaagccgaatcgtacatcaccacatatttcgattttaaaaatgtaaaagattttaatttccaggtataacttactcaatcctaacacatctcctttattagactgcccttgtaaagtatgttgattccataataaattccgcctccaaactaacacaaactaattcaaaacaactgtaactttcaactatatttaattataaataatagaagttgaaatttttttagtgaacgagtgttcctggatttgaatgtcagatttccgaaatttaatcaacacatttcttcattttttaatcatttaagttagattttgttaatttaaccaatttttagaaaattcaaatgtacttaaatctaaccacaagtggatacaatcagtttcatccctaaaagtacttttattagtcacttgataattgtactttactcactgatactaattgtttaggatggaattagttttggagattggtggaatttgtgtatgatgacctatgagttaaatcctaaatcatttggagtttcgaaacaagtgaatttcaattctgctcaacttttcctcctttttgttaactctatcgcatgcctaattgatatggaaaattgccagcacattacccctctaagcagttcagttacaggccaatgggtatgttttataccattttaagtatattttattctatttatatcacgaataaaatatatagtgtactttatagtatatatttatataataggtaatttcatatgtactggaaagcataaaactaatgatgagagaagagaagatgaattggataatttgtaatgacggaattgaccacttggtccgctcgccattcctcagtgatagagggccagtttttctctcacacctgctactaaatttgcaaatatcatcactcccatcagtattcatttccaacgactctacagtcccgctccttttaaccaacaaacactacgaaaagttgttcaataataacgtcaataattcaatgactataaacagaagctatgatccaaataattttattttccatcaagtagatgaaatttcacaggaagaaacaatgtaagtttaatcagatgtattttaggtaaatagttacataaattcgccataactgattgtttaggaactatttgaacagtaagttggcatttggcgaaaagttcatgaagtgtatttggaaaattactggcgggaatttgagcctaattaacaaagttttcgagtacgttattttaccgtattcgattgtaaattacagggattatgaagaatttgtcaagaaagttagcctaggaactgtacagcaaatactctcaggatctacagtattcttataaatatatacatatgattttagagtgtggtggacgacgagtatttccctataaataaatcaaaagaggaacaaattaattatttaagggaagagcagtttaagatgtttctaaaaacactacaacacgacacttttaacccagtaccgtatagacatatactcatcctacaatccccttattttgtaacattaatgtataggacataataaagttcgagaatatgatgagctcctttttgagtagcgtggccattgaggaaatgaagctaaacatgaagaatttagtccatttcaaagttttggtaagtactcctttgattaacaagtttaggtgtttgaaactataagatatttgttaaataaaaaatggctaagagtcaaagatggcgtaacaatcaataataaaattatattggtactaaattaattaaatttgtattatttgtacttagttaatcatgtgtgttactcctaattactcagtcactcgtgtgtggtgtgaaaatggttaggggctaattgaggcaaacatattatattatgaaataccgtcaatgatgctagagtttaaaaattcactggtcaaatacttgctaaactcttacatacaaatacaatatggtaacaaaacattatagacaaattgtgttacagaaatgctcaaggcaattgagaaaattgaatataaggcgaactttctgttaaatcaaaaaacactttatagagaccttgataacctctttatttaatctttcttgctttttctattcttttcagaccagtctggtgccatctcaatctcactcctaatgccatatttagtgatagcatattttatgtaatggtgcaagtgaatacctcgggaaaaggaactcatacagagcccaaaccatgtatgaaatgacgaaaagaactgaaagaaagaactctaaaaaactttataatcttcctattactacctccaactttctttttcttcaacagtttaaacaacttctcacgaaatgtcatccttggcctgttcaaagcttcataatatatcttcaactataaaatattatacatggtaagcttaatacagttctcttggctacggattcccaggaatacatctctttaacctacaaagaatttataattcagtatataaaaagtagtaaatagtagaagtcgtagataacgtctgttaagtaaaacaaaccctttgatgataattggaagtgtcgatagtgtgtagcatggcaattgcttcgtctattttattagaaactgccacaggatcgtattcagagagtagaattatatcatgaggtaaaacctacgagtttaaatacacagtgtaataaacatacttcaggaattcccccaacacttgttgataccagaatgagtccactggaagcagcttctacagaataaatactgtttagtaaataaagtacccaagagagctatgcagaaagactcagtttgggaagtgttgaggaaaatatgtccttgtctcagtaccttattaacctcatgtctcgggacatatcctacatatagcttatcagaaaagttgactacccaaaatcttaaccctgtcgtgtaaataatgcctgtctaccattcctctcaacatagacaatttaggtcctccaccacctatattatatatatatatacataaataaataaatttgtgtgtttgtgaatgaaaagaatagcttaagctgtggtaccgatgataaattcaacattatcgtgatttttgcaaaccaatggaacaacttgtgttaataagtcaatgcctttgcgttcacataatctactaatgtaaacaatcactattttatccttcgaaaggggttcatcattacacttgaaatcgtcggattcctgcatgaatattgtgttaaggtgtatatgtaaatatggtaaatttataagatagtaaaaataaaacaaacaaaaacacaccaatgcattggggatgacagagactttcctgggatcagcgtatgatcttagtaccatgttttctcggtgtttgtttgaaactgcgattatgttgtcctcgaacatggtaaataccctcatatactaggataatgtgtatttacaaatttttacctcgttcagaaacacaggccctatgtcacacatactaaataggctgtgatcagtaaatattagtcgataatcgaacaaattggcgtacgtctcaaattcgcccttgtacctactcgaagcctataacgttcaacaaattagcatatactgagaaataaaaaataatatttattataacttatggtattatttttaatgatatgtaactgataagctaagaatttatttaaaaataaccatgtgtatgtgtataatgtcaacgttctccctgattagaacactgcgatagtagggaaaggcatcaaaaacagtgggagaggttgatggaggtattaacataacattccagtgatgataaaccttgattccattggccaaatacctaattcctaccctcctgctgccaaaatttctggtaaaaatgacaactttaagacctgagttcatttaacgttaaataaaacaagaaagataccaaattgtatgagatattcagctagtttgtagacgtggagctcaacacctccaattgtaggaaaaaagtattccgtaacgattaaaacagatattggtcttttcttaaccgcgctcatgttgtaccaatttaaaaaacacaaaaactatcttcatcttacttaaaattaaataaaatgaataaatcacactatatggctttaaaataatgtatttaatttttaaaaaaggtggaatctcagcacgataataatgtgtaagatgaagtctagaatttaaatttaaaattttcgatattacagaaatctatcaccttaaaatttttttataatctaaaaataaattattaaaaggaaataagtgtgtatgtgttagacataacctatctactaataaataatcgacaggttgctcttgaataagcagaggtaatttaggtagtacctgtatggatttcaaaaagctgcccactaccattggtagcgtagatttctcgaattgatggtacggtagaaatgtccttaatattcaagtctttcaaagcaggttgggacgcgtatcttctcacgtttatgtcaatcactctggttgcagcgttacggtggtcttgtctctgtctttcgaaatgcagctccctaactaacgcgtcttcttgtacgaactgatcgtctatatccaactgatttcctccctgattctgaccaaattgtccatgtcctccacggccaattcgtgcatttgccctattacgtgctcgattttcatttatagtgtccattccagaacgaacgtcatggaaaaaccacctggtgtctgttatttctgggccaactgatcccaaatcatcttgtttgacatctatgtacttgataagttgatcgtttcttaggttgacgaagcccacgaggttcatgttagtgaatgccaaaactgaatcttcacacaccagctgtatcttcatcttttgatcgcggctgttctttgtttccactaacaagtctgattcaaactctttcacgtttattgattttaacaatttgaacgtgttcgagttatagcattcaattatcccatccttatctataagaatatcaaattcattgtatataaaaattcaatatacatatcgttaaatgaatataaaaatacgtgcgacgtagatgttgaagtcataatcagaaatttgtaaatctgtacaaacttccgatcttttatctgtaggaagtgttttagtgctaagtgagcttgaattatcaggattcaaattctaaaacaagatttgttaaatgttacagttaccgttggagcgtgttgcatgtttaactcgactctttttcttaatgttttactcttgtattccttttcgaacccatccaaatcaccatttgtatattttacataatttacaagtttatcatctaacagtaaaattaacattgagattatatatatttaattattgtaaataaaaaatattccaaactggtacctaaataacgtttataatttacagagtgatcggaggagagaactcttctgtatttaactgttgggtctgtaaagttatttttcttgacaggtgatgattgagtcttcgatctctttggtcccgactcatgatctcttatataattccagaggtcatcttcatacttaaagtccactgacgtcttctcgtgtagtattctagccacggaattctgtgatgctacaataatattatattagcttatagtatttaacagaataactagtaattagaaacaaacttgagttgactgtgcatccccaaataaaaggatcgccgacggacttaacagtattagtgattttatgcaatggtttactaaaccgtctcaaatcccagaccagcattaatgaattatcgtaagttgctatcaattggtgttcattatgcttcaatgattttatgcacgttaatggagctacaacgtaattaatattataaaacagcaaaatagatgtataaataatgatttacaattaaaggtcggttttgagaaattggaagctgaagcctggcgtgtatcacagacaacaatagaaccacatgatagtccagctagaatttgtggataagatgagttctggttgcatactgtcattgacttgactaagttcgacaaatctgagaatgagtatgcgatttcaaactcatctgagtcccaaacctgaattatatttttattttcaatattaactaataaatattaaaaatacatcaattttgtagtctcccgatgttaaaaaaatcgaattatcttttgaataccaaagagaacatgtgcattgtgtactgtagtcaaattttttaattgacattctaggttctggtccaattgaagatgcaatctggttatagtcacaggaacaattgttcgatgatgcacctaataactacaatgatttcgtatcaaattacttgaggaaatatgagggtttaagagatcatgttccttgcttagtaagataacccaggatttgccagtcaaaagaataagttcgctaaaattaatgataaaatagatatttaaaaacgttagtataatcgtttatatggtaaatttaacaaatcaacatacccatttttggaaacatttaaaatgttctccccctttgcgaggattccagtgaatgtgacgcacttacatgtttccaaatactcgtatactcttctctataatatgatttataagacttggatggtattaaaggttaatacgaaataaaattacaatattataaataactgatataaataagggaaacaatcagataattcagcagataaaagtaaaaaatatgtgaaaacaaacttctaagatgtatttctttttatttttggtaataaatccgtgaaacattgtacaaatctggattccatgataaatattgctagattacgaatgatcatgattatgttatcataattatatacttaaaataaaaaataaaatcataaaaaataatataaatctatttactgtacgatattaggcatacaaatggtagtgtattaaattgcgagttgtgccttttcgtacaatgtttcgataacttcagtcatgtgtgtgagggatttggacacatcttcgtagatcggatggataacgacatcgtcgtagatttcaagggttctcgtgccttgatctatggtgccgtttagcctcttatccagtatcatttcagccagttttttctcgactttctcggatgttaactggagcttctgagctataaaatcgcactgaactacactgtatggtttcaaaatcctaagaatgttacgctccaataaggaatcgtataggccctcgacctcgtggtgaagaactggatccatcattataacgtctttatactccaccagaagctgttcaaactgcacaagtgagctttccttataacactttccaattttattgatcattacaatctctacgtggtttacgtacttaagtttattttttgcgcttagaagtgtgttaaggtcagtcccctgctcactaaggacagccgccagcattaggtactttagtgcctgaactaatttcctctcgtcagctctcacaagagtctcaatctccaggttgtgatgttcaggttctgccaagaaatcgttaacttcatcaacctcgagctcgtctgttgttggaacggggtgcattgagtaaaacttaaggtaaaaagagccaacggcgtctagcttctggttagggtcaaacttatccgaagctctgtgatagtcgtacagattataaaacgtaaaaaaaactggggatatatcagaagttgttggatggcaactgaacctatccttgtcactattcacacctagttcatcagtcttaaacttgccctgttgtccttcagttaaccttgtcaaatctctattctttctttttactctgtttaaattagggtataaataactgtacgcatggcatagtgacatgtgaaatccctcaaaactctcaaacaggtatgaatacgccgtcttgtagtccttttcgcagaggtacaaaatccccgtcaggagatcaatctctgcggtgacgtacactggagtattaatattagtggatgtgttctttgcgttactaacgaaaaccttcattttagtgaaattacgaagaagtaagaaaaacttcgactggaccagataaatatccagaagaagcgccttatcgtccaggagtcgaacctcattttgaagtacatttaatcttttagaagcgtctgtaaacctcctcatcaaaataagtataatcaccagcttaagctccaaacgtagtcccaggaatttcctcttcttagcatcacaccaagagcggtaaattgaaaaaattttatacaagacgttcaagtccttaacttcctgagataagcgctctaagatagaccgaaccatctttgccgtcttagcctgaggcaaaattgagaaaaaatcctcgtttctaaccaacaaaccgaaaagtgagtcggtttgtccagtttccaccaaatagtatgaaattacataaactacattctcacataaatacataactctttcatctgacaaaacttttaatttgtgctccgcctttaaatcagaaccagaaacatctgaacttggcaaatcattgcccaaaatggcctcgttcaactccacatatccttgcataagctctatagggtatgtacagcatcctattttagctcctggataacatttatctgaaattgagtcatctagttgtattttcttctgatttaaggcgttaaacctgttgaggatctcctcgacttccattataaaacactaatatatgttatttctgatttattaaaaatattaattcatttttttaaaagaaaattatatacagaaaacattaaaataattatatttaattaatgaattttcatgttttaacaccccattctggagatataaaaacatttaaaaaatgaatcatttgttaatatataacataaaataatatggcactagattatgtgtaaagaattaaacctaaaactcgaaaatggtggaagtgtttcattaatatatatgaaaatgatgtcatactgtcattctatggtttattttccttaattccaatatcccagtgaggaagctataaaaaatgagtttgccgaattaatgtattataaatgtgtgtaaagcttaccaaagtgttgattgaaatgttttctggtaaatgaggaactgggccattgggaaattgaccaaattcatcactgaatcattatatagaccaatcaattgatttagaagtgttattttggcaaattcaagtactatttacaggaatctattaactatatagcttagttagggtaaaattacagtaagtatttgtcttactctgttctgtataacgaatacgatttttgccgtgcgccagattgaaacggtttagcgccaattctaacattgttggagtacctttgtacctcaagcagatcctaatcattaattattcaacagattagttagatgaatacccttagtattcctggctgaacaacgttgttattcatatactcttggcaagcaagctgggcatcttcctcagtcaccttcatattcggcttagttaatgtggtagccgagctggtaccgctgaagagtttctccttctcagtcgataaacgcttctcgctgttctcagctgaagcctttaacaaatacagcgcctctcctacaaatagttcatgaaacattatgtagttactctgtaatatatcgacaagcatatgggaagctcgttcgtcaaagccttgtatgtcagattctaatatcatttgatcaactatattggagaggtaggatcgatggttatgttgctaagcggaagtgatttgttcatcaaaagtaccgttgaagacgaatccaccagtgattccgtgttttccggatctttgttaaaattttcattgttcattgttaagatttaaagagaattatataaagaagaaggttaaatcctaaacattgacaaaaacttaagaatggctgtttttatgccttattacatctaaaatacatttaacaaatttatttaacaattaaaaaaaacaatattggttaacaaaacatataatactgcttatattaacatgatagtgttgccttactagattgactaaaagttactcctcagttaataatttttccatagattttgtttttattttttcaacacatttgtaaactgtttaaatttagtaagattttgtggctcagtaccatcacatcaagtgttttttgataccatttattacaattcttcggttgtcgatcttctaatgcctttttaaataactaatatgtaagattaatttataattatataaatgattgattcacaaggccctgaagcttggtatatgggtcttcccagatttactcgcacatttatcacaattattctcggcataactttactttcattttttaaggtcctagatccatccaaacttctccttaactgggaacttgttttacaaaaatttcaaatctggcgccttgttacttcagttttatatgtcggacctttttcactcagatggatattctttattctcctcttttctcaattttcctcttcacttgagaacaactcagtttttactcactctccaggagcatatctttactttctgttcattcagtccatcttccttgcctgtattagcgcaggtttcttctggccatccggtatgttatatatatatatatatatatatatatattcttttatgaaatatagttacatacatgtatatatctccgttattctaatataaataatgtttagggtacccttacttagctgattccttgttatttgcaatcatttattactggtcaaagagggatatgtggaccatagtttcaatatacttctttaacgttaaggcctatcaacttccatttgctttgcttttcttacatttagttatgggttcatccttatgggttgacattatgggtatgatatcaggccatttgttctacttagctcgagaagttttacctagcaaaggttagttcaaatccgcacactttttcttaggatataccaactttctcatcagaacgcctaaagttttcgatttactagctacatctatagatcggatgtactcccagctcttccgtagatctacacaccttggagggtctagattccgctacgatccaagacctccagaacccacaggccgaatgttcattggtagaggaattaggttgggtgattcgtaactttttgaaatgtaacatataatgtagtactccatatatacatgtgtgcgtaaataagtgattatattatgtgtttgagtaatttagtttatgttttgagataaatgtctggattactccaacaagcaactcaattgaaattaaggcgatgataatctaaattttaataagttagttaatgctttgaaaccttttcaagtctggaggaatgcttatgtcttacatattcagaatatgaatttaatgtttccaaagtccaagatattctaaaatacattaaaatttcgtagtaacctgtgattcaagtgttcgagtcttttgggtatctcaaacagtgactgtatcctgttaaacaaatcacactgcttgtcataatcccacaacacgtcaggatattctaataaatctaaacaatcattaaggatataaactgaaccttggagatttagtctgtatctgcagtcatgagcataggtttccaattcgaatagcgtcatagcaacactgtcctaagactaatttaaaatttcttaattaccaagttttgataaaccaaagaattcttcaaacccagaagttgattgttccgcagctgaaacccatatcatatgttaagtggttcaaacctctaagtttctctttatatcacactccaggaagtttaacttaactgcagtcatcaaagccagtgaagctgagatctaaattaataaagttaaactataaataacaaacctcgtcatattccctttcatcggaatttgtgattaagatcttcccatcacacaaccttgtatctctagataaaatgagtcactgattaattacccagtagtttcagtaaaatctagcgtttcatggtatgaatggagtggactcttatctatcctaaaatttaatttaaaatatagtttacacactcctctgactctgttactaatgacctgtagcaatcaaaactactattactgtgtccccaaaggacaataaatccattctaagtaataattttattcattatttagataaatttagtacctgtgtcataattactgttcctgatttatggtttagattatcacagctttttactagtacgagtttatctaaattaaatttcatttaaaactttttaaaatcatattatggtactttatacattttcccatacataaatacctttaattgtaaagtttgctccatggtttatgagcttatcccttatcttatttatgtcgatttccttctccagcatgtgtgctgatacaacgccattgttctaatttcaattagctttatttattaaatatgtttataatattattcaccttcggaatctttgtagaagttgagattttggcatattttacatcaaatttgaatttactaatttgtgttacctaaatatcattaataactagcaatctacttgattctgtctgaacttagtcaaaaacataaaaatattatacattacaaaattttataaaataaataacacatatagtgaagaggatcataattaaaagtatatactgtcaaccgataagtataagtaaaaggggacagaacagcgccgattaaatcttgtaaatatcttcgatgatagtaaatacttaggtaggctcttactggtaaatagattctggtatatttactctgcctacgtaaccgaaactaccctagtctaatgggatatataagggatactaccttactctagaggaatatataaccgaagctatatttctttagggaatatgtaggggaaactatctttcttagtggaatacataccggtatataacaaaactgttatatgatagggaattggatatacgggtacttaaaacgtcggatatttacaggtacatatcgatctggatatttagcaagcctgctatttactgatagaaaacagatgtgtatcaagtgtatgaaatgtagctgaataataatataaaactgatatcgaaaagaattatattttaatgataattaaaatattgaatagcgtaattattgataattactgataggtaaccaataaatattctaaatatcaatatgggtgctgtctgtatcccctcgatgacgaaacatctgcgtgcgtagcacctgcctggtaggcagattgatcctttcctcggtatgctccatacgctgctaaattattaataagcaagttaaatgtaaaataatttaatgaatgaatttgagtaaatgagtaatttaagtacctgaggaagcggcatagggattggcagatgcagttgcggctgcataagggtttccagaggcagctgctgcggcataggggttggctgaattattggacccagtggcgtaaggattggcagccgttgcagcagtagctccgtaagggttggccgttgatgccgtagctgctgcataggggtttgttgccgtagcggaggctgtgccgtagggatttgacgaatttgagcccgttgaagcggtctgacccgaggttggttgttgcccagaggttgagtagtagtttccgtaggtccctgccattgccatttgttgttgaaccatctgctgctgcaaaagttggtactgtgggtactgttgtagcatctgctgctgagtcatgttagcgtactgagatgggtcgtaagtagcctgggggcgatacatttgcgaggctgagtacatgtcagtcggggtttgaacgactccgtagggatatactgcagctgacggtgctggtgttgttgtcttcggccttgtttctgctgccctcacatcaactttgtttccatacacgaagtgagttgggttcttgagtgatcctacggctccttcctcggtcataaatactataaacccaaatcctcttgaagttccatcaactaaaatttatttataattagtttatagatagcatgtaaataaatgtaaacataaataaatatatgtaactgaataattgattaagtacatacgttgacgcataatggtaactttgtcaacttcgccgaatttggaaaagtactcttggagcatttcctcattgagggccttggacaaacctccgacaaagatcttcttcctcaaactcgcagcgacgtcagtttgcatggcgcggacatcaacctacgattttttataacgagtgatcaatattatagttattacataccctttttccagagacgacgtgggtatctttgaagacgctcattgtatttggctgtacctttagggtaacaaagccgaaacctctgtgtcttcctgttgccatatccctcatgacttgtgaggcgaggatttgtccatacttggcgaagtgggcggacaactcacctaaaaattttttcaaagtttgaagataccttcatctgtgttgggatgcaggccaccaacaaagaacttcagggtcgaatcaatgagagtgttaacagtagccacagctaaaaaattaatgaggaaaattatagtgggaataaagggtaaaaatagtattaataatacctgatggaggcttttcaattattggaggaactgtggtcaaatatgtttcaggagcaacagtggttgttgagtggtgttccttgggtttctcatcctttggcttctcagactccttttttttctctggctcttgtttttcctcagatttaacaacttcttcagattcatggtccttatcgttgttatcttcggtttccttctttggaactgggtctaactgttcctggttgtcagatttagattcctcggtcgacttaacctcactttccttatctttatctttatctgctgttttgttcttccttgccatcttgttaactttctaataatttaattccttggattaaattataataaaaacaaagtagtgagaaaagtaattaatatttactaaactgaatattgtgatcagccctacagtcatacatgaatacatttctatgggaccaattcacttgatcctggaattattgtgacaaaatgttatttttaagatgtattttaacaagttttttctaactttaaaaattcaaatttgcacctttattcaattaacatgtacacgaatttgatagttaaaatattagttctacatcttattaacaggttaaaatttttatagtgttgtattttgtgatttatacaatagtaatacagcaatatggtaatcactcctgcctccgcacaaatcaaatgatccccaatcctgctctgagaccacatcatcgtcgaacttgatccacctgtcttcttgttttttctttttagattctttttcaccatccctttggttatccatatctttttcattactgtttgacgggtttttcgtcgggtattccctcgaatccttggtccaacatatgtaatgacctgcatccgctgttcttccttgatgagttactatagaaataagctcatattttccagtagcatattctcccggtgatatttcgtaaccatccaaatttaccatctcaacatctaggttttcgccctcattcttattctctaccttttcctgtccatttaattcttcctttaatttgtcttccttcttaatttggtgggatttagcagctcttagtttttgttgaagttcctaaagcaaaatgtctggcatataaagtacctcagaacaaatactcgtgatatcgatatacctctcaaaattaacccttctacacaccttggctttaattgcgtctgtatgcgatacttggctcttctgcttccactcaaaacggacaagatgtacgatcaagtacttcgggagagaactaagcttgctgaccttgttatgcaaaacgtcacagccatccttctctgaaaactttagcagctcctcgttaagtgacaggttaatcccgtccattaaggttccaacagacttcagtggagttcccatatagcaggatagcaccagattatgttccactgaactgacattttccccgggatttgtgtctgtctccgacggttcggagtctgaaccctcaggcttaacaggctttgtttttgagaccatggaaaagccaaacacattctctgcaatcttatcttcagataaagagtttaagtttcccagtatgcaatttaaacattcctaaatttgaaaattatattatcaattgaatacctctgcgtcctgttgcatatacattcctaaattaaagtcaatttaaaatatgcaaattacctgttttctcatcctttctacaaaacagaggatttattttcctcaagaattgtatctaaaatgatgtttaaattgggtaaaatacctgaaccagggggacaaatctctcaagggtgtggttcaactggttcttcatatcaagtagtgactttgcaaaatggacgtctggtgagttaccatttacttctaagcactttgaaacagaattccacaattcggtaactgggaataggaattgaactaccgaattaaaataacacgtattccctaggttcattatgccctaataaaattatatattagtcatttcacgatctatatctagaaattttacttataaatattgtaaatattataaaataccggtggaagtttaacaattatgttatcattcataattttggccttttcctgtgatgacagctcctcaaagaaacggactttctcaatacactcgggcggcttttccgcactccctattagcataagcctagctccattagtaatcttaatttttgataaatcggcgtcatttggaattatacccttaaacattatcttttgcctttcgggaggcacaccagtgagggaactaaaataatatgtaataaaatgtaaagaatcatacataaaattatataattaataccaaagttggtttttaaaagactctaaaggctcatctaagctcattttcaggccttcgtattgtttgcccatccatttcacgttaacactcacagtattatcttggttttccataaattagataaaaattaatttaaattgattaaaattgagattttgtgttttttaactttatttgacgaatgtgggttaaagttacatcggttgtgttattacctcatgacgtttatcatcacttttttatgtctatagaaatcgtccgatccgaattcctgttctattctttgtttagttaatactaatatttttagtattgattagctttaatttttttgtcaataatgttggatttaattaacacagtaattttatttcaacattattgattatgtattctcaaaaggaggtttcctaactatccagttatttatttgattaagttatatatgaagctgcatttatctaaactgagttttgttttagattgatgatatcagaagtaaacggaggagattacgaagtgaatcctgtgtagatgatgttgatcaagaaccttttgaagaaagcaaagaagacacctctccaaaacaaaaagatgtgagtttattttgccctattttgcttagaacggcgctgaaaaagaaggcgttgcatcgaaaaaagccaagcactttactaaaattgacgatgactttaaagatgtgagcactctggacaaggagttcgtagagaaactcgccaaagaaactgaggaagagaagaaagttgaagatccctggctacaatcattgaaaacctcagagtttgatgtgagttacagacgcgcctgttaaaatgttttaggacacccaggttgtctatgacagtcccaagagtgttgtaaaaccttctaaacgatctgaagcagtggacttgatctacgatttaccaaaagttgaagtgattcgactgctggtcgcaatgttagaagatgagcaaaccccttccgattacttaaaatctgctgaatttaaggaaaagagtgaaagtgacttgaaaaaatcaccatatgaagtttctgacttagcgcatgttctgaccatgacatggcagagtgagtttacacagtaaataaacgttttagacgtgtatttcatgacaaaagaagaaattgtcgagtcgctcatgacctacaaaaacaacggtttgtaatttttaccaagtttttttaaaaatcttatttaaaaaatgttatttaaaacatcttgttaagaatctttattgaaaatccctttaggcaaggaacttaagaactacgagttcaggtgggtgaaggacgagcttgccgtccatggaccatacccacatgaggacattcttatgtggattgtatatgtaagttgactgcttcttcatgacatctcagggttatgtttccgacgagaacccgattttggttcgtgagcttgacgaccatggccatccaaaaactctggaatggacaaaatacaaggactcggacatttacaacatattcccggttgaaaagcgagcaaagtcccaatcctctcagaaacctgagaaagagcaagaacaggaacaagaagatgatgatcatgatgatgaaccggaagatgatggattctcggggaagaagagaaagcaaaagttaattggcgtgagggtcaaggacaaggaggaggaataccaagaatcagatgacgacgattatgaataacctgtaacataatgatgtaatgtattgaacacgagaattatgcatatttacacttatttatatattttatgtgtctgagtgtatttgttttctttatgtgtagttagtgtggtgtgcaactagtctataagattaagggagggttaacacttcacatccgtcacgggtaactagaacagtgtgctcaaattgagaacagaaaccgttatctgaagtggcattggtccatccatcctcccaagtgtatatggaattatctccttgacaaattatgggctctaaattattataaatgaaacgaaagtaccaatggtaaaaacgtgaccttcttcagctactcctggagttgaactcgctaaaaacttttaaaatcaggaaaactaacggtgagagaactgcatcatgggaggcatgtggagcacatgaccaataaaatgtcctccaaactcctttataactgaaaatccgttcttctcagcgtggttcgaaacaagtttagccagttttgagaatttgacaccgggtttcaggctatcaatagcaacgtaacagcattcctaaagaaatttattagttgaacgaatacctttgaaactaaaaccagctttttgatctcttctggagcctcgccgactatacaagttgcagcacagtcgcctgacaaaagttattaaatttaaaggtaccaaaaaagccatcataaaaaacagtacaatcgtaggaaacaacgtccgattcatgaaaaggcctcatattaggtatgccgtgacaggcaactaaaatacaatatcttaaaggaagttaccttcatttactgaaacacatatagctctagggtatccatgaaaattaactccagagggataagctcctgaactaacgataaaatcctgggcctttctgtcaacaaaatcagcggtaactcctgaaattaatgtaagacgaaattttggtgaagttgcaaacctttttctgtagaatccaagcataactttaaacatttagcagcgattttggcagcagctctcattttggagatttgttcttcatttttaacttcagcaaatggtagtttctggttgtagtatatttttaactcatcttctgtgcgattctgggcgtaatatggtctgggtatatggctaggaatgggatcatgcgataaaacagggtattcacctaaataattgttaaataattatcgagagattttgtataaaaatctgtaccatatctaactgtttgtttaaagtttttttgggattttagtccattcttgtttgccaaattagggcatatcttctccaatacgagttttggtgtaagaaaggaatttttcatgaaatacttgcttattttaactgtcatttacattacaaataatctaaaaggtcaatattagttattatttagaaaaataagttaaataatgtagctttgtgattcttctgttccccatgtgcaatagtaatttattctatcattttattacacattttcaataaaatttactcaataatattttttaagtttatctacatatataaatggcttctagtcaaaagttgagatttaacccagagcatattaagctgataaggtacacattttaaaaaatgcttaaataaatacatatttcagggaccagtttaggcttgtagactctgatggagatagattaataaatcaggatgaggtatgtgcagtgttttttaattttatgttttagtttcggaaactattcagatcatttggtcaaacagtttcagataaacgtttggactggatagtttcaggtaaaatgtgaatttctgatataaatcaaatttagagatttttaaggatctcggtgactccaaaggtatttttcctctataatatttacacttaagggattgattttgagacctttatcaacagtttcgtaaagttttattcccgacctccgactgagagagctttggttgaggctcttcgtttgtttgagaacagctcaggtaacatattggattcatttgacacacttaggataccttgataagggcagattatttaatctcctttcaactagaggtgaaaagctcagtaaatcagaacttgaagagttttcacaaattatgggtctcaataaggatgtttcaaagctagattccagaaaattagcagaaaacatgtgtggtcttctatctcaggtcccaactccaaactagtaatctccttttttagtgaatgtaaatgttttatttgattagaattatcatatatttgttgttcagaagtacatttatactttaacgtcgtgttcggtgtattttccttttgtcgatgatttcccttttctttcaagtatcttacgacggtgcttgtcaagccttagctttgtaataacgacgttgctagggtggattccaacttggacactctcacgattgtttttgtctctggttatacgttcaatgtaaatcttccacttcttacgataaacttgggtgacctttccctctctgtcgtgatattggcctcttaccaccatgacttcatcgtccttcctgatgggtattgatctgacgttatacttttgtctaagttcacgggacaaaactgcgctcataattatccttcttttacttgagtgggcagtaaagtgggccttgcggctcttccttctactacttgaaacggctaaaaaataattagtatttatcaaatataattgtaatctgcaaactaaataaaaccaacttttgcttgtcttcatatttaataaaatataaaattcaagaattaaacgccctaaaacactgttattaaagtgaactgttcgattttgattatttgtagtatctaattcttagaatcttctagactaagcaaaacaactgtgggaaataaaaataatagtatgaaatttaaatagtcatgaaatgcttaccagtaataaaatatacagagaagtaaaaattatataaaaataaatatattatatggtaaaatcagaatgaatttgggatgtatcaatataggtatggggtgtgatatttgagtatagtaccaagtggaagatcaataaatagataatagatttgaaattattatgtaaattaattattttgtgttataacatatatttcattttccaaattttaaatgtactctccaatgtgtcaatttatgtcagcgttcattattaacttaaaacggtgtagagtccgaatcaatacatcaatatatcatatataaatagttaagctaaagttacaccgtttcttatataatgacaggggtggggttcgaacccacgccattactgacagcggcctaaacgctgcgccttagaccgctcggccaccctgcctgctttccaattctataatttacgttgatatacatacatatagttatttttttattgagtgcaaataattctttgtttgcttactctaattaaattatatagtcagaatcatcattagtcggatgagtaacaaatataaatggcgttattccataataatataagaatctcataagaaatttaacaaaatttaaactattggatgaaatccgtataaaatataaataattttataaataagtctgttggaacgtaattagggtgtgtggaagattccagtcataatttcttgaaatttctcaaatctttggattcctcatgaaattaaaataaagatagaataaaaattaaataaaaacttatttataatttatataaacgattgacaggggtggggttcgaacccacgccatcactgacaacggccttaacgttgcgccttagaccactcggccaccctgtcttccaacaattacataatgttcatttgtatttgttttatttgatggtatcaaattgtggataaaattttaaattgtgataattttaaattttgtgtagaatcatgaaataattctatatgatgttgtccattgtggtgaatgatactacacataattataatcttcccacggattgatatgtcctgatacctgaaaacatctaaaatagttggtagtcaaaatctaacatgtaaatccagcattacattaaatattatgattcttattcgttaaaacagtgttgaggtttaaaggatacataataatttatgtcttgattgttttaataagatcactaatgttatctttaagttgctccaagactgggatcaattctggattgttaaagttggttccgtatttggcattacactcctggatggttttggaaatctccctgaacttgcatccagcatcctaaagtaatataaagattctgcacaaaccttatctttgatgatttgggcgcatttgtttttggttattgtcagacgacccaagttcttctcaagtcctgcttcccagtcacggactgaataccttgcagtatcgtactcctctccgtaaagttcgttcattgttgttgcagaattcctccttatgatgaacatggatgtaagatttatctgcttgcaatcagtattgaacaagaaccttcctaattcacacttcgatttatcacagatatcagtgggtactaaacagaaggacttcatggaacctgtggctttgaactctcccgccctgtttagctccttatcaatgtattggaagattctgactgttaagtctccctaaagaaatttgttaatgaagaaattaacctttgaagcgaggacaaccaacccaatttgaggatcccagtgtggaatcaagggagaaggcgaactgtcaatatcattggaaatcaagtgtttctcgagtttcctcgtgtcccaaacccttatttgtctagtcttgttatcaacaaaaccacttgtaaatatgtggtcacctccgtaatgtcctccaagccataaagcacttgtcaacttattagagtcgtgagccttatacttgctacaacaatttcctgatctcgggtcaattaatgatacattcgcttctttggttgaaactaaaatcttgtctctaaattacattaatttccaaacttaaagtacccgttaggtgtccaggagcatgaagaaggatgctcaccaattgaggttgaaaatagttctttgccatttgacgcgtccctaaattttttagaaaattttttttcttaccagactttagctgtacagtcgaaagaagtggtaagaagagcgtagtcaacagttggattccacttgagatttgtgaccttcattctatgtccttgaagggttaaagttgactcgggtacttcgttagactctacatttgaaatgtcccaaattttgatggagcaatctgagataaaattgggttttgtggtttaattaccatcagaagacgaggaaataatgttatcgttgaatccattaaaatcaatgtcaagaattgatccggtatggcctgttaattattattcacttgggtattttcagttacctaacagtttggttactggaggattcctctcatagttgttaatgtcaatgattgaaacaattccaccgctgccgacatcccaggggaactagaaaaataaaaataaaaattataaaaccaacagcgatgttccttgaactagcggctaatccgcaggactgagttggcttggcgctgatttttaggtcacgatacgactgtttccagtgttcgcctaacaaatgctcaagtataaaataaataaagataggatagatgaatatgaagtaaatttacttaaaaataactatcagaaatgttcaatgtcaatgtgtatgagtaccgaaaatatttttaagtttgatgcatcccatgtcataaattttagtgtagattgtattagatctaagtcaacagataaaatttgaaaaacaatttaaaaatactatattaaatccctgcttctttggagtataggtgaattaaaacgtcaatttattaataatagacgttacagctatcgtaaatagtaatgagcaactacgagtgcattcaggtgctagaatcttagaatctagtattaaacaacagtaataattttacagcaaataaattaaaatgatttcacaaaatatgttaccctatagttacaatttgttggtaaggaccaagaaatcaggtgatacctatgtacaaacaaataaatttgaataaaactgtaagaacagaatatttttataattactaatttaattattaatataacaaattttcaactaataatatgccaaatttaatccagattctgtaagaatcaattcgatttagaatcatacaataacctagcctcctaactaatggtttatgattttaaaaaaccagttaaatttaattgttttttaagaatctctaataaaacaaatatattacacaaagtgaatacaataaaacactgatgctaatataagagaaaattttgtaaatatgagagcaaattacaacttctatattttatcagggagagaataacaataattgtgtacaaatttataaattttaattaaatttacaaatcatgcacgccttataaaccaacatgaaaattcctaaggaattcaaccggtttttcattcttctataattatttattttgaaaatgtagttttgtaaaattaaattttaatttcactaatttttaattaatcatgtaccatagttgtaaaattttgtattatggcgacaaaatagttgtcttccaaataattcctgtaaaatattcgaccctgaaatagagtgattttaaatgttattttcacggtcacaattattttatcttattttaatatttaaattcgatgatttggtgatcgctccatcaccgccaggattatcaagtaaaaataatagtgatggtgctagcactaggggttctatattctcagtaggtactaggtcttcctctacttctagaatatcgcgttctactggcagttctaatttgggtggagtagttttggacgttgatgctaccgatgtatcaaataaacttgaagtttctacttccatacctggaattctaaagtatactttgaaatctagttcaatgggtagctttaagagtataagaggaaatggcaaggatcttacattttctaaaaaaatcgatcatgcactttgtacatcgccctttgatggtcatttgactgtagtattcgaagaccagacttctgaagagtattttcttgaggatgatgggtttaaaaaggtaaaaggtgaatccaaaacagaaacggaagcggaaagtgaacccgtaaaaccaaaaacaaaggttgagttaattgagttagatttagaacatcctgccgctgattttaaactcgaagaggttagaaatataaaatgctacaagccaccagctgggaagattatatcaaaaataaagctcagcaacactttaagattactggaaaatgatgtacaagagaatttcgtctgcttttttcaggacggtgaaaagtacagcatacttgttgctaacagaagtagtgaaaaagaatggacaaaatatacactatcgaaacaggagttaaaacctatacttatggacattacacttataaggaaatttgatgaaataaaccctgaaacaatattcgtagacttatctactccggaagatggtcaggtatttaaattcgataacttgatcgtaaatgaaaaggagggaggtgtattgaagagcaaatctcaaggaaataaggatttcatccttgagttcaaagacccaaatgaccaaacaaagcaagttgaaattaactttcataaaaagtttcttgctcaagagcaattaaccctccattcaatcaaaacaaaccaagataacactgaattcatctttacatatgttaaagataatattttgtttcatgaaaaataccttaaaaatgaagggaaattggaaaaagatttaagtttatcgtacggatataatttagatagaacgaaaaagcttctgggtaagaaaaatattgctgaacaaaatgtgttgttcctaaaaaccttggtaccagattctgtggatcaaggtattaagatcagtcaccatggaaattttaaagtatttgatttcgatcagtatatgagtaagccaacatttctaattttcccaaacctcgaattctacctggataaacatatcaatcacaaactaattattagtgaaaccggaagtcacacgaacatggttatgagcacaattatagatgataagaaagtacattacgtcattactactgataaagataatggtaatccattttcaataaagacaaaggttgaattactaaactcactttgatttcacatttttgtaacatttaaattttaatttttaaattttaaaatattctttattgatttagtgtattaacattttatacatcagatacatcactatgggaaggttacattgttaaacatgttataatgtagttttatttatacagatttgttggtaaatttaaagtaaaatgtttgtaatcatttaatgttagtatagaagaaaatgtaacacacacctaagtaatcaagagtataataactgagattctataagaatggataataatcgagattccgatgaatcttctgcagatgatggagaacttatagtagatgcagaggtggtttatactaaaaagtagttattaacagaactagaattattatttttcaaaattttaatatttaattgtcaattaaatttaatataaacaattttaggaaggattctttgacttattctcagaatatcatgaaaaaaatgttaataaagagtcaaattcggtagataaaccaaatgaagattcgaacgttactaatcatcaaattaaacccctaaatactgacaataaaccaaaaaataaccttttatctaacttaaattggtctgattttggactgtgtagatcaatattgagggtaaaattaaaatttttacaatttttatcaataattaataggcaatatcggagatgggataccaaaatccaacaataatccaatcaaaagtcatacctctggctctggaaggaaaggatttgttagttacagctgaaacaggtatttattttaagtaaaaatgtgttaaggttctgggaaaacagcgtcatttttaattcctacactgcagagattagtagtttcaggagttttaaagcaacttacggtataaatatacatttaaaaacaaattaacaatattttagaatgaaaagcaagtccaaaactctaggtttggtactaaagcactggtaatactgcctacaagggaacttgcagcacagtgttttaacgttttcaaattattatccaagtatctaagctcaaaatcaattttggttagttttaattttaaaaaaatgtattagttgactggaggaattccaataaaggaacaagagagcagactaagacaattcccagaaagtataatttgtacgcctggaagggctctggacatgttaatgaattccagtgtatgttaaattaaatagcattgaagtttagtcaataaatgtggaaaatattgaggtggttataatggacgaagcagataagcttcttgaattgggatttagagatgaagttagttacacagttttataagttataatttagtgccttcaagttttaaagtactgtaacaggaatcgccagactatgctgtttagtgctacattgactgaagaaactaaggagttagtgagcctctcactggtaaacccagtatacgtgaaggtggacgacccgacaaaggtctctaaaacactcgagttcgagatgttaatgatcccaaaagaggagtacagggaagcttgtgcactttacttatgtacaaagtattccaaggagaaaacaatactatttttccaggtaaaaataacatggtttaaacttttttagactaaaaggtcagcccatcgcatgtttctcattttcaatctcctcaatatgaaatgtggagaactacatgggaatctatcacagtcaaagagatttgaatcagttgaaaggtaatcatttaaggttaactaattttctagatttaaaaatggtgaaattgactacttactggcaagtgaactggctgctagaggcttggatataccgggcattaaaacagtaatcaatgtagatttaccaactgatattacaaggcatttgactgttctaaataataaaattcaggtacatacacagagttggtcgtactgctagaatgggatcccatgggaaggcaattactctttatgtagacgatcagaggtcacaagttaaactcttccttaaaaaaacatccgacatcggtgcccctttatcaaaaaacaagaaaaaagtcacatctgcaacactaaataagtataaaactaaaataggtgagctagaagagaagattaaggaacttctactggaagagagcatagaaaaggatattagaatgtgtgacgcaacaatcaaaactcattctgaaagggatccaggtataacaacattttggcaaaaatttttagagaaaatactagagaaaagaaagtggtttagatcgaaaaaggacaagaagatggcatctaaggaggagtttgaggaggcgaatcgtaaaacacaaagaatggttgataaggaaaagaagaatgagatcaacaaaaacaagtttaaaaaaattaaaagaatatctaaaaagaagaaaagaaactagacggatgatgtaaattactgatgaaaaatgggagaatcggaagtttcaagatcaggagggcataaatttaatcagaaataagaatttgtaaatttttttcatgtttaaaatatttataaatgttaaaaggatataatataataagaaaataattgttactatttgatataatggttattaaatcgtagtgatacatgacagtggtgttaattattttacatctattccagttatcattttacaatataacttatgttaaattaattattggattttttatttaaatgaataataattcgtaacttttgttgtaaaataaatatgagttttcttcctagttgtcgttttaaaaccgtactaaaacttggtcataacctccagatctttgatatggcttgattgttgtcatttatctattttaaatcttctattttaatgtttccgtgtatcacatccacttataattttaatacagctttgttgtaacaataaattcttatctaattttaattgtttgtttatttcacgtagtaaaatgaacgataaggatgtagaaactctaattcaaaaccctcctgaaaatacggagttctccaaacatgaaactgagaattctaaaaatgtggaatcttccccaaagtttgatccaaagatgagctccagggagatgagaaagataaaatattacgaggataggttcgcaaggatggaagatgaaaataagacgagctcctcatctttaaatatggaatctggcccgagtgttcataaaacaagaaccagagtgcatgataaaagacgttcaatggatcaaaaatcgtaccgtctatcatcaatggatggatataggcatgatgccgcagattcaacatacacaagaactggatctagacctggtaggaagccaggtagtaaaaggacggctacttcaaccagcttgaactattcaaataattcaaagtatgatgcagtgtcaactgacgtgagagcgacagataaaaaaactctcctggaaaataggaggttgatgagagttcaatcaatgcctacagtgacaaagaagattagggttgtggaaaatcactctacacctgataaggctgctcctgaaactccaacacataccagaagaaatagggttaccagatgggatgttaaatatgtaacaaagtcttctgaagaaccgcaacctacaattgaacctcctcatgaaccacctcatgtcaccaaggaggaagttgttgaatcggatgtcccaaaagaagagcaagttgtgacagagcttcctgaagatgctctgaagccatctctagttcaacccgtgaatagcgaagaatccttgaaagagatgagtgaacgtgatattataacaccagtgagtgacttgactgatttctcattcgaccatgacaccaaagaccttccattagatgtggacgagtttcttaacgaagatgatgagcaagctcaattaccaaaagtcgaggaactcactgaagccattcccgagcccgttcctgaaccattagaacccgtgaaacctgaacctgagtacgttcagtatgaatatgaagagccggtaattcaggttccagtaaagaagaaatcaaacagggggagaaaagctaagaataggagagggccagccccagcagcccgcataccagaacaaccatcagatcccgacaaatcgcttttagatgacctaactccagccgctgcatccattgactatcaacaagaaatcgtcgatgaggttaaaccaccagtgagaagggccaaatcgcatagaactagaagaaaaaggcaagaagtaagtttaatgtatttataattattattagtactacgaaccagaacggccggtggtgtcgagggggaaacacgcaaaatcgagatcgcataagggccatgcgggagcctcagaaaaacacgacaaatcgtatagtcactctaaaagcggagaacttgggggtatttttgtaattcataattattttttagacgaaaggttcataagcattgataagctccgcatgatcacagtagaggaggctgagaagatgattaacccatgcaaaaaaaacgataaagatatggaaaacttgaaaaatgccatcagaagccttgggttaactgaatctgagtctttagatcatgaaaacgaatctcctaagagaaatcgattccttctcgacccatcaaacattgtagctccatgtgttccccttgagcaagagaaagtggaggtggaaatccccgacgatccactcaaactctctttcaaatatcgtctatttcacagtctcaataggctttaaaatatcgtttaacataaaaatatattttagtaatatattttgttaattatgtaattattggttattatattaaggagtatatacattaacgagtatagaggttgaaaagacgtttaatctcctgaaaactgttatcaaagttgaactaaccttaagtcttcggttcagctttcctgaaagctggtcattagacttggagagtatctgctcgaaaagcttatcatcgtcaataatttcataatatttcctaaattttaatgaaaatcaaaaactaacttcttaatgggttttaaaaaatctataatacaggatgccaaattcattttcaaatcatagaagtttgacaaatcaacacttttgagaagttcagggtaagctttattggagaagaaactgtatagtcgaagtaggttttgtatctcaggagtgattgcctctaaaacattttaggctgattttgtctataccttcagaagtctgagtcttcgcgttttttatcttccgataaatatcatcatcagtgtcgagcatattaattgtgtcaaactttgactctgaggacttggacatctttttagtcccgtttgatagcgatttcaccctggaaactatattgtattcaaactaacttgtaagtgaatcctttaaccatttgaggcacggtaaagtaatttgagtctatatggcggtttagctttctcgcgatatatcgagctagagttaggtggattttttggtcaggaccagcaattatatgagtggcattcattgcaaaaatatctgaagccatctaaaaagtttataattctagtaaacggaccagtaaagggtacaaaaaggttgcaagattttcgttactgacgtttattcctcgattacgaaactgtacgattttgtgaaattttcctaaattcaaattaaatatataaaatctaaccagttctcacaacggaacccaggatccagttaagttccaggatctgagggaactggctctgtataaatattctagttttctcagggttaatcccagatgcgatggaaagtgcgatggtactccttgtatatttttttaaattgtcgttggattttaggcctaaattggtttatttactattaataaaaacctgatattgcgtgattatctgcgatcataacattcaaatcattatgagttctttggtaattcaagcaaggacttaaacaccctatgtagttaccaatgtgtatttcaccagtaggctatagataatttaataaaagatgaatttttagaaaaaatataggttctgtggtcaaaaataatattagttacgatgtgtatatgtggaaaatacctggattccagaaagtgttacattgttgtgtgtatgtttatgtttgcttggaaaaatagaattattggtggaatttataaatgacacatccccttttaaaggtttgtttggcaaaattaaaccataaataaatggaagtttggagaataatgtaaacaaataaataatttttttaatatgcatatcatatcgaagataaatttctgaaaatctaagaataaatgaaccttaaacttataaattattaaaacaatttagatttgtgtgcaaataaatgataaaatgctataataactaacagaaggtttcaaaaccttcatatgtttgtgatggggaatctacataataaagctattcaaaataaataaaatataacgatgtgtaaccttttttcccaatatatataatttttttcaattatcatcttgtaaatccactgaagatggagagtagaacaattaatattgaatctgtcgattctacaataccactggttttcgtgaatgttaaagaaaatcatgaagtttttgtagtaccttcggattatccatataaacataacaaaatcaactctccagaaaactcctcaacacggaaatcagtccctaacatagaatacaccgttcttccaaaattagtcaagactccaaggagaacattggtggcatatagcccaccaagagacgaacaggcagaaaagccatataaagttccatttgaggaattattcggagatgatgttaggtcatttttggaaaataacaatccggaagccgacacacataacaactactacaatgcccagctaatttccgagaaattcgtcaaggtattttagtaaatgtgataaatacatcattaaataggaaattaagaagaatagaagacattatattttctcaaagcaatggaagaggaacgctttaaacaaatacttaatagaccactttgtagacaactattccaataaattaaagaatataaatcagaatttcgtgtcaaaaattttgaaaaatcaggagtattctgagcttttagacctaaaaacgcctaataaaccaaagaaacataaatcccgaaagtattttatataacataaataaatatttagtgatgaaaatattaaggactggagaagatttaatccttcatatttcaaaccattgaacgatttactcaatgattatcatgattatctatacaaaaaacaggtatttaaagaccaacagacatgtatttcaggaaaaaaatcgtaaaactaagcatatggcttcatcagttcgttaaacaccttgataatgattttaggtttcaagatactttttcgagattctagctgaagctaaggaatgtgagaggaaaatgtatgagtgtgaacttattgcagaggaaaatacctacggtaggcgtgattttatatcagaatttcatcgggagactaacatgctcaagaaacgctggagaaaattatatacagtatcattagcatgtttgagaaggtcaatggatccgaacaaaagagtagtgagaggaatgagcatgacaccaagcagacctaaccctatccatagaactagatcaagtgaaaatgtcagggttcaatcgccctccccagaaaatgaaatggctgaaaataatcaacatttggatatgtacctaaataatcgtaacgaaaatacaacacccatggtccctatgatgcaaggtcaatcccaaaactatgaaaatttaaactataactatacagatgactacaataaccaggattacaactcttctagggaaaccacaatcccatttggagtttcagtgtcaaataattccaacgccaaggaagccagttccacacaaattaatatagaacaactgtcagaggacgaagacagaaatttggattcaaaaacaagtaataaaaaatattattaataatcattctataggatgtaatgcacccaacaccaattcaactaacggtaatcaagtcgaccaatcgactttgacaccctcagtaactttgaactataatcagaatgatacgggggatttgattcaacgagataacgctcctacatctacaccaaggtaaattctttaaaattctgtatgtaaagcatgtttagcaggatacgcgatcctacatcttccgttaactcaatagcatcatataacgagttcgaacataacgagaattactcaaacagagtaccgtctggtggagttaacaaatggatatacagcaagatggaggaaagaggagaaatggaaggataccacttggtcttacatgagctcggaatgttaatgttttcaggtgggacaccagtcttaggctttactagtgtgccccaccaactggaatggctggacgaaactgagtcgaaccgtgtaatagtccctccgagccaggacagtttcagggatggaactctctacacaacatgctgctactctgaaattaagctaatgaaagttcttcaaagctccctgtacatgctaaggacctcaaagaataagaataaggacttcctggcctttgttcttgagcagatccttgaagcaaactctgaactgtttgagctaaagaagaaactagataacggcagatcagcactttacaaaaaacttaagcttcactgggcagaaaggaactctaaatggggaggatttcctcctttgaagaggggataccgtttactaaacatgttaggtaagggaggtttcgctgaggtctgggaggtttttgatcccatcactctcacagtccaagctgctaaattgcacattttatcacatgatatggatgcacatgagaggggaaatgtagtaatgagagttaagaacgagattgatatacacaagaactgcagaacacatccgaacatagttaatatgaaagcttgttttgaaatgggagataacatgctggctactattttagagctgtgtgacggtaagtataaggaatttttattaaatttattcagatggggatcttgatcggtacataaaacttcacggccctgtgcctgagaaacttgcaataacatggacatatcaaatactacagtatgatacaaaaggaaaataattattttagggggttatatttcatgaagacacttcctgaaggacgagttcatcactgtgtaagtttatttatttacaaacaatttcctaggaccttaaacctggaaacatcctgaaccataggggaaacattaagttggctgatttcggactttcaaaggtaagcttgctgaataataaaactttcaggttgtgagaccagatgaaaatgaagtatattggggtggaggagggactatttggtaccagcctcctgaatgcctgttagctaacacaagaccaaatgtgaaagtaccactaacagacaaggttagtgattaatttatcaaaattttgtagattgacatatgggcagttggttgcatcctttatgaaatgttattcaacaggtgcttttattaattaataattgtgtagtcgaccgtttgggaaattctgtaacaaaagctctctatcaggtataaagaataaatattataaaattgtgattaaattaaaatataatttacagaccgattgtacaaggaggcgaaatcaggggttaagttccctcaaacatataaagtgtcggaagattgcaaggttcgttcattcttagtcaatggccttcagaaactcatccaaagcttcctcgcagtagagccaaatgataggccttcaatagaggaggcccttaactgcccaattttctactttgaataatttaaatttcttttaaatatgtgttattcaaaggcttcagatagagaaaccttagggaattgatgtacaggtttaacgatcttgtacctcagcaaacgttcaggagttattttgatttctttcttcttgggtgtaaacttctgtgaagcccgcttcctgaaaaaactcatgttacaggtcttcagattcccccgaagcctcttctccttaaccatcctgttgtgccacttagcgtatctagggtagaatttatagtatttgggaaggggcttgggttgacgagtttctttatatttaaagttgcgatctataacgtcgataaagtcttcagaacttattttgtatcttttctttatggaggattcgtttagagttctaagaaccacgaaccgacaaaataacctgaaagcgtaaccaaatgaacgatccagtgagttacaccaagtctttttatatttgctaacagaattggaatcattaatgtcatcttctaaataagaatcctgttcatcagtagaatcattagaaccactcttctcaacctccttgagatactcagttacaaaggtaatccaggatttatcaaccatttttgaaaggttataaacatctaaatgtgttgatgataaaattaatcatgttagtggacatgaaaatacaatcagaagtccactgactcatcataacaggaatttgataaatttttggaaataacagtctacatacgaataaaatatcaacaaatactattttacaatttaaaacattgtatatttgacaaataaacaaataaaatggaaaattggtagtgcttaggtttggagagataagtggtggacaataatcaaattctaaggtcaaattcatacacattttaaattaaatttcaatgattataaatattataataatttaaattatgcactcaattatatgtttaaatgtgttgatcacagaacacatgtaaaagttaataaaagtaattctttaaacaatggccttcgatgactacagttatttggcctttatagcgattgtactattcgatatagcagctctctcttttacgttttatatatggtccaaatatcggctatttataattactcttgtacataacggcttctctagccggaaaattcgtcttaaaaagaaattaactgataaaaacgagaaattctttgatgaaaagagtctaaatcctgctaaagcaagtagtttgctcttaaaaagaggtattttattaatttgtcacatacacattcagatacttgcctggatcaactaacaaattctaaaacattctcgtctggaaaatttgatgataaacctaaaccttcatcagaatcagtggataatctaatttttgcagttagggtcaccaatgaatctattgggactgatgaaattccaggagctaaaagactggcaaaaggcttgtacaaatataaaactgacaaatcctggtggagttatttgctatatgattgctctaagagaataaacaataatgaagcaaagttatacttaaagtttatgggacagaactgtagactactattgatatgttttttattttcggtttgcataaacattttaattttcatcatcttcttgtttcagaaggaaccttacagatttttaaattatacatttcaggatatgttaaattctagaacaacgacctgggcactgtacatttcaacctgggtctactcatttgtaacatattattttattatgaagtttagagactatttagaggtaaggacatctatagtaaaaatctgtttatagagtaacaaacaattaagcgcaattttgagacctcaactccatactttgatgatatatggattcgagaagacagtaactgaccctgctgttatatataaccacttcgacaactacttccctggtcaagtaatttcagcccatattgtcatgaattatagcagaaggctaatgttagtatattattattataaatatgtttcaggctggaaaacaagttggaaaatgcaaaattacaactggcaggattatatgattctatttcaattactccgggatttgaattgattcaaaaatcctcagaatcaaaacaacatactgtagacgatactctgattaatccagaacctaagtcccgactcacaagattttacagctcaacctcatttcaaagagatttatcgaggtctgatagtttcaaaattaggtcattttcctgccataaccttcactactgccccaagaaggaaaaatcggaacataggagggcagatacctttgataaagatatctatgaccagtacggaaggaggaagagcagatttattaagagaattatgacgattaaaaatcttagaaaagaaatagatgaagtatgtttttttaaaaaaaaatctaataatgaaaatttaggaaaagagaaaggttcaaacgacatcatctagaatctgttttgtatcttttgcagactcaaacctggttatgcacattctgagaggtatatgattattctgaagttattttttagataagaagattctagaatcgatgtttaattggctcatatcaccggcacctcacccaaaggatattatatggctaaacctcagcagatcaagtaacgagattttattgagaggattcttgatcaacttcgtggttatacttttctacgtacttgtgacatactttcttgccaaaatgaacataattaggagatataacggacctaagagtaattttagttttgttgataaaatgtattagataatgaaggagtagcacaactcatcaagtcgtcgttttggcatggtaaatttattacaacctcaacagtatttaggtatcattcagtcaatggtcacgttgtttattaactcagctgttcatccaaatcttatatttttcctcaccaagaatattggtacggcctacacgtttacaattactttagggatatggacccatactcgttttcaaaagtaccttctgttcgaacacataatatacttgttcacaagcaccatctttgtaccactggtcgcctctatgatagcaatttgggtacgtaatcaatgttttatgttatgtttagagagtttttgatgggaacgtagacctcctatcgctggagttggggagaatactgattaatacatcgtggaagtacgtcacgacttacatagtcaatgccagtctgttggttccttgtaaccaattacttcaagtttcgccactggcatgtaagtttaactaaaatttacctttctaatataacttcagtcagatatttcaatcaaacagtatttaacacggatgatggaataccattctttgatttgggatattggtatgcttaccatctatctgttttcacgttggctctttcattcgggtacagtctagagttaatatatcatttaggttatttattccataccttctcccactagctgcactatattttgcagccagattctacgtcgacagacataatatcgcatacaatttgtggcagtttccgtttgacacatcaggaaatatatcgaaaacagcaataaaatcaatgcttctttgtgtttctattatgcagtttatgatgtcaggggttttcactcagagtaaaaagttacctccattcttaaatacaattttgtatatagctcccgttgtaagttttaaatttccttttaaaaaatgattcagaccacttggctactcatgtatggttcatatactgacacagttatacaatctataaactctttttaccagatcaacttgaaacctctgagccaaaagatgatccaaatcattcaagtttgctatatgcatccttgtgacattcgggacttaattgagttcaacgactgtaaaaaataatcttccttattaaaacacatgtattaaattaattataaaaaactgcgtcagccgggagtcgaacccgggtcgcctgcttggaaggcagatatcctaaccgttggactacagacgctcctgtggaatccaaatattaatacttaaatgagttaacaaaaattatattatcctaaaatcaaataaatattttataatgttatttttgatataaaatggaatttgtagttacagtttgcatgggtgagtgtggtaaattttactatattgatttaaaatttacaagagaatattaatattaaatatcctctgttgcgattatttttaaataaccattaaagcagtatctttctgaaaccattgagtctaacattttgggtaggtcctttgtcaaactggacctggcccgtggtgtgtagtcatcggcaacatcagtgtcgaaaggatccgaagaattttgattaatccctaaaatattaataaaaattaagtattattggtgatggattaattttaaaatgtatgaatgcgaatcttcataccttggatgttacctgggtccaaacactgaaacatcagtggattctttatattgaaaacccaggtttgattaaaatagttatattgagccaattggccaaatacatagaactttggtagcaagaatttgctaccgtatagtaccatcgcgaattgctaaataatataaaattaattgggtatttatagaatttaaatttaaaaactataagtaataattaaatttaatgtgtttaccttggaagcttcctttaatattttatctgatgcttcctttctgatgtagaaaccatcaaccatttgatccagagtatccttgagggattctaaaacaattgacctctcaataagggtgttaaatatatttgaatgagttgaatcatccatttatgacaaaatggaagaatttgtcatgtgagatcaaaatgtgtattaaatagggtgggaaccatttattaattatcataaattttttttattaaattatcatttattattctcgatattttctagagggtccaactctttttccagactttctattacttttcttttctctagtattatgttctcatgatcatttctggcgctttgtagccttatttccaccatgctttcatacacttttatttcggaatccgattcttgattcatgctctatttgattatattattaactagttaaacctgtaggatttcgtttgttttttcttcgaattcaatcgatactttctcgaactctctgtttagttctttttcaaatttctcctttagagactaattaatataaattttaggatattttacttttttcttttcactattcctaaaataatttagtttatttcagtttacctctctattttctctgatattttatcagctttttcctttaaggctttcaaatcctaaaaatacatagttaccagtttaatacttggtttaataactctttctcttcagttattctctctaacatcttatttttatcttctaaaatttttttatttgtggttttctcatctatcaaatcctctatcttggccttaattttatctatttcattctgtaacatgttgagtactggggataaaactaccagtaggttgttttcaattatcgatagtttataaaactcagaatcgagccggtgtgactaaaatttacttaatatattacttgtttacctcctcaaccaaaccctcttgcttgtacttatgatcattcaactcttttgataaggacttcaagttacttatcttattatttatttcttcagttttatatacgaaccattcaatctaaagacaatgtgttccggatttaaaaacctttatagataaacccctgttcctttcattgcgcctattgataaacccggagtttacagtaatttcctttataatgtaatttatattatcatttatatttttaatcgcttccatgactgatttctatatattttattagttaataaactcttattacaattttgttcctaatctcctcattgaccatttgtcttttctttacacccagtacgagggagttgattttagactcaattgaagaaatatgactcttaattaaatcacattctatgtttttatctttaatattctcttctaaagagtttaatttgattttgtttagttctataagagaatcgatttcgcacagcctgtatattatacatgatggtacatatatatatatagtgtatagtatatattgtaaaaaatactcattggatatttttgttattgacttttctagctctattatctcagtatccaataatttaatttcctctttcttctgttccagaacctttaaatttgcatccaactcattcattaaattgttaaccagttttttcaatttctctatgtcagagtttttggtatcctgataacatgattcacttaattaaatactattttattgttcaatatattgatttcctcagagtatatcttaaaacattgctcgatttgattctgtttcaaatttttgtggattaaaattcgaacctgtactttctctatatctttcaacattgataagatagttgtgcacctctttcttaatatctgaacaactgttgtgtttgtatgaaagtacaatatcatattcctcaatgtgtagtatacagttgtttataagacaatgtttctcattaatagcttcaacaaagttttttataattatcctttgtttctctaaacgtgattatacaaaatttctactctgtgtttaaccatgttccgctgataaattattcctagtttgtaatttctcttggacttcaagttctgcactttctattactgattctagtctatcattttccctgcatatttctagataaatagttttattcctctgaaaaattaaattcgagttcacaatgctccttctaataactgtttataaaccagtttagttacctcaggtttttaactacaaaattaaagttatcatggtcattccataggtttttgatatcattacattctgttcatctaaattatcagtttgtagaatacctgtaataaacttgtccttgacagccaagagctctgaaaggcacttatcaaaatcatcaattaaagattttagaactttatttttagagtttctggccatatttattactgtttttaaatttgattctcttaaataaataaatttgaggaattttctcttcggttttcctacctatgaagaaaaaataaatacttgaataataacatagtatatgaaattaagtgaatttaatgttatcctaggtgatttctccatagttcaatttcctgctttttaaaataacgtttatcgtcctcgtcaacgatcatgaggttgatgtaatgcttgactgttagcttgttttgtacatttttatatgtcggacacacgtccagcccatctaaatatagccttactgggatacactcccctttaattggtgagccgtccatgatttcaaagtttgttactgtgacggtttcattaacgacaactcggcctaaaaaataatataaacacttattctaacctaaagttatagtttcaaccctctgtatagcgatttccatgaactttacgcttattgaaactagtagaaaataaactttccccagtataacatctctaaggtgatactttgacttgttatattcaaattcaatatggagtgagtcttcaatcccaacctccatcttaattgtgtcattaatttcgggttgtggtcctaagttctgtactgcaaaactagactcctttgttatatttctaaacattattaagaaatctgtgaaattaccctccatatcctctgattattgttatcctaatgaagtagtagagcctgatgttcactccccagtacgtttcattttccaatcctaccagggggaacttccatttatactgcttactctcagtaagtgttcctaaatggaaattttatttattttaaaaatacctggaggctcaatttccttcgacataacaaaaaagtcgtacacacccgctctatcatatagagtatctaataaaaataataaaattttaaattaccgctttggccaattagttctactttgattcctccatgctcaagtcgttttcccggttttatacttatgaatgccgttccacttatatcttctccttcctgaaataatataaaataatcttttaaattactgaaaatattggacatttggtccccttttgaacaggatccacaaatacgaacgatctacttggatccgtatcgatttctatgtctagagtgacggcattcccgaatatcatagacaactaaatacaaataagattatttgaagatgtgtgggcattatatgataaatgacctaactatctttgaaaagttcttaccatctttacacggagctgtgatataaataaatgtttgcgatggctggtctttattccaagactaacaaataattatattaaaatttttccataaaaatcacaaattattatactattctaaaatatttattattaacatcgactcatggcaccatcaggttaagttgtgtaaaaaacatggaatcttgtttaactttcttacaattaatgaaatggaatttataaatttaaattatatttagtatgaataataaatatactgtgatttgaaatatttttaaaatttgatcacaacggcacactaaggcttaggtcaagctttaggactggtgtcgttagatgaatctggtttgcaaatgtggtaactttttctgatttctccgtctcccctgacatatctagagcatatgcaaatgccaatagactcttgtgttctaggtcaaaatctgtatttttccaaattttcatactcgttctgtgtatctggttcccaatctgtactgagttactatattcgccaagccctgtatgaattctgttttgtaacataatgagtttcctgtatgaatactttgaatttagtgttagaacttcttccatcaactcctttagtgattccttacttactatgttatgtgaccttgtgtatacgttaatgtacttgatttctaattgaatatcaattgaagagtaaggatcctgtccaaaatatctctgtactaatttcctcttattcctattccggtaacttactttacaaacattcttatcactcttctttttacttggcctatccaaaacatagtaatccatgtacacatccagaattggcaacaatagtcttgatgtttcaacctctccaatctgagataacacttcaatacacgtaatccagccataaagttcctcttccagaaaatttaaactaaacccacaggaatattgtccttgcatggccctacagtggtgtctgcaactcaggttaaacttcttcaggaaaaacgcttccaagacaagactaataaagggcactgagcataacatatacttcgcctctactgaggctgagaccatcttttttacataatttccaaaccctgacgccaagtttgtttgtaaatccctgtcaacaccataaaatttagaacccttttgaaacttactcaaatacttgtattcccaagggaaataagaattaaatctggtccctagcctagtcatcaattgtagtattgcacttgatacataaatacttccaaagttttgaagtgagttcagcacaaaaattgaattttcgggatcaccaccaacatagtttttaaggtgcccttccaactctcctacagtcttcaattcaagcctaaaaattggctccaaaggtggtggtattgatctaaaggatacagtgttttcaaacgactttatctgtaggtattcttcccaagtttgatcgtccgtgataaagggtgagcaggttctgatccttgtactgttgcaaacaaccattgtcaaaagcgatgccaatgatgagtcatggcaatcaattgaacgttcacaacacttatatgcaaagtggaaatcatttgaacacatgctacactgggccagataataccaagacttataatcggtagggttaagagtaaccgccttaagcaggagttcagtcgccagcttcaatgtagacctgtattcgtctgtctccacaggtttattacatggaaaatcctcttttatatttgagaaaagaaatctttggtttacatcaacactggaactgaactctcgaaacctcttatctattatcgacattgtgttcataaacttggattgtgcctccatcaagtacgagtaccctgtcattaaacataatttgtatgcgtggttcttatgctcctttgaatcaaactgtgagttgtcacaaacaaatttactctccttatcaatattattaaactttctgaaggaatagaaatcattcaaaagctcaacgtatattttattaatcagttggaccttgaacgacttgtcgaaatcacacaaatagttctctcttaggtgcgattctgatcctccgtagttaattttataagtattagactccgataaagtctgaatcatcagggacagtgccatgttaaatctccccttcattaagtggtatattgccagccttgagaccagatggttatagtacctctcgtggaaaacagtcgacagtgacaagaaaatagtgttttcgagggactccttcagtattttaaaggggtactgattcttagtatatgaaaacaacttgagatgaaagttcttatcgatttgcgacataatttgaaagaatcttaaggatagatccaagttcccaacactcttaatgttgatttccattaaccctccaggttcatatatggtttttattctagtcttatttttatagtgtgggaatgaacctgtgcttgtagaataagacgtgtttaaagtgaacaaatgatgcgataacaggtcaattaggtacagtaggtgactgatatgcttaaaggtgtttagtttgttacagaaattacagtccttaaatgatattccaaacgacaggtgaatgcactttgagggagtgccaaagaacatgttattatctgtattctctccaatagtatatgaatgcaaaaacgatgttagatttgagttatatctataaagcgatctcagattagttgtgctgtatctaaagtccgggtctacgtatgacttcccgtatgagaccttgttggagttcagcattgggttcatcatcctgtacctgaatgatggccttgagatattatctcttctttttctggatgtaactttaaacgatatcttggactcgtgcccctggttatttttcatgtaaacttcgcattttggtctggggtcaggcttcataacaaacttcgttaacgtcgtgtaggtcctttttacattaggtatgaagggtatgaaatttctcgacgacaccagctgtgacctgaacttcctcttgatgtgtttctgaaaagagataatcttctttgcatcctttgatgatctttttgggaaaaagggcagtagtgtctgtacaattgctctgttctttgtcttgagtgtatctttatactttaagtactccagtgactgggagtagtgtataagcatgtaaacgtcgtctataaagaatgatattgtcattattagtgacaatacgttgtccgggtatcctctaattatccagctcccttcatctgagtatgtaaaccccaaatgatagtcactgaacgaatattccttcctatcaaagttcttaattctaaatttaggggttttatcatataatgatctcagaaagtctatgtgattgaaaccagtgctctttttctcaaatttggaaatctttactccgttgatgatcaatgagtccattgtattcaggctggacgatcgtgatttgtaccctaataaagacttatcaaactcattaaaattcaaataaaagtttactggatgatcagaacgattggcacttgtgtttggtaatatggcaaaacgttcatacaggatcgggctagagtccagtgagttatgagcgtggaataaaaaattatgctccatatccacctttaggagtggagaaacctcatatattcccaaaattggatttctgaacttgttgatcattgacgacttgactagaaactttggaatgatgaattctggtgatactgcgttaagtttggtttgcgataggtgttggttatagacaagctggaaaattggcggcattaagctgtgattcagcttgagtttaaatattctcggaaatccgcagcaaagttttacggaaagctctcttcttctttgatatctatagtacaagttaattcctacaaatatctgtaagatgtcaaacagaattgcgtataccaacaggaagacgtcgtgatagaaatccctacacaggtgaccaaacatcaccattccctccgcaaaaaaacactgcaaagcgaagtttaatccgaaaacatgagaaattattaagggttttgaaattcttccagacatttctgacaaaaattgttcatcttctaattttttcaaagattggctcggtgtttcagagactagactcaactcaacaacctcatattcatcgtcaaaggtgaattcaggtgaagatccatctttactaacttttactgatatatttctcattggagcctctgaaaagtagaatttaacatttgaaagaatgatttttctcacagaatttggaaacgactcaattttgttcagcgcgttatatatagaatctatacttatatacaatttaaatagtctcgaccatatttccaaatctattctattgctaaaatagttaatcatgtgttcaattattgagtggtcgcttttaaattgcttcttaactgacagataaatccctctcttatcaagttctctgattattttttcataatcgtttccgaactttcccgaaagctcagaatcccatttaaacactgtgttgccgatttctagtctcaaatagtgttgtacaaacccaagttggagtactttttcgaatgctgtttcaaactcgcagagcctaatgcatatatccacaagggatagatacagtatgttataactccgatatcttgtgaccaaaaggtcgagtttgggtataccaagtttatcatagtagttgtgtatgactacattgtttgacaataaaaattttaacaaaatattaggatactggttgttattttccgggatataaatgttcaaagagtatcctaaatttatagaataattaattttcgacaacgaatcaaaattattgattaaaaggttttcggatttgactgagagttgagaaaccgtgatatcttcgaaagaagatatcgagtcagttataaacttctttaaatcctggaggtttgaagttaaatataaattattgtatgtgtcattaaaggagtcaatgaacttatttaatgattcaactgtagatgaagtggatcctaaagaagaaacttgagcaagtgacctagttatggttgccatagcctaaatcagggcttctgctaaaaataaaaaatagaagatactggtgtattttataaatttcaataaaagttgtagaaatggcccagaaaccaggaaaagttgccatcatctcaacatcaatgacagaaggaatgaaaaatcggtaaaacaaaaattaaacctaattgagcagatcttttaaaatttataatttaaaatatgtgtataaattaaaaataaaattagaaaagcataatacgttaaaaattattaaaaaaataatatagtaatagcacatctagaaatgtgtatgttgtgtaaaataatatttagatttattccaaaaaaaagtttttgtattttatattgtttttatctaaatgtgtttttcagtagatagctaaatttaatttactatttttacttttttccactctatgaagaagatcagattttacagtttactctaatcaaacgtttacacatcttgaatgttatctgctgattaagtgtattatattttgttagtttctaattatgagtaaaatatcagaatcgggagttgtaatagatggaattgaggtcaaattcccgttccatccttacaggtgtcagagatcctatatggaaaacgtaataaaaacaataaaagaatctaaaaatgccttactcgagtcaccaacgggtactggtaaaactttatcgctactttgttcaacaatcgcaacgctgttgtggaataaaatggtcaagaaggtcaagaaaacgaaagatgacataataaaaccagatgctacaaaagatgtaaaggtaaaaaaatccgaagatgggacagtgaaatctgaacagttagaaaaggaatcagagaaaaggtgggcagattttagggcagtttcggttttagatcagaggaaaaaggtagaaataaaaccagaaagaatcaagataatgtactcgtcaaggacacattcacaacttaaacaagtaattggtgaagtttggaagagtgattattacgaagaatttaacccgaaaggattgaagggagttctattggcatccagagatctattatgtatcaacccttcgaggggtaagatgacaggagaggttctggcgaacttttgcaaacaggtgatccaagaacgtaagtgtgagtactttaacaccatgagaggagataagaacgcgaagcagtttcagtttgaacgccttatggatatagaggaaatggttcaaactggaaaggatggacacttttgcccatatttttcagtcaaagaaggtcaggaacatgcagaccttgtactacttccatacaattatattctctcaccggacattagagatgctatggatatcgatattaaggattcaatcatcataatagatgaagcacacaatgcggaacaggtggccgaagaaggagcatcctttggaatcaagcaaacggacatcggaaaatttattgaggcgttgagaagatttgcaaccttttatgatgattatttactcagatgcccagataagcttggagaaaatgatatcgattttgtggttttaaataccattggtatgtgccttcaaaataccgacgagttcctaaccaatattatattgttaaactatgataactttgatactaggagggattcaagagatcatataggaatccgctggctaattaaagagctcaacaaggaccacttggtttatacaggtgaggatatccttaagcatatgtacgaaagtatggagtacgataaactaaaaggtctggatattgataatacaataaacaaggtggtgggaatacttacaaagggtacggttgaagataatgaacacgaagaaacatttatgcaacattataacgaaaggatgttgagagaagattgcactttgttaacaatgttgaggaaattcacgagcattcttttatctccagaagtaaacgactacccagagtactacaatgtcataattacaaacgacgaaaagtttgaaagactaaagaacggcaatatcgaagagattagagcattcggatggaacaagaaattcaagagggatgaaactaaatatgaacctacttcatatcgtgaagatattccagaaatcatacccaaggtgtttacattcaagtgtttacagccggtaccaacgtttgtaaggctgaaaaacggtggagttaggtcaataatactcacatctggaactctgggaccattggaagttttggaaaggcatttaggcggaggacatgtcaagttcgacgttaaactccaaaatgagcatgtgattgacccttctagagtgtgggtaggggcaattagtggaaatgctgaggatccaaatatgttatcttcaacatttaacaccagaaataagatgaattacatcactgaactgggaaatgcagttttatcctttgtaaagaatgttccaggaggagtattggtctttttcggctcttacagtgtgatgaactatacagcatcagtgtggaagaagattggcatttatagcaaaatcgaaatgttcaaaaggatttatctggaggcaaggccggttgagaatccggatgataaggatgcgataccagtgacgactatggaaatcttcgaaaaatacaagcagaacatagatcaaggtaatggatcggtgttctttgcaatatgcagaggcaggttagctgaaggaattgactttagtgacgattattgccgtggaatctttgtttgtggaataccatacccgagcagattcgacgataacacagcacttaagatggactaccttgacaaactctcaaataaaacgtacgaaaagtcaaatttggcaaacgagtggtacacaagtcaggcaattagggcaataaaccaggcagttggtaggtccattaggcacgatagggactacggagcaatattgttggcagactacaggttcaaacacattcctgtgaaaccaaacttgagcaaatgggttttaaaccgtctgaagctttacactaggatggatgaatgtattgaaagcctgagttcatttttcgaacagtttgaccagagaccatgtagtcctacccgactcataaagaaggccactcacgagttaacggtgccaataaaaacggattataatacgcaatttaagtcaagggaggcgagtttaaccagtaaaaacaacaatatgcccatgtttaagtcaatggcgaaatatgccaactcaaataacaacttcaaccactctctcctaagttatgccagtaaaccgaagacttctcagcacagtttaccagattttagactaaaagatggacccttttcgtttaaacctccaaataagtcgaatttcggctacagaagtgaaagaccagcgaatcttgaagattcaaacacaccaaggaagttttatgggatataactttctaaaatgctctgatatcattttaaactaataatatagtaagatatatattcactacattagttataatctggagtttgtccacaattattacaatgagggtgcgtgtctaaccgaagagcttttgtatatctaaactgtcatcatcctcctgatctgctccctctaaattattttcgtaaccttcgttgtcccagtcaatgtattcatcgtaattgatgtcatctggtccaggtattacttcagggccattgttttcaaatctcacaactttggatgaacttgatttgtctgtgtcagattctttctctgaatattcttcttcggggctatttagagcctcaaacccttgatatgtttcttcttcgcaaatattttcagcttcaggtaaatttccttcttcattatggtcgctggtaccttcaccaggagacgggtggtcctcgtcagtatcagtattttcatctgaatagtgtcgttcatcatagtcattttcagcttcaattctcccattaagaaggtagtcaccaagtgttactaaattagggttggttgacctgaattctgctagagttaagccgtcatcattggccttccctttagtgtattcatcaattcctttatcttcttgaccacccgttctcacaactgtccatagccaaacggcaagtaatatcaaaagaattaatccaaagaatccagataagaagaatcccacatatattggtagttttatctggtctgacaagaagaagttgtcttcagtgaaaaaggagtcgtcaagttcaggcgttggactagtctggtttgtatgtccatattgaaggaatgtgttcttgtagttgctcatgttatagagtctctctgcatagtacatatcaggatccatctgtaataatgatgactcgggtggaattaaccctttacttgggaacaagctgtttttgacggctttgttcattctcagcttcctcttcctacctaaaccttcttaatataaaataatatcaagttaccttcgttttttacatgttctagcctctgagatgtttgtgtaagtgaatgagcgctagaaggctttggggactcacttcttttcgtgtgttgattgttttctttaacgggtgcactaacacccaaatattttgagtttctgttatgttttttacctagtctaattttaggtttatgctgattaggcgaatccgccttctcgcaatctccgtgatgctgtttaacaggctcatggagactaccacgtgctgaagtctttgctccaaatggctgcatttgaatattctttagttttttaaattttttagataaatttaaattaattaaatattcttggtgtgatttaaatagaaaaattcaatgttgaaccatggaatcgcggtaggtcaccttcttcagaaaacgacctttaaatcctctaattttaaaaaactgccaggaatcctggtttcaaaaaaattattttttgatgtgtaggataaaaatgagttaaaactacaaaataggttggttgttgaaaatctgtaggcttatattttgaccgagcaaccaatcatagcttgaaatcgaatgtgcaaaaaataataagtatttaatgcgattcggcgataaatttttgataaagatagtgtggaagtttctggtaaaattttgagtagtaacaacagtagcatctgaactgctactagaatcatctgtatatgtgcatatctgtgcatgttttaaaatgatttgccatgcttcttaaaatgtactctttagtcattcattttataatgacttgaatcttattttaaggttcatcggcagggcgaaccgggatgtgtgtaattatacattgtctagcaaaatgaagtaatcatttcattaaaaaactaaaatattttaaaattaaaggattcctttaattaatttttaaaaattacatttaattagtgtttatagatttataatatatagaaggcgcagaaattaaaaataattactagacattaaaatgcggactcgtaaatcatctttttgcgatctgcttagagttgtttccgtaacctttctgtttatcgtcaaagccatcactgctacgagacttcaggtactggtcctttggcatagactgcggttgagattgtttgtacagcatgttcatgttcatgttcatgggaggatagtgttggtttgcgggcatgtggtttctccgaggcatgacatggtttggtattacaggtgcgtactggacaccgttgtacaatctcggatgcagctgtggaccgtagtgcaccattccaacaggtagtgatcccatggtgtaaggcgggtaagcgagttgagggcccattgggaatatgacaggtggcatttgtgggtgtgtaataacgtgatgtggtggtctcatttgcatagtttggaggtgaagtgggttaagatcacccaaaatatctctgtaacttacactaccgtttcctgcccatctttcttcatatcctgggtcagtaaacctggagctattagaagctctgaactctcttaaatctagtcttgggaatcgactctaaaatactttattaattagtaaaacataccaattgtttgaatggtctaaactccgttcttctcggcagagtaacctttggagtaacagttggtgtttggaactcatgatcgcgggtctaagaaattattaaatacaaaaacttacagttgctggtttatccgtagtaatcccaggtgtaaagctcgatgcgtttggattaaacttaaatgacttcttctggtggtctgaatccgacttgggtggctttggaggttgatattggccttgttgtttggtatacctcatggaatctgtatccataatagtcctttcttcattcctttgaaaggatggtgacaaatcactcctttctcgggtatccgttctatcatgtctttcaaacctatcacccctctccatcctatctaatttgtctcctctttctggtctttcgaacctctcatatctatcaaaacggtcttgtctatcatacctttcatgcctctctaatctatcagatctgtcgattttttcagccctatcatacttgtctgctctttcaatgggtttatctggtctttcgaacttatccaccctttcaaggctatcaactactctttctggcttttcacttggtagttcgggtttatctagcctctcaggtctatctctttccattttttcagccctttcgacagacttctcagatctttcggccctttctgatctttcttgacgttcagttttgtcaaaactcttattttgtttttcagattctactgaatgcctttgctttctgtctgtaaaggatccaaatgcatcatttctttggtgggcaggctcgatgttaagtgcgttaactccctatacataaaatattaatagaataaaactaacgatttggtgtgaaaagtgcttgtcgtgtttggatcttgatgattgttgcctctccatttctggtttctcagtttctgaaaataataatttaagtttataaaaataccttgagggtggacaacttcagccatcttttcagttggaggctcatgtgataaggttttagaccttgatcttgaggtgtttttatctcttttcctggattccttttgaggctttggagggggtttaacttcgatgttcgcaacatcctcgtcttctaaagttgactcgatctgagcgaaattagtttctgggttattctcaatttcagttgcaatctggtctgccttttccctcacactatccgggatttcgctaaggttaagggatgtggtatacagattctcatcaaaggttgatacaactccatactccttgttgttagtcctatgaattattacatatatatgtaattcatactcaaattggtcccactcttcagattgtgttttttcgagttcaacaagttgagattcgttgacggctaaaagaatttatatttttaataaaaatacattctgttgatctccactccgtcaataccgagttaactttaatgggtttggtggaagatatttctgaatcagtcttaaactttccataagatggctttcttgaggaattgggtctgtgttccctttgcttgaacaaatttctgctaatttggcgggaggtgaaaaaatggtactcatttccatagactatggttggcttagtgcgtagattttcatcctcctaaaatttgtatattaaaatttttacacttactgaggcagggtttgggtttaatgcaatgtcaactgctctgttcgtgcccctacttcctgggtcgaacgagttaaatgttccctttatttctgacccattttcaaggttaacaacgacttccttgtcctgaatgaaatttatgtttatatggatgaaaacgaacgatcaagcaggacatgatgtaggcccatctctcctcgttgagtttataaagaaatattgcttttttgtcatgcttatatgaattagaattccctgatgaaacgactgtattcatggtgttgtacatttaagagtaatacaaattaatattattcataatgtctcccaactggataggtagatcggaaaaaatatataattgggttattggtgagtccaaaaaattaatatatattacggaagtgacaaaacagcaaaaataggtaaaactaaggtcaaatcatgagaatgattcatgggtggggtatgagtataactaataggtaaagatctgagccatattgttcaaatttcaccatcttaggcacttttagtgtatcctttgttatttgtatttattttatgtattttttagcccatttcgtcattattatctctaacaaaaattcgatgtgtttttgctaattttttgcgttattttaagtttaatctaaattctgcctcaaagaaacacttttaaattggaataatacattttaactgtatcttttacataaatgtgtgtttttttcagtggaatcacacttttcaacgcctagtaatcttaattccagttggttgttttatgattccataaatttataatacttacaccttatttataattattatttaacacataaaacttaaactataatatgtaataggtatgatttaaatgatttaattactctgtttgaaaatgattcctaatgaaatttaccgctttccttgcggatgtttcaaacatctatcgcatcgcattcgccatttctctatcatggagtactatagatcggtacactatgcatttgtttgttcatttaataataggtccgtccagtccctcctcccgtggaaaccagtctaacactgccctgtgtgaaaaaggaactagatactccaataagtttgtttgatttcatgacttgattaatcagatgataaacttgtaaggtcaacaagaccttacgttggtcctcagatatccactaggcaaccggtccctcttgaagtaccttcatccatttaacattgaattaggctagtacagtatcttggatgtctccaactcagcctaaagatcctagatttctaaaagttgctcttcttggccttccaaactcaggttttacctgcattgataaaatgatctaggaaaaagttcattcctaaactctattttaaattcgacaatttcagctgtatcgcccaaagtaaacaccaccaggttccaaacctaatgaatattataacttagggaggatattaagggcatcttgactatagataactgccaaattgtcctaattgactcaccaggtaccttttaatacaattttttaattttaattacataactcgatttaacatttacatatgtgtatatagggattatcgcatctcataaaaggaggaagttttgtaaggacttggtcaggactgcttggaaaggctttgtattttcataaattttcacaaaattcacttttatttaggatgaagctgacctttgtttgtttctggtggacgctgttaaacgtcctaagagtgatttgtacaatattctgagggttctttctggcaagaatcctttagaagaacgtaattttaatccttttacattaatgattagatgttgaaaagtatcaaacctcctcaagtcctgattcatatgaaacttcactcgatgacccttttccagacgattttgaagacagtatagattccgaagaggatgatgagcctgaggatagaaatggtaaaagagaagtcccaatagccctggtcttaaacaaggtattccaactgtataaccatatttcacatacttctcttagatagaccttgtttcccataaaaagtgggtcaaatctcgagttaaggagctgaagtatgtttctaaattttaccaataattagggtccacgggaacttttgtgatgttttttacaccagcgccaaatactccatgggattcacgccactaatcaatttccttaaactatcttccaagccaggaccctgggtttatccttcagatatggtatttggtattttttaatgtagaaataggtaacaactatgagcaaggtcaaggtggttgaacagctcgtcaggtttgtaatttaattattcattgaaattagaacttacatcttctgttggttcaacaaggacgttccttacaaaattgatcaaagtataataggctggacttacgctgagaacggtactctgaacatagaaatggtttggttatccttcatcatttgttctaggaactctatgttaagagtgtaaaggttgccaagatgatttgtggaattaaggggaggattttaaagcaactacagaagaacgttgcatacaagctcagcaagatgtggaatgaggtggtattcctcttcatacacgttaaactgagatgatttcttttaaaagcaagaattaatttttaaattgcactttacattaataggtgtattgaaagtactacctattattcaaaacattactactatatgcgatgtgtgattgttgtatattttacactttctatatcacaacaggattactattacctcttggtgttaaagttgaactcaggccttgaattaatttaaaatagtattgaactaaccagacaaacaaggcgtgtttgagctcatctttaggcagcttattaacaaacgattcctagaagtattagttaataaaagtacataaacataccatcatgattgtataaaaggacaacttttcaacattttcagagtcccacatggttcgatcattgttgtaaaagtacctaatttcagtaataaactgattaacctacagtgtcataaccttcttgaggatagtgtggtcgttcttctcgaaatataaatcaaacgattcatctattgctaggcagaaacccagagttttaccttgcatatcctccaggtatcgctcaaaattgtgttccggggtctaaatattggatttaaaacagtttatttagagtattgaagggtaaaagcactgacctcaatgtcgaccaatatatccctaaatctgacatataaatattcccagatcagaagttttctggaatccagacgctaatggttacagcgtgtaaaaattaataatttacctgtttgtggaatcctcggtgtatgaaccacacgtggaggattgtgaacatgatcctgatagttaggttatcaaaattcagtccgaaatctatttaaattggataattatggtaaattatatttacgttcgtaatattctggagattccgatcttgtgtagacaatgaccatgaaagggtgaattttcctcattggatccctgaacgccgccctaaacttccactaaggatcaattttggcgtaccttattttataaaataaagtattaaagttatctggcttcggaatcaggaattgcgatactttttcaagatcaaacgagacgggatgagcggctgtgaactcgacaggcacaactttgccaaagtgcgataggaatctggcatttcttaaatttctaagtgaactggcgataaaacgtggtcgtaaaatataatacataatgaatataaattgtggaaaaatatttatgtggatatgagttgaatttaaatggattaggccaagttacatctggcagagtgtggtgatcattgcgcgctgttcttggacctggagggcgcttggtagaaccctgttttgaatacaaagctgaaagaggtgaagatacttctcaatctcctcagattggctggctgtgattatcatctgaaggtgatcggagatcttgttgtagcagtgaatgtataactctcctggcatgtgattattctcaaggatagttggaagacagttgttgcagaggtcagatagaatgtagttaagggcaaccttcgacacgttcaggcggttgaagtccttgctcttcttgttcatgtcttctgagttgtagtagtcagaatgtttctccactgaatcgtaggaacgcgactttccttccttcgagtatgagggtctgtcatagctctttccttggagactctttccggctgtctttctgcagtcaattgcaagaagtctcgcctcctcaaatccgaaccttcctactgaaaaatatctgtccattctctttcggttctggtaccacgttgctacccagtattggtggtttgcgtcgtatctgacgcccatcacctttggcagcaacttcgctctcctgaccagttcgttggcttcatctttgttcttcctacctttggaaagcattcttctcggaggttctggcatcacgtttgtttcaagaggcatttgcatcgagtgagagggaaggacgtcttgttgactgacatcaagcattttctgatggagaagctcgtgggtatctgggacgtagccgcctaccatgctggcagacatatcaaagggttgcacataacccaatccatcttgcgagtgaagagccataagatgatggtcgtggtgatcgtgtggtatgtctccgttctgcctcaggccctcatctgacattgagatgtatccagatgactgccatgaggtctgctcagtcagaccagcttgggaagtggtatctcctgtgaatgtggtttcatcgtataatgcgtttgggttatcagaaaattggttcaccataccatcggattggtcaatgcgatttgaaacctcagcgttagatccaaattctggaatcggttgttgctttagggtagtgtattcgtattctcctgccgcttctgccatggaattcatcataactctctttgatttatctctacttgaataacgggttcctgagtgccctatttcactcatttcaatttttagatttagttaaaatatttcaaaattttctaaattgcataaccaatgccaaataaatgacaactgtacaagatccaaatgtgaaatctcaatgacataagaattttacccaaacgaagtctaaggcccttcagataaatgctggatctttatcaaaaaggctcgaataaaaactgaaaatcaaaattataacaattcacaagcatcaatacacttgtgtattaatttatatagagattgcagctttaagaggagggtattaaaaagatattaaaaaagattctacagttgtgaaagtccggaatataatttcataatgtttctaattaaacatcccagaaattatattcaaaatttgtgggaaataaaatcaaaattaaataaagttagatcaagatggagaacaaagaaaatgtcctatttagatagacagattatagtcaagtgagacttaaagggtataagccaaggatgcgtttgatgctaataaatctgaggttcgcggtaaaattaaaactttaataacacgaactaacgatgcattaatatctaaagtaaatgtcgaccccacaggattctcacccccacatagattagggaaatttgacctgtgttacgctgcgaaatcctaaccgaattctcccttattctcttcagaaataaatacctatagatccttcctgaattaataataagctatccgatgtgttcacggtcctcgccgttccagtacatctacaaaccgccaattttgcaacgttaaatattaattactagatcaacctttttttgtcctatttctacatcctatgcttttgtattaattttagtatggattttattgcactaacattttcaaatttatgcaataaatgtcggactcatgcatttctaattatatagctagatacttgacacatttcctattatttatgtttaaatcataagaaatttaagataattcggaaaatgtgttcatctaaccactttgcgacctttacgattaattaggtgttggaatccccgttctgtaaaatgactggaagtcccattgattttattacggaatttacagttgcataatcattttccattgctttaattattttgtcccttattgggtcatttttgtggagaaaatgcgataccagactcgtggagagtatgcctcttgatctatcctcaagtatatctactattttaggccctagtagtcctttcatcgagtccattatacagttcactactccagttgaatcaagcctcctgaaatctatatctgagaaccatttgtgggatagtgccacttgtgctgaaatcctcttgtgtgggttatactcgagcatactcaagagcaaatcaagccctgtgtcatccattctccccttcaatgccactcttaggttctcctttttactggaaatcttgaattggtacagacttccgttgaatggatagtgttcagacctaatgttatattagatgaggatacttaattgaacgtacagtgagcagttcttccattctgcctccgttggtctgccaaggattgttacgattctggataatacttggaaatccgagttaccatgaaacagtggtcttcctgtaatcatttccgcaattatacaggccgcactccacatgtcaacattgatcccgtagttgtgtgactaaatttttatgaatgtttgtacttacaaatgtagtctttaagttatttggatccgatgttagtatagaaattgatcccaaaataacttcaattggtctgtaaaacattgtgcaggcagtcggtgttattgtcccgtgtaacgacctaaactcccttccaagtccccaatctccgatctttagtactggaaaaggtccatctctatccagcataatgttatttggcttcaaatcccggtgttcaatctaaatatttcataaaaattctacaaaccttcaagttatgtaagtatgctaatccgttaaggagctggaatgataaccacttaacttctgggatagagaagccttcagatgactttgtaaattttctaaatattcctctacccaaatctcctcctaaggaattaaaatattctgaatgtgtatcacacctctacagaactcataaagtcccaaaacatatatctgggtgtttttaaacgggtagaacgcaaactctttaggcgatatcctggagtcacttttaattaaatcacttatttgactattcaatttattagttattccctcgtgttcacctaattttagtatataagttatccatttattatacttaccgacgaaaatatccaccaattttactatgtttgggtgcccggaaacactctaaaaaatatgaaccatatttttcatactttcattatactaagttctctaattgttcctgaggtgaatccttcgtccagaagttgaatgctatcgtctttgaagtattttattgcatagtcagcagttggtgtgtcatgtttggtttcaagtggctctaccgttcgcgctgtattgtaggggttatccaaggacgcatcagggtcagggttactgtttattgtcactgtttcgatatgcctcaagttcattaaagaattttgcggatgtgtatctttgtcattaaataagctttctcttggtgactttatattttcgataaaagtcatccttttagtggtggaatccccgtcatcagagagaatatagcctctaaaaacgtctccgtatgcaccgcagcctagtttttctcctattctgacagtttgttttattttgggaaatgacactgtttcaccggacaaatcacatttaaaatctgagtaccggcagttgttgcctttcgccattgtctctaccctaattataatacattttgtgattagttaattaaatcatcgactgattcgatgattaaataaaataaaactttatgccttcatttagtgtgtaggtattcattccccatgaatatgtaggattcttagacttttagtctacttgagtcagtattacacaacaaaataacatcagtgttatgattcactaattgatcaaaattcacatttttaaatctaacactctaatagcactatcagacttcctaatctatcctaatattcaacttattttattgaatttattaaccttattttcagtattccaacattcattattaatattggaacacaaaattgccagaagtttgtcaatgttaagttgtttggcaaagttttctatacacatatatgtacatacgatcagatttatattccttatttgtgggttaaatttattacaaaaacattatttcgtggcattggtgtggagcatatctggaattcctatattttgttaaatatttaagttaatataaggtacctttacttattttatagttgtgagagcaagaggggcaaactagcctgccttctagaacatgaaactaaagaaattattagaactaatagattttaatagttacattgaaaatagcgtggtgtacggcgtttatgaaattttcgttttccaaatcttcatttacaaagtttactggaaggtcgattccaagctaagtaatatttagtataatgatggactattaagtttaccgatttagcggtctcatataatgctttgtaatccatccttgataacatcttctttataaattccgggttcacaggttgcgcctcaactttataggaatccggctcctcatttagctcaattttaagaggataccctttagtgcaattactcttgttgctattaaaattagtattgaatttaagggtaatgaatatagagttaggggacttaccacatcaacatattatgagtgagtaatctcattgtaatatttaaataaactacttttctagtataaatgttatttttaaaaaatgtttaattattgaaaataagcgaattaaaacaaaattaaaattaatatttttttgagtgaaatcgtgaggatagtgaggacttgtaggaactgggccttttgccataatcctaaaaatgtgtggattattatacttattacctttccaactgctagagccttttcacgttcccttctcttaaattccctgatgagatcctctttcttggactttgaatcgtgagtatcatccctggggtgtgattcccgtgaagagcttctttctctgcgtctcctccttcgatatgaacttgaagaacttctagaacgagttctagttctagacctggatcttgatctatccttttttctcgacgatttgtgtttatctttcctatcgtagtccttcccttttaaaacaacataaccaatatcaacagtttcatcgtttccatcctcaaggtggactgtaactaatggataaccttgtcttccttccttcactgacaggatttctccatccagccagtcacccctaaaatatttgaacacagttggtccacttactttgaacacactgatacttgtgctccctcgacaaagtcgtctacaaaatctaagttcttaactcttcgattccggtgctgtgacatttctaaaaggtgtgctccaaataaattttttactcttactggtagtcttggcaaaactaagaaacaataaaggttgaagtaaatattaataaataacacctgtgtaaactaaaatatttggttacttgtgtgataatacttatcctccatgagaagagattccacgtattctcccatggttatctttctggtcccatcagctgatactgtaaataattcatcatctaaaaaatagggctcaaaccaattccaaagctaaaacaaattttttagaatgtaaaataccttgtccggaggtagaacgtatctcaggtatagaaatccgcaacagcgggcatacggagacttgacattttccagaagaaaattcatctgaacactttgaataaatctataaattacctgtttttctgtcaatttcagcaccaggaatctgtacaaacaacagaatattgttgaaggcgcccttgttgcggttgaacaataaggttcagagtgcgttgcaaactgaaccagctcatcgaagacttggtaaaaattcttcacggacctataattttcattaatttctataaacttacagtgatttgtagtactctgaagataatatattacttctcaacaagtcattcatgttatatgtaacggaattggtcctataaaattataattatatgaagctaacattgggatctggttcgctttatcctcctttgagcttgacgatttcttttgggcgatcttacttatttcgtgtactgatgacttaaatttcctgcaaaacttgcagtttagctcgggttttgctgcattttaatgagataacctaaaacttactatgtaaatggcacctttggacactttcaaggctgttttgcaacatttgttcttgttgatatttgtacattaattctaaaaaaaatattagggctcgatttaaattttaaagtacctggagtcacataatattgataattgtagtaaggaggatagttatactgaggaatcatcccaggttgagctgggtatagaggaacaggattcattagagggttaataggggcaggttgcatattataatttactccagggtcaggttgatcggaaggttgacctggttgagggggaacacctaaatcactcattccaatatatatatttgacaaatatgtccaagataaacaatggaatttataaaaactataatttaataaaataattttaataaaataatcatgatttaacaataaatgaattgtttgtggaagttaaagggctgaaaatgttaggtttatgttaggcccaattgacgaggaaaattatagtatacaatcgttataatgaggaacaaaacttctaaataaattttataattataacatattgctctttttaccatatttagactaaactctcttgtgtacttaggaaaatatcgtaatctcgttagtacttttagtattttgggtaaatgattcatttaatttacacaaaaatttataaaacctttgcattatatcggatttttaatgttttactaaattaatccaaaatttaaactttgtgtatgtaaaatatttcattgatgactccccaatgagtcatcaattaaacagtaaaagcttgatataaatttatatgtattatgggtgattcggtgcgtataaccataactggagatgaggggattgatccattcgccgctgagagaaatctagaaaatctagattttgaggctcaaaggcagttgatagtcaatcttattacttccatgactgaaaatgtcaaggagagagataaaattaagcgagacaaaacaagttagtttcattaattcataacgatttttaggccatcctctttctcacattaaactttctactaaactcgagtctcaagttctagcagcctacaactatttggacgtcctaaaaaacatatatagtaaactagtgagcaacaaaaagaagcgtggcaaatatactgaacatgaacttaattccttcggtgaaactataaagaacttggacgaaaatctcctgaacctagaaaacatgatcagatacagggccagcgccatgaccaggaagacgaggatggatcttaacataaactctgtccccttcgataaatgtaagcgtttaactttataattatttttagctgctcttacaactgaggagcaaaactatgtgacagagtctataaggcgttggaacgagcgggatgagggtttcgataaacagctccaggaaattggagaggcagttgacagaataggtatgtgtaagttaattaaccaaaatcttaggcgaagtcgccattcatatcggggcccgtgcccaggatcaggccaaagctgccatggaagcagtcggggatgttgaaaacaccacgaaaggtgtctctgaagttacaagtaagatcaaaaggttactcaagaggcagcggatggtcgaatgctattgccggttcgttcttgttttaatcgttctgatactatctggcgttgtaatatacctagtcatgaaaaggctaaaacataaataatttaataaaattcaagatgcttgtttcttttttactcgatattgtccaataactactgcatgatctctatggtagggttctagagtcaattgctctcttggtttgcagttttccttacgtagtttatcaacctcagctatacaaatatgtttatgtatgaatcgaacctgcgaaaacagcctcgggacttgcggtggagtcaacgcagtttgctttgatggcaataatgtaccatcctgctggctttaaaaagtgatctgcgttcatagcaacgattcttgcctgatccggctgtgcaacatcagcgaatattatgtccaccattccaaccaacatcctatacttctgtggttgccttgcatcttcaactattggtacaatgttaggtctccttttagcctaaagcttttatttctttatttacataccatgttagtcaaatccctagcagatctgtgtgaaaactcaactgcgtaaactagtccagtgggaccaaccatgtcagaaacatgtgaaactgttgttccgtttgcagctcctaaataatttttaaaaagtaaaaaaataccgagatatagaactttggagccgattcctattggcatgttggcgactccaccaatgattgtggctcccagctttgaacggaaaggattccacattctatattcgatcttttctccatcttcgttctaaaatatatttaatttttgattataactcacagtcacttcaattctcttctctccgtaaatggattctccgacaaccatattcctggtaaccagggcatcagatttccccttagctatataaactccggggaagcggtgaggaacaacaacgactttgtttgatccagaggaaccatgctgtttcttctgaggtttaccctgggcatgacggcctcccttaaatttgttccctgttaattaaatttaatttaaataatatcgtgagtttgcgtacctgatccctgcttgttattcttaaagttccctcctttgaaagatttcttgcctgtaaaacagttaaagagcatgaatttagtaaaataataatttataacaaacctagcattataatttacaatattttattttaaaagaaaattttataaaatatatgataaaataaagggtaaaataacatgaacgttatagtgcgataagattctactggccattcggtattaaaattcaaaaaacacaattattcatttcttttcctcactttaattattttaaaactttttaaatattggccacttgattgcgataaaattccattagattcgttagagtcgaatgtatctctcttcccatcaacttctatctccacctcacctccatcgttatcctagataatatttaataatagatacctatcttacaagatttccagagtgaattgcagcttgacataatgaagaagttggactgtaaacctctaaattttaattttgtatactcaaagtcacaaaccagttccaaaaacgttataaggtttagcatctttgcatcctggaggacagtctaatagtactctagtcccaatgtgcatttttagaacaaatacagccgtatctaagtcatttaatatgaatgtgtgtttaaattaccttgacaagaaaggtgtataagtttaggcgccctgtgaagtgaaaatgacctcataaatggaacatttgatttctgacttgtaattcctaaatattaatccttagttagttatataacagtaccgaaatgcccatggcagttgccgtattcacttaatccatttagaacagttagtatggcctctccaccatctttgggtattacacctgaatgtaacgcagccttgcaaattgaggagtcggaagtataaactttagtaccctttagagttaaatccgggtcaatgcatgatttggtgcatgaaataaggaaacttttaccgttaggaccattgaaattttcagactctattgtatcagaacaacccaacttgattgcaggattagtggcgtttgaatgaacgtcgtattttccagagaactttttcatacatttactcaaacatacattcccttcagttgtaagtctcaccttagtcaggtgtgatgttaagttttcgctgttttggctacttgcaaactgttgtcgtatctgttcaggagacattacataatcataggcttgaaaggccaatatgtgacctttgaaatagtcagaatcagtatccgccatcttgcctaatatcaaatctccctaaaactttattttttttcttttgttacctggaagttaagatcaagactcgtaagctgatttgtcactggaacaccgtcaacgaaaacagaaatgtccttagttaacacatagtacaatattgatatatgtgctctctctatgtatggattgggtttaagtaaacttacttcccatagttggaaaataagaagttttaacgagttccggtttgcaattctcctgtaaaacaagttcaccgaagttatcaatagaacacaaaagtcctccgcaactttgaaatgaaaatatagtagaccaatttccaactccgcctaaattatgttaaggtttatattgaacctgtgggaacaatgtcaaatataaatgttgcatctctaaatgtctttatcagctttgaaccaggtaaatccttggtattaatgtaatcagcgtgattcccattaaatcctaataatcttatgttttgcgcttaatacctttccagctgggatcaggtgaccagaaaaacttgtaaggcgccataacatatgaaggagtcatgggtttctcctctaaattccataaaatgtttaagaactcaccgttagttttggaggtttccaacacttccttctcaacctttgacattacatattttgttggtctcgacaccataactaagtggtttgttcattaataaacttacaggctttctctctagaatcgtcaccggaccttgataagcttagactttcaacaccattcattgatgttccataaaagtgttcttgagggtaagcgattatcacaactatttcacctccgctgttgtcaagaactccggaatgtattgccgccttgcaaatctaatggtattataataaatgtatatcactcactgatgaatctctagtgtacacatatgttcccttaattgatgcaggctcatccctaaaattagctgatatagaaaagaagtttggagtatcttacatgcatcccattgggcatgaagcgactttaaatgagccaaattcaccctggaactcagaatgcgacgtgagagtgtcataacaggatagatttataactttcgataacttttttaatggaggtacaaacggctcaacttttttcaggttcctaaactcactagggtccccgtttccaatacatgatacgataacgtcttggtcatgagtgcagtaaatatcatctccagattcatgctcacaatccgtaagtttagattctccgcctataaagaggtaatctgttaaaatacttaccattgcacttaaaattgtttgccgctatctttgtgtgcacttgagcacaaagattcaagccattgaaatttgagcactccttatcagaaactccaccgttctaaaaaatatatctggcccattactcactcgcaatccagaataacccatctcagtgcatgcgattttttctgcttctttggtccagtattcattgcagactgttccgaaacctaagtttggtgttaaatttacttaatttaccattattgtatatttcaagtcggccggttcctgttgaggaagtggctcctgttgaatccactatcctaagggttccatattcgagactagtagttggagagaagtttgagcacttcaccacaacatcctctttgtgatttttacagtcgattgtaggttcttctagtgtacagttgttaatatcagtttcatctcctttacactaaacaatttgataaccataataagctaacctttagaccagaacaagaaacgttatatcccggaggtgcacagaaattctggttattgacgttggtgcagttttcttcaatgtttattccatatttaaaccctgtcataaagttaaattaaatatttctaacccagactgttacacacaaatgttgcagattggttgttaaatatagaatgttttcctcttttgctacaattcaattatataaatgtaaaaaataccaaacagtcccccatttgccgttcctaaatagctctagtctcccaaaggatgtgagttttccaaatcctgtattattaaattgcaaaagtcagcttaccgtcaactagtctgacattcttatctatgtcatcgatactctctacaaaatcgatataatttaagaattaccatctaaaaacatgaagaaactaaagttgtttttgtctgctggtggttcataatcctcagattttaagcctgataaattgttttaaacttatatattaccattatatccagtgccaccgaagtattttgccattgattgaactattgagataacaacctgccctcctatgtccaaatgttatatgttcaagttatacctgatggacttgtggctccgtcgtaaatagcagctccgcagatggaagtagatgacgggtggagtgaagaaccctcaattgacattaaaggatcattattacaattcattggacatcgtacagtaatattaaatggctttacaaatgttctacaaaataatatactgatgttcaaggaacccggagtatatatcaacagctctggtgttgcacattacgtctagtggtgaggtttcatttaaatttgttacactagttagagattcagttgagatttcaacagatgattcaaatgggtaccctacccacctcttcactgggaatgagttaactacttcattagatgcgattcggatgctatcgcagtaccacgggtcgtttactgcgtcatttgaaattattaggccatttatatccccaacatctgcccctttaacttgaaacgtttggtaagatgcgggataaaatgcgttagaaagagttttttcattggtcttcccagaggaaccaagcaatgctagagatattgttccattggagccagcatccttttgccctccagtctgaacactcacagtataagtcttgtttcctgagaggagatatgttgtaacgtgttcgtctttgtttctagacttagaggggatacagtcaaaagtccaaaatcttgatcccttataaactactatcttctcacatgaccaatttgtatcacttaattttaattctagtgacctagggtcacctacgtctagtctatcaactaactgcctaaatccatgttagatattaaataataccttcttattgttccatctttagttgctaaagttataggatttgtgtgtttgccctctcctattattttaaaagttatgtcctccctaaaatatatctatttacagacaaacttactccagatagaaattgtccaggggctgtgcatacacatcaatgaaatacgttgaatatgagtcgccagctgaaaatgtgtaagtgaaataacaaaatataattattcattacaataacatgggctttattctgtacctggtatacactgttcatatcgtggttcagaatcagttgaagctactttacaccattcctcagagcaagaaattttagaagaaaatatcgagaataatagtgaaattatagataataatttacatgcccttacaaagtgaacatgaacttgaaaattcataattgaaggggataaataatgttaattcattttaaatttatattttacatattataaaatgatttttacagaaatacgaaaaggatgtgtaaagaatccgcacacacgacatcaaaacaaatgcttacaatacacttaatctatttaacgacaaattgaaaaatcataacacaaataaaaatatataaaatttttgagagtatttaatttttattggtttttatctgttggtgtgtacgattaaacttgggccgaaacagtttgcttggatcgataggatcatactctgaagtaaaagaattggttaaaatagaagtttgttgtatttacctgcatatagttgtccacaagctgcgtctatattccttccgaagtaattcctaaataaaagtcatgaatccttttaattacctatatgaggaagatattccattcttcttcaaatatttctgaaacaattcattgtatatgtgtcaaatatacctcgaattttaatgactggtcatgttcagcggactcatacttgtcgattgacttgactaaagacaggaatgtagcaaggtgtaactaatattagaatgggtatcataccaatgttgtatgggataaggtttacatgataaagatattgtacttctttgggtcttccctttataatatttaccaactcttcaacgtgttctttggtgtcatttttatctacacaattttattacttatgaatcctaacctttaattaatacgtatgaaatccatattctcctcccagtttgactaattctttcatccattagtggataagcttcttgaaatggatatattaaatttacaggaacctataaaatttatgtgaataaatgtgtaccatttcatttctctcttcagtgaaaggtgagtgcaaagaataagctaaattaacctaagaattaaaatttgtttttaatttaaagtttacatatggaaattccttgtttagttttttaattcctggtaatatccctactgttgatacatttattcttcttggcgataagccaaaatatcttttatcagttaaaacactgattgctctaaaaacattcgggtttgaaagaggttctcccatccctaaaaacaaattctactaatatcaaacttacccatgaatgatatgctatctattttatgtccaagttgttgaaagtataaaacttgatcagttatctcatccattgttaggttccttttaagacctattttaccagttgcacagaaagaacatgcaaagctgcatccaacctagtatttaatgacagaaatgttaaaataaactagtacttgagatgatatgcatagcgatttgtgtgtattgaaatgtaataaaacagcttctatcctacttccatcctgattctgaaacaaaacctttttggctctatcacaactagattcagatactggagtaagggataaaagtgatccgttgaaattgtcatgtaatccatcccttaagatcttaggcaaatggtacatagataaaaagtttgatgttttattgcgataaatggaattgaaaatctgagaaagtctgtattttggaacggaattatcctttaaatattttacgatggtattaaaccttatggatttatccatttgcaaataactgatccttccatagtccaaattgagaatatgtcaataaaatttaactaactattaatgtgtggacagtataataatataaagtaaaataaaatgttataattaaatatatatataatgaaattttgtgaagctcaacttctgagaatatacatgttaatgacaacacatttgtgaaatgactctttaacactattcataatattatataaatattgaaggaaagaaaaactttaaaatttatggaaaataatggaataactacagacatgtattagattgaaataagtggtggcataaaaatattattggaagttaaattcaatctttttaacagataaaataaattatcgaatacattaaagttgataaatgataacagtgaatctatgtgtgacctgtatgattattgtgcattattagtgatcaatggcactattagaaattctattaaactagtgatttctacgaacaagttggaatttggttaatctcgaatatatcatgtttataatatattgtatttactaggttactttatgaatttttgtgttttggtgagtctcgatttatttagtgtgtaggtttaatacataatttctccttgtattttatattatttacgcaattatttaaaattaactttatttttataatttttaaattaacaacttgtcttctgtgtacaattagctattagttttggtaaaatgttctttttacctttaaattaatatttatcaattttaatcacgctaatataaacgcatttaggatttaaacaaaggttaaagttagtttatttgagagaatgtggctttctactagaaaggatcatttggacgatggagctccaccgaatagagctccatgcgtctcttttggaggattctttaacagctctttgaggatgggatttggactacaattccttgctcttctatctctaaattttgtatattatagttttaatggtaaaggagtgtttagctatgatttaagcggtttgcctgaggaaactaggctcgaccctagtttcaggttctatacgactacagcatcgatggtttatatgcttggctcattgagtcttgtttgttttcaggttcttctagctgatgatacatggtaatttttcaactattaaatgatgttttagttgggctagaggatatcgctctggttctaagatactccgcttagctacatttttggatacagtcagctcaacactccaatttattttctacttgtatgtttccaagttttacagtaagagatggtacgctcacctcaacgaaggtggaagtgaacttgttttcatggtctttaccaggaacattcacgcttgcgcctgtcttttgtacggggttgcatgttatctattggaagtgtaccatgatgaaggagctggagatttacacgcatatctaaatggagttttatttgtagcaactggagttatgggtttgtttaaacatagttttaacatttttttagaatttgcagtcttactattcaatgttaatggagcctacacgccattacttttattatctcttgctgcagctactctttgggcattttactttgaaccggaggtgacttttgtttcaccaaccctcgaagaaactgaactaaccaacgacgttgaacaacaggtcgagaagttcacgagactcacacctaccagccaaattccttactattaaaataacgattttttaaaataagcatgaaatcaaatagtagtttagtgtacttgttattttatctatattaaaaaataacttaagaattctttggagacggtaagggtgatgaagaattagctgaatttgaaggcgcttttccagattccaaattatccaactcagtcatgataacctgggcttctccgtcatgttcctcataaacgtaaattaccacttttgacccttgtattgccatcaacatgaatgttggaattgactttggctgccatggctggtaacatcctgttgctgagcctggatttacaaatattttcccaccatgttttgaaatatcactcacgtgagagtgcccatataccaatatatctacattcatgtccacagccaccttcagaagtagatctttgttattccatgtgggtatttggtacccgtttatgactccaattttcaagtctcctaggtatatttattaaattgttttctagaatcacttaccgacgttaatagtgagggtttctgggtgattaaaatcgtcatcgtagtctccctgtactatgtgtagtgatggagaaatatcgtttagaacctccagcatttcatttgagcctacgttgcctgtacatataactcttttaattttatcagttttaagaaggcgcttgaaacagggcggcaagaatagtgatctttgagggacgtgaagatctcccagaaccatgagcagttctccaagatcatgctcatcgtttcccattattagttctttattttaaattaatgaaatttgcattgtacataataccaatggataaaagtgtatgaattctgcgatggggatacatatgtatagaaagtgtgtaaaaaattgaaatcattattcttctacagacttttcatgttccattttgttatttaaaacgacctccccaactacggtttcattttcaacctttgggtttattactactgaacccgcctcatccaccgttaccatatatgttttgttactatcaaaatcttccgaaattaccagatccgcaagcttgtcttccaatactgatgttattaacctcctaaaaaatcaaatgtgtagctcatttgtgtgtattaatatgtggaatgctacaatacctcagtggtcttgctcctgatttatcgtctctgggtaatttgagtatgtagtctgcgaatttttcactaatttctataaggattcctgcagaatgagcccgggctgtcaagtcattcagcatcaactttgcgatttcctttaattcactttccaggagcggcttgaatagtattacatcatcaattctgttaatgagttcaggtaggaaatgcgatttaagctcctccataaccagtgcttttatcttcaaataatctgaggattcatccgaatccacagtgaatccaaatgtatgcacgcctttcgacgatctctggattacatttgatcctgtgttactggtcataataattatagtgtttttaaatgagattgtctggtttttcgagtctgtaagtttcccatcctctagtatctgtagtagaatattcaaaacatcgtggtgtgccttttcaatttcgtcaaacattacaaccgagtatggattacttttaaccttctctgtaagttgtcctcctgtatcgtggcctttgtaacctggtggacttcctagtattctacttatactgtgaggttcagtatactccgacatatctattctaatcaagttttcctttgcgaaaaggtattttgtgagagcccttgctacttccgatttcccaactcctggtggtccacaaaacaggaagctcccaattggtctgtttgggtttttaatattagtttttgctcttcttattgccttacacacgtttttaacagcttcttcttgtcctattaccattttatgcaaatcttcttccatgttcctgattatatccatctctcctctcgtaagcttctttagcgggattccggtccagatactcatgactctatcacacagatatctttttggaacttactctgctacatgttcgggcttaacttgtccaagtacactttggtcctttttttcagatttctgctcgacctttgtttcattctcaccctcaggactagtagaattactaggatctggaatctcatttttctcctaaattaatataatttcactttaaaatactctctttaattcattttggtactgtattttcgcaaatgatcccgattcgtccatgatatctattgccttatctggcaagaaccggtcattgatatactgcttggagtatttcactgaatatttgtactaaatcataaacttacgtgctaattttatggaatcctgcgtatattccactccgtgaaactctccatacgaagaactaattccgtttaaaattttaagtgtatcctcatcactcggctcatcaacgtaaattgggtgaaatcttctagacagtgccatatcctaaaaccgtaaattacaacaatagtataccttttcgaaatattttttatactctttcggggtagttatcgcaatacattgtatttctcctctggatagaggaggtttcagtaagtttgctgcatctattgagccgtcaccagcaccacctcctaatttcattattattatacataaatttaatacctattagcatatgtgcttcatctataaccaaaattatatctcccgctgattttatttcatcaatcagttttgttaacctctcctcaaattgtcctctgaacttggttcctgctatcagtagtccgaattgaagctgtaatattctcttttttgatatttgtggttgagaaatcccttgagaaattcggtttgcaatgcccttgaaaaacatttttatagtttaaattacctctactattgctgttttccctactccaggctctcctactaatagtgggttacttttggtcatcctcgacaaagttatgatggctctttctatttcattatctctgtgtatgactttgggtagttggccgttacgtgctttttcagtcaaatctactgtgaacattgatatgcatgactgggcatattcatctcggttcatcgctggagataggtacacaaaattttgtgaagaatcctggatgttatcggacaaggtatttagttctttgatttcctttattttctctattgttctcattgttgtatctattgctaatgttacatcgagtttcaaattcttgtagaacgtagaagtctccttgctggtatcattcagaactcctagtaacagatgctctgtttctattgtggagttccctaacctttcagcctcagttgatgaatagtccagggcattctttgctgagttggaaaatgtaggcaggcttttgaacttcttcttctctaaactaattactaaaatttaatcttaccgtcaattggatatgttgatttagttgcatcccttactacttccgctgttattccaaattctttaataattttaaaggccaatccttggttcaaacatacgagcccttggaaaatgtgtgcagattccacgctcggttggtttgacagtttggcttcttccagtgaaagcattaatactttaattgcattatcgctaaagttatcaaaatttaagtacactggtgcgatattgtgagaacttgaccatagtgattccacgtcaggaatctgcgatataagtttatttgaggtgaagttattaattacaaatgtatttctaatcttttcatatttgaaacagctacaatgtttaaaaattaatgagttatatgcttgtaatacgacaagaaggtatatattaataatgttcattggttatcttttcatatttatttgtgtacttaactggattcagggttaaaatcattattatttcttaaaattaaaaattaaatgcgataacaaataacgtatctctgttacggaatttacacaatattctggaaacatattccaacacacacaagattccaaaattttttacttattattttcggcattatttgcatatattaacgctaatttatataaatataaattcaaatattttatatattatatgtgttagtgtgttaaagagcttcttatttttgaaagtaacggtgtgctgattactggaatgttgagtagttccttcacagtagaatcatcctccaaattatagtatgctattagagctagtgctattgtatctccatttggtttcaattcctctcccttgtctcttaatttatcctcctttttcgagaattcttcatacagtaaggtcattgtgttccattccttggccaccaaacatgcttccaaaacaccgttatacaggtttatgttcttgcttttcaacctatgttcagccattctgagaatttttagcgctagtttccattctccacatttttcacaagattttatggctaccagatatggagtgtgatttgttattatcatttccttctccattattgttaacacatcaaatgccttttgaaaattccccaaaagagaatacccttccaataccagctggcatacaactgggtccagctgaacattttcactcacgaagttcttccacacatagtctatatgctctaaacttctggttaaaagtagtgtgttgagaatcaacttgaaatgtactatagtgagtttaaaagttttttctctaatcactttagtgtacaattccaaacacatttgtggatcaaatgaattgtaagcgagttctagaagtgttttaagcgaccttgaatctaaattatagttttcagacttctttaattgattatacaggtcaagtgagtctgaaatcatgttagataacatgcatgattctatcgtgtgtaaacaatccgtttgtttcagggcattttcatttttgcaaaactccgccatttttttgagcatttcaaacaactttgtcgcctttgcgccatgcccgttaaatgagagtaaccaaagcaaacttcttattactccgtgatctaatactaatccagagtttaaagcgtcttcctgtaatttaattgcgtcctctactctgttactttttacacatgctgagattgccatcttatagctaactgaatcaagtaccacgtcctgcctctttttcatatctgatatcaattccaaacataaatcagaattacaattcttttccgcagccgacagagctgagttatatgcgattgtcagaggtgatacggctaaaatgtttacgagatgaacttcgttaataaatcatatttgtataaatgtataaagacttactacaggaggatgaagtttgtagcgtttcaatagcctttacccagtcgattccaagtgttgaattctgtgaaatagctgcggtcattttccacacatcagagtctgttagagggcctggtatcgattcctcatctaaattgtgaacatttttttctatagaattagaggaatcctctaaaacttttaaatctgtggataaattttcatttccttgttcaccaaatgcactagtttcagcaggaactgaatgaattaacaaatttttcggattattgatttgaggtgtttcgtgtttaacatatttaggtgcgtttaaatgggatctttcaatgaaaaatgtgtttaattcaactttatatgctttacaaaatatattatgggatggatgtgccttactctggaagagaaggctgatgtgtgtaggaatcaggtcattgtaagaaactgtaaatataaaaaacaataaaatatgtgtatttgagaataaaaataacaaattcttgtatatataaagcgataataatattacaaggttaaaaaacataatataatttaagtgagttaatggaatattgtggttgtatgaacccctttaccaagattgttcaaacatactgtaatcttgatctgtgtgatatattcctacataaaagataattaatagatggaattaggttgtttaagtatatactaagtgtatttgtggaaatataatacctttgttgatcatctttaatattggaggatattctaaagcagctgataccctttccttgtccaacagctgtttatttatcgtttcttcagtgttatgtgttcctaataaaaattaatcagttatatttgtctacctttagatatttgtacgtcgattttaaaatatggcggtaaactttggtacagctttacaaagatcatgagtccgattatggatgcctataattaataagatttccaaatgtttgaatttatttacttgagtgcaatgaggaactgtgggcgagaagaaaaccgaaacggtagacgtatcttcgtctatgaaaatgttatccttagaaaccacgtttaaatcctccaaggaatacgaatattctgggtccttgattgttctaattatatcaaatatctcctaaaattggatactttctttggaaaactaacctcttcatcaaatgactcaaattgattagaaggttgaaataggcttgtattattggttccggagctgttattcactccatataaatttgttgtgtcatctgccgatgtatggaccaagttataagaagaatcatcacagcaatcatcgtcttgatcatttgggatacaggatttcgttgaatgtttgtataaaataggatttttattatctaactccatttactaattatttacataatttaaacaaatttaaattttttaaaaataattttagtaaataattgtatggttgtgggtgtaagagtggccataagtaccaagaattatattcttaacatttaacatattatcaattagaagaaattcaaaacttttattaagaaggcttctttttcgaataaatttcggacttttcaagcgaatagaacattactccgagggtacactaaaattaaaattatcagtgtgtaagcttacaatcagtgctgcgactacttttccgggtgttattttctgacttccgtcgatgtatgagaacaagaagtggtctgcgaaaaccactagaacaatcctcaatgcctttaaaactccgcaacatactgacccgcactctttaataatatagtagtatactgacgatcttccaaaattggagaggaagagtatacctaaaatcttcaaaacattctaaaacaaataatatgtagtttagaattacttgtaggtcaaatgggtttatttctttatctgtcgcaaatagtgtttttctctgagggaacgtccagaccattgtccatattgagaacacactgagtgaggttaatctacatttccatgattaactggtttacataccccatcatacacaccagattcggtccttcgatttcatcctttttgagtaaaatctctccgattattgagttgagagcgctctaaggaagatgtacagaaagttaacttaccaccatggacgcgagcattactagaaagaatcccagaatgtgtaatgaagttatatattccgtctggacgtaaccacttagtgcaagtgaaaatgatataagtgatattgacagccaagttaaactggtaacagtttgcttgagaattagtttcgagaatagtgccaagaatagagttgttgtacttgatgcgattgaataaattgatggtccacagtataccaatccagctactcactcatatagatattattatacttacctttttccacaacttggtgtagaatatccatcattgataggatgattggatatctccatttttcttgactaaattgctcataatgaatgaattgacttacaagattgactttttcgttggatatgtccctacgaataccattgccaaatatgtcggaaatagaaatgtgtaggttccactctgtaaaaaatttaagttagtagtctaagtaccggcgttcctccattctttctcagcaataaaatctaaaactttttaagaatattttaaacaaaccagaagtggttgagcagtattagttaggacaaaaacgaacatataaaacagaattgggagagatagatttccaaatagtgattttactgagaagcctgggctcttatagaaactagtttcaggttttaaaagatcagttgtatgatttactaacaaaaaatctgaatcagcaaccaaagttaattcatcttttgattgttcctcttctacatttgcgggagttgaaggcgtcgttgttactactttttgtagcggagatgtgctagaatcagttgtggttaacgcctctattgagcccggcaatctggaattatcgaaagatcctgtgacttcctttctctggaataaaccttccatcaactcctggttgccaacgaaggttttatccacatctagcagataggaatctgaaaattgttcaaaattattctcagacatggcatttcaaaattataactcagatattttgaaatgttcaactatagacaactatgaataataaataagtgtaagtgtgaataaataagaaatagtttttatttctagattccataaatgttgtgcatagaaattagaaaaaaagatgcccatgaatggagaaaattaaataaatttaaaatacacatttattaaacattattagaaattaatggaagacaaataaaaagttgattaatttcacattatacaaaggtaatatgtcataataatttataaaggaataataagggctcaaatagatgtgtattaaaatagacaaaattcttatacatgatgatgtgacctatgtataagattaggggtatttaaaatatttagagtttagtatttattaataatgtgtagtgtgtaggtgatttagttcaagagaaatttttgataattttcctagcaatatatttcaattaaatttttattgttttgggtaaatataaagaaatcaaattgggatttttgataaattggtgatctttcaatattgacgccccattcagatgacataagagcttgcacatcatctataggcaaaataatcataatcttgaaaaatatattttatataactgttctagtaacaaaagttttattttttgtttttctctattctgtagaaatgaaaaataacctttatatgtcttaaagtaaacaacgtcaagacaagagggctctattttgtcatttcttttgttacatttgtatattactcttatgttttaccaaatagaagaaaattttaaaattttttgatatcttaaacatattttgttacataagttgtgtaattttccatttaatttttcaaatctgaacttttttcataagttaatctatttctcaatatgtcattttgcctataataacacaattttaatttatttttaataatgaagccttaattttaatattttattcggccctaataacgacatcttttaaataagctcaaggaatcagatgttcatacccctttaattttttatgttaagtctcctgagattaatggatactgtaaaataactaccagacgctctcagatatttttgatttccgtaattgtaatagtacttgccatctttacaaacattatgtgtaaaaggctcacacatctcaggaatttcagcagtatcgcaataaatttcaatatttaaattataccatttaaaaatggcagaaatggaggccgatggaatcaatcaagaagtagaagtgagtaatttcaagccacacgacaatctcaaaaacgcaaataatcacgatccattagaagaaccctcgaattctgttaataccaacggaataactaaccagtttaagaagaagaaagggccactgaaaaatgaaggaataccaagagaactactgggtctgtgcatagatatggactggtgtagaaagcccggtgaagatcatactaatggatttaacataaatcacgggaaaggcttggattattatcatcgtaacaaggaggcaccaaaacatgatgaaatcgaggatgatagtactcttgatttaaacactaataaacacaaacctaagtttagagatgataaccctaaatcaaaatctctggttgaaacaagttcaaaaaatagacaagaactacaaaagagaaataacagtgagcccaagaaggaagaatcatctaaggaatcgggtaaagctaataaaactaaaccgaaacctaatagaaattcaaggtctgaatcaccgaaggaacctaaaacaaaaaaggattctaatgcagaacataaagcagactctgattctccagaaggacaaaataaaaaggataaaaaggttacagaagctaaaaaggttggggaagatcaaaaggtgaagaaattaagaggtaatttgataaaaataaataagtttgttttagactcgtttatggcactgagcaagtatccgttcaataaagaaacgaaactgaagtctaaagattgtatagtattctgtaaaatgaaatctaaccttaaccatacactaaacgcactggaaaacaatcgagataagtttgagatgtccaattttcacctttacaagggcctcttcgtggttgataaagtgtctgagtcaaatgaagttacattcacttcagtgaacgaagtcaataagaatatcacctctaaatttgtcaaaataaatcagaaatcgccaaaacttaatagcacaaacttagggtccagcttaaagtttgaagagtcgggaatgtcatgcttcgtgtttgaaaatttagcactgtactggtctgggagtagtgttttgatgtgtttgcttcttaaaaaggtagaagaaggagtttatacatttaattataagagcaaaaatgatactgggaagtcattaaactctaaaaaagcagttagaatgtgttgtaacatctcagcgagagatccgaagaagtttaaaaatgatgaaacagtagagccatcaccctgcccgaataaagattactggtgtataatatttgagatcatagaggacgtggtgaacccgtttcttttcagagttacagagccgaacttaattaggccctacaattcactgttattcaagaaaaatcgcacaataaataagattttaagaaacatcataatgtgtagtttgaatatgactgttccagaaggtgaggaaaagctaattgatgaattgactgaattaaaggtgcaattctgcaatgtggataaagaaaagcctcagacatttgataactcaaattgtttaacatgcctcctgatagtccagttcctgacttcaaattcgcagtattacccctctaagccgaagacgccctctagagttaagtcgagtaatagttacgtgagctttaaggtgttagatatactaaaccagaaaccaattgagaaggataaaagtgagaataaaacggaagagaagctcacgccaaaactaacaatgacgaaaagggtgatgaatgaaaatgcttctacagaggaaattagcgaagataatgtggaggatgggttgtttgtagattcaatacatagaataactagaagaatgataaaggaactgaagtcctcagatacaacaccagattaccccgatattaaaaaagttaaatctgacaatatccagaagagaccgttatcaaatatttcttctgaagataaggaagatgaagacgaacaaccaaagaagaaaaaaactttatctcaatcaattcaagccgtacaaccagcaccaaccacccagataacaaaattagaaagaataacaactgtagtacaaaaactggtacaaatcacagatatcccttcaggattccagattttagggtaccttatcaagtattcgccaatagataaggacccaatgaataagaagggaagagaatggaagtacggagtagtcaagtactgggatccgaagtataagtcatttttcatacattcactgaaagaagaagtgatgaaagcaggatctgaggtgcaaatgttcctcaaacttctagaaaataccgagaataagtattcagaggcagtaacctggattcattcccaggcgtactttctagtacaaataggagaacatccagtttttaaccgcacgagaaaaataacgccaactgtcagaaaaaatgaacaaactgaagaaacaacaccaatatgtaaagtgtgtaacaaaaaaatattactaatgagaagagattttgcaaatatttccaataatacaaattttgaagcaaactttgatgaaaaaatccttttgcgtgatttcattgatgagttgcaaactacatacgactgtccaaactatttgtttagaaacccaacacattcaacagtgctggcattgagagaattggaacaaataggtttcaaaagaataattcggatccttgaggcgaacctggacataaccaagataatactaggagattaccgaagagaactgatactcctgtacaataaaacggcgttatacctgtgcattaaagtaatctggtggtttagaaaacattgtaacataaaagattcattgagttcaaagtcgccattgaatcttatatactggggtttcaagtgtgtgacatgtggaaaccattatcactcaaagtgtttaatgtatcaacatttgaggaaaacgacgccagatttaagtaaagagaacgtaattaacagagcaaataaacacagaacattttgcaaaaacttcagagtggcaacgagcatgaggacatcctactactcaaatgagaacctctatgacacaacagactttaaaatggacatagacaacgatttcgtaagtttaaacgaataaaataatttttaggggaaaacttacttgggagatatcactgacgaggaagttgaaagttggttaaatgaaagtgaaacagatgaggaatatgtggtcaaaaccaaaacacgaaattctcaattagaagataataatatgaagataacaaaaaatgaaaatggggagaaagaagatttgaaggaacactatgtgtattatccatttttagactcaacagtggaccataatgagtggaattgtccggaatgcagaacgtgcatgtactgctgtgaaccaataagaggaagaagttatatcagtagattaaactactgtttcgggtgcgcagatacgtcaatgaagtcatacaaacagttcccaccatgctttgagcaaaaagtagatcagttacagagaaattgtctgcaaacggaaaaggtaaaggatgttgtatgtgtgtcatgtagcacttcagcacacagatcctgttgttacccgatggttccaaacctactcttcatagagtcatggaagtgcgattactgtacacagtgtatctcgtgtggatatagagatatcacctgtgcagattacttgaactggggactgttctttttcttctgcctaaagtgctgggaactgttggagaggtccaactactgtggaatttgctataaggtctggactaacttcgataccagctcccagaagtgggtccagtgtgaaggctgcaagctgtggatacacatagaatgtgatgacctggcgagactgatcacggactgcccatcgtcgagaaatcagaattatagatgccttatttgtagatcagaggataagatgttcaggtgtacaaaagctcttgaacagatatttatcgtagataaacttaaccagtttagatacccagtctcaccaactttcgtaacatactggagactagtaaccaaacccatgaacttagtcacactattcaccaaggtaattttattaaatagtgtaattatacagttaaatttatatcaaccagttatttactgtattacacagttatttactgtattgcacagttatttactgtattgcacagttatttgaatatattaactagttttgtattaatcaactgggtaaaaaattgtttagttggagagtggtaagtataagtcggtgtacgagtttatatttgatgtgtttctgataccgtataacgcgaagatggtaaacatgccgaacacgaagatatacaagttcgcaatcatattcgagagaaagtgcagacagatagtgtccagcataatgcaaataacggattctgaaattacaatgatcatggataacggaacatcgggaggaaatgtgatatcaagagagaagaaattgatgaccacagaatcaccagaacaggtgcaaactgatatgatacaggaagtaagtgaattggaaaaagaagctgaagaagaaccagtagttgctatcaggagtgagaagatgccagaagctgttggtaaacaagaaggacagaaaatgacaaacacattctcagaattgaagagaaaagtggtcaaattcaatttaacatttgagtaccttctgtcttgtatattgaacatggatgtcaatctccaggataactctgacaataacacatgtatggacatgacggcaatgaggaacatattgccacaatttggttcagcaagttacgaaggtgtgccgccaataagttttacggagatatctaagctattacatccgcatgtgccatgcgggctagttttctcagtagtctcagtggcgtcagttgtggcacccaagttcatgttcccgccaacgttcagtagcagtgaggatttcgagaagttggttaaatcaaagaagctgataatgttgaataagaataagtctaaaaatccatacctgttgtcactgataaagtgcagggggaagaagttgggcgagttttatctggacacccaagaacagctggatcaaatgtctaaaatactgtttaaatgtggttttataaaggaactagatgcgtgcgtaatatgtgggtcaactgcatttcagagttacttgatgtactgtgaaaattgcgcagagccaatgcactattactgtgcaggatacatattcccaccaggataccttaagtacaacaagcttaagtgcgcattgtgctcaaaatgtgaaagatgtgaactcgaaatccagtcaaatcatccgtacgaactttcgaatgtgatggattacaagttcggagaagcattgggtttgataccgacggtgatcacaaacatagtgttacactcagctcaagtgatagcagacgcagcaaatactatgatggctcaaacgaaccagaataaggaaaactatgaattccataaccttgcaatgaagtatggcacttttctggatggaaggttcatggtgacacatacagggcatatatcaatgaacttggagaaggaactacaagagaagatttatcaccctctgaactcagtcaagtgtgtatcatgtgggaaatcaacacatctaaactgcattagaatagtcagaccaccaaaacctaatgtactagacaagttaaatgaaaacaacccaggagaatctggtgatagtaataatggtaattttattggaggtagagcagaacatgacccaacgtacacgtatggcaccgaagaacaggatcctgagtctagatatggtcatggggaacaagacccgaatcattatttggagacaatgaaatgcattagaaacaaccttaaaagtatagaaatgagactaaaacagggtttattggattcagagaatgctaatgtggttaaagttggtgaagaacataaaagaaatgattcaaatacaaaccatttaaggacggcacttaggaacctgtcagtttgtatggatatcatgaagaatctgaatgtccatgtttctgcagaaaaattagaagattcagtgaaagatcactctaaggattccaagcctcaaattgaccctaaacataacaatttgtcaaattattaccaaaagaaattttttgaccgtaaaatagtttcaggagggtttgacactgctaacacaactcactattcttcgaaagttgcattaaaaaacaccgcaaaagaatcattatccgactattacagcacatacgtgcccagagaagatgagaacatgtattacactggcactacagttcctttgtataaccaatttgataacagagttagaaatcattgggaagttggaaactctaatgagggacagaaaatgggattcacatttgagggcatggccacatacgaagatttgagtacaacactgggagaagataaaggttttactaacgtggacttaagacgtctgagtgatagtttactaaacccagttgaagaaaatcgaataacagagccaagaacagtatcagagtgcacaaactcgtcattcttctcatacgcagaaatattgaaagcatttgaagaaaacacacaagaagaacagtcgaagaaggaagaagaagatgtggacatagatgagttcaacttaccactgaacttgggttgggagtttgacggctcaggagtgttctcgtgcagtaagaactgctcaaagaagtatcataacctgaataatttaaggtttccacaggagtctttgtactccaattcactactgaaacagtttgacgctctacaggaatactacaagttgatggaagtagaccctgtaacaccgaaatatcacctgaaaaagattaagagtaattttaattttgacgatgattttgaggacagattaaatggaagtgaagggttatcagaagtaagagtgacaaacagatgtataatgtgtggaaagttggttaaaaacatcattagcactgagaataaggaagagcaggatggcacttctgaagtagtaatgtactctctgccccagacgacaggagtgtgggcattgtgtgtagcatgtgaagcctatagtaaatatctcgaaaatctgtgtaaagaagtttcaggtacaaaaggtgaaaaaacagtaaagatggaaaaggtgggaaatatggcactggacactatgacctcaaatgactttctctcaataattgaatcggcaagaaattggatcctaacaagtcaggtaattaaaatttatagtataatattcctttagcactcgattaactatatcacaacagtgttggatgcactgtgtccgaatatgtttgaaaacatagtcctcagaggaattgtatatgattttctaatcgatggagatcactctgaaatatatcctcacctctacaataccttcattaagtcgccaatgacaccagttttgttcacagaatccaaagactcactaatgaaacatcaagtaattgattatattattatatagttaaggatattagataatattattatatagttaaggttattagataatattattatatagttaaggatattagataatattattatatagttaaggttattagataatattttgtttaaactaagtctatatgtttttaggtgtcgaatagttcaagtgatactgatttgaagaataatatggtcattgagatgaataatgagttgagtgaaaaaactgaagatgcccttgtggaatctaaaaccgatggcgtagaattagctttggaaccatattctggcgtggaagaagaaaaaatggataagaagaagatcttatcgaaaacttcataccaagttatgatttcaaaatatacacaatacgtggtgagatcaacgaggttcttcggggtgtataaggaattattatcatataaggttttattgaggaagttgggatttttgggtgaaagcaatgtgtactatgaatacagcgcaaaggcagcagagtttttgtcaactaagctgaagaaactgttccatcaagtgataaatggagaagtgcaaagggacgaagtgtcgggtaggttgaaccaaaagtacccatacatgaggaaacatctggcatacctgatattcaacggagatataaatttgtataaaggtttgaaaactggagaaaactttgacaagtttacagattatgtcaatttggagaagagcacaacatcgccagcgtggttcttagggaaaatcggatatgaagccgaaggaatactgaaactactccaagaatttgtaaagttcgcaaacataagtgctaagaagaatagggaattgccagtaaagagaaataacttttataaaaagttgtttatgcagcagaaaccatttcagaacaggatggggacgtctgaggctacaaagtcaaacgaagatttgttttattcagaatttgcaaagaaatcaagttctcaattaacaataacaaacttatgtgatagcctgaaggtagcaatggaaaaattgtcgtcagagtcgaaaatggaagatttggaggattacctgacgaaactgattggttcctcatacttggtagacttggtgtcatcaagagcaataacaggagatttggtaataaaggaagtaatggattctgataagttttatacagagtttaccgattctgaagataaagtaattaaacctccactatcaaatcacctgagatcaaaacagcaaaacatgtattcagcctcacattatagtagaaatgttagaaatcaagaacaaaagagattggaatcatgttgtttgtgcggagtaggagaaaacacattgttaagagggtgtttagtgccatggaggaatggatttatccattctgaatgtatactctggtcactcaaggatgtgtattgcccaagaacatataattataattatgataacctttacacactgttcgagttcagtgaaaattcacagatggagaatgcgtataagaaaaagaataacattgtcccagctgttaatttccaacaaccaaaatatgcagatgagacagggagtgagggaagtgaaaattcagaagatcaaggtgtgttggatttggatgatgaaactgaggattcaagacgtcagtcagaatttgatgataacgggactgaatacattgatgaatcagataaagatgaaattgtggtacaaagtgctcagtctggggttacagtaggaaatgctaagtctgaaactatagaacaaggtagtaaaccggatgctactgttgaaactggtaaaccggatgctactgttgaaactggtaaaccggatgctactgttgaaactggtaaaccggatgttactgttgaaactggtaaaccggatgctactgttgaaactggtaaactggatgttagagttgaaactgataaagcggaacccgtggtagaaactgggaagcctgaggttacatctggacctgtaaaaacggaccacccagtagttaacacggtcaggtttcaggatgatcagaataagcctatggtgacatttgcacctactaacgtcactaatggttttgttaagcctgagttaacttttggatcaggcgaaacaagggaagatgggaatgctcgagttgaaggagttgaagttgatgatgaaaatagggtatttgcagaaagagtgccagaacaggctaatataaacttgatgtacatgccggtgttaccaccggttcatgtcccagactcgctagtggaaatgatatataaggcttcaaggttaacaacatgccagtggtgtaatatgaaaggagcgacagtaacatgtgcagggtataactgtaaaatatcatttcacctttgttgtgcactagtggcatcaagtaagctagtgcatagtatgctggaaagagataacccggaagatgagttccaagttaaagtgttcccaataaagatgttttatacgagaaggaaggtttggtgtgcagcatgttttgagtttataacagagaatgtcaagtcgtatcacattaaaagcctaatgaaccagaagaagagtgatataaagtcctttttatgtttggagggattgtcaccaaatgcagcaagaatagtctttagacagacgttacagtcagtaagaatagtgccaagaacattagattacaagaagctggaaatattcatgtcatggacaagctcaacatataaaatagtaaaatctgcgtataaccagacgatgtataatcatcaactggaacctgaagtctcgaatttcatttcagatatctttaagccagacccactgccggatagcccaaacaagattaacaccgattatgattacaaaaataagtactttttgtacggatcagataaacatgccacatcagtgttttcagtaaaggtgccctttttatggtatgatgaagcagtgacacataacttatggagaattggaacactggccataattaacattggtgatgcattaatgcaggataggagtgggacactgtatccaattgggtttacatcagtgaaaaggttctggaacactaattactttaggcagaaaaatgaggaagctcaggctaacttaaattactttgaaagacagaagaaatattttacaaattcccatgcaccagatgatactgctggatgctcaaatggtttgacgggcaatcataaatcttgtttggatcagctgtttttaaatcataattcatcatttaacacggcatttgaccatagaaagcacatgggccacgcaacaaggagttattacctcttttgcataagatcactaggtggagaacctttcttcacaattgacctcatatctgatcctaattcacagtatccaaatcttagactgtgccaaggaagagatttaaccaaaacttacaatgcatttaaggatataataaatgctagaacgttggatatacccccagaaacatttttcggacttaacctacacattgtactacagcaaattagatttgatctctgctgtacaacgatgcacagaaccactcaattctgcaaaatcgctgcattcaaacaatcagtcctaggttcaaggtattttttacacaatcccattttttacaatatttttacagtattttattaattatccattttattcatttatattatccattttagttatttatattatccattttagttatttatattatccattttagttatttatattatccatttagttttgttaatagatactttctaacaaatatacttattgcctataaaattaaattgttaatgttaggatttcgaattttgacgtgaatttgaggttgggagagccgacagttagtttgccgtataagttaaacaggacagtaatgttggagcatttatcgaaagatttaagagaaagagagcaaacggtaaggaaaagtgtttataatgattttaggatcctgagctgattgacgtgagaaataatagaagcagaactaggaagcaatatgacttgtcaaactcttcaactcagtatagatacctgttatcaataccacctgaaagcagacttgatgtcaaaccctcagtgattcacggcctagggttattcgcaactgagagcataccagcaggagaaccagtggtagaatacgttggagaattgataagagatgtggttggcgatcagagagaagaactgtactctgaaggtcaaggaggagacggctcctgttacatgttcagacttgatgaccaatacatcgtcgacgccaccagaaagggaaatatgtccagatttattaatcacagttgcgatgtaactttctcaccatagttaaatatagttatgtaactactatttatatagttaattccgtatataattattaatttaccataatgtagttaatgctttaatatattaatgaatgtgtagccgaattgtttatgtcgcataataacgtgtgagaatggaatgaagcacattgtagtgtttgcaaaatcagaactgagtccaggagacgaagttacatacgattatcaggtaataatttaaatttataatttcttcagtttggtgttgaatcggaaaccagaaaactaatgtgcttgtgcggagcacctaattgcttaggaagaatgaactgatacttaaattttatacattgttttacaatatatggtatattactgtacatacacacatgtgtatattttatagtattattgtatatactcaatggtatatacccaactatgtatgtatatacttgaggataaaatatattaaaatggtattaaagttttcggaatgctgaatggatacagacaattccggcagttaagtttctgtaagaaacgtgtaagaacccaagagatttaagaatctcagcaagttcctgctgattggggaatttcctaatagagtcaacaaggtaatcataagcctcctcattcttggcaacaacggagccaaggaaaggaatgagtttgtcagagtaagtcttataaagaacattaagtaattcattttcacagtgactgaactcaagaattaagagacgaccgccaggttttaggacacggtaacactcactaaggccagcagtcctgtcactaaagtttctaacaccaaatccgacagtaatgatatcaaaagaacagtcatcaaaaggaagtttttcagcttcagcgttaacccaggaaatatccttaactccagccttctcagacttctcttggcccagcttagtcatctcgtcagaagggtcacaaataacaatcttcggagttattttcagagtgtcgtatagtacaaatccattcgagtcttcaaatttcaaattattagataactgagctatacggatgccaatatcaccagtgccgccagccaagtccaaaatatcaacaaccatgtcatctaaatcaatatatacaatctatactgataaataattattgtatgggtaatacagaatattatatgactatccacaaatattacataataataaggagtgtgtagaatacctggaagaaaatcatcggtaaagtaatcttttgaaaggtgtcgataggtcattttaagtgatgaaattacctcctgaactagaacttccttccaaattctgtggattccaacactcatcaagtcgttcataaggtcatagttcttagcaacatctgaaaaaacagacctaacaaactccttagtaggtgagctgtaaaaacggtaaggttggaagttataggagctccttagatgtgctacaggcctaaggtagcgcatgctcctgaaaccgaacactgaatttaaaaatctcatcaataaattgaaaataaagtcgaaattaaaatggagttaaaattcaaataaaaatataatttaaagttgaagttgaaattaaaattaaaattcctgataaatgttcagtttttatattaaaatagttgaaaaaatgatgaaaccatattaaaattaattatatcaagtaaatttagcatgatttgggaagattaaacaccatatttctcaagaagtggaaggcagagattaataaatttaccctcggaagctttggagagaaactcaacctaaaataaatataaaacacaactctcacctttttccagccaattccgcccttatttaccacgtttttgatggaatcctcccctgtgtaatgtgggtctgcaattaaatacgccacttcacctagtaaaatagatattattatgatttctacaacatatttatatgttaccttgctcagattcaatgcatattcctagaattacatatgcgtaggccccagctccgacaataactggagtcccctgactcttgaagtggtctgctattactacattataattcctaaactcagacacatcgtttaggtacagtgttttatacatgtatccaaggtaccagtttaaaaagtaaccagattctactgttccaatccacgtgttacttccaacctttaaatccttgtgagaaacgtcattttcttttaaaacttcttgtatcttagaatgagttggaatcatcctagtcgtgtgatactcaagcaaataccaactacaaaccaactgaagtgacctgtaacaacatccccaaccagtatcattcactcccatctacaaacttagtcaaccatttttataaatatttatgcatagttatgtaattatacctgagtgtagtgatagtattgataattcccttgaaccatactaacagttgattttttaggtgaaatccagcccggataaggattaatagctctatgaggctaaggaatattaaagttaatagtaaatgtgtaaataattacaataagtgaaaacttactgagactagaatggttttatcaactagatcgtaggggttgaaaacagattttaatttggataaattctggccaaaaacaccatcaaaacacaaatttgactgcgataaaaagtcaaaaaacggtacaacagtgcctccaaaaggcacataatctacagattgagaaaagctcaaactcgacattaaaaacttaaaaactaaatttaaacatatatttttatcctcctcttcatcagggttttgatgttctttatttaatgttaatgataatgctccagtggtagtatcaagtttaagagtaaattctgatccaaaaatttctaaattaggtaccatgttaaatactttatttttatctttatttttactcttattttcagcgtttttaggagcagttttaacatttttactcttggatgatttgttacctgatcgagtaggcctgctgtttctggtcgatttcgtagttttctggtccgattctggtaattcttctgtagaatcattcaagaacaattcttcttcctgtggattcttagcatttgaaacagtaacataacaggataaactactgagatcactactcacaaaagaagacaacttcgttaactgatcatgagctttatctaaaactaatttggtaagaaaaggttcctcagattggtcaaaatttaataaaacagtattttgaagtaaaagtttaactgataatttacaatcttcgtaatctccgcagactacaaaggcatgttttctacctctgctatcgaagccaaaccctaatgaaaaggttgggtaaaactcagaaagtttatccttaatccgtttaaaagggtctgaatagacaactttataagatgattcatctgaattacgctttgttaagtatgattttaatgaatctaccagtgaacatttgatagtgtcaggtaaatttcccaatttatatactcccggctgagtaatattagctccaaaattctcattaagagacagtttagagaagaataagaggctaacgttcattaacattaagtttctagcctttaattcagcatcgtcatcttcaacctaaagaaatgttattttttattcaatgttaaatgataattagtgaattacccatcttatatcatccaatttaactggtaatttagttttatcatcctcattttgactgattttataacatgaaaatgattcgttaagtgaaaaaacgagattagagtcattttctaaaaccagtaagtagaactcagtcaaactatttaaagggatattgagatttagagaatccaaattatttacatcaaaattagaagtagaatccacgaggaatccggcgaatttaaggtgacttggtacagtaaaatttgagtcaaaatctaaaaataaatttttattatttatttaaaaagtagtcaaaaaatacatttgtatgttaaatttgagtaatttctgaatgagcaaatccaatcattatcagaatcgtcagattccaacttatacaagagcctaatgagataattcaaactttcatcctcatctgatgaatttctagtaaataaacttttactcaagcataaagtcataataaataattaatatttaatattatataattaatattattgcctcatactaatcataataactattaatatcagtaataataaatttatgtgtattataattttgtattataaataattgtattgattttttcttttattgtttttgtttaaatgtgatttagtaatgctaaaggtctggaatagaccttataatgtgattctaaagtgtttgagaggtttagaacataatttattcaacgaattgcagtcatttggatttgatagaggttcactaataaaagctaatagtagagtcactgttctcgattgtaacttaaaacatctttactttttatcttatttttccaggtatttttaactttatttacacatacttttttcatagattatcttctcgtgtttatttcgaggttggaaagttacctttatttgaaaaaacttctttatttaacagctgtgactcaatttcatggtcagattttctcggatccgataacagttacttggtaaattgtgactctctaatcactaataattatataaactcgaagaaatactcttgccaattacttaaggatggaattaataaccatttttcaaataatttgaggttggaaccaccaaaactagatttgaacgagcctcaaattaaacttgaaattgacgtagataaagactgtatcgcaactgttatggttgattctgtaggatcgcctatctccagtagaaattacaggtttaaacctaacattggagatatagacccaaccatggcctgttccatactgtacgatattggttactcttcattttctaatcctccattcacatttccagaatatgaacaactctgtaattctaacaattctagtgattcagattctaattctcaatctgaacaacaatttacacaatcatcacaatcatcacaatcatcacaatcatcacaattatcacaatcatcacaattatcacaatcatcacaatcgtcacaatcctctgaacatttgaataaaaattcgatagttgatttattttctggatcaggcgtatttctaattgagtcggcattatattcagccaaaatcccacctggttattttaggcgtagattttcatttcaaaacttcccagtctttgatgaaaatgcattcaaaaccttaaaaaaatacaccgactctaaaaaaataaactcatcatctgaagaatggaataatcttaaaggtaaattcataggtatagagagagattgggaaaagcttgatgcatcattacgctcatctgaaaaggcaggaattcttgacctgatgtcctttaaccaggctgaatatcttaaggatggcatttatgacgctaagaaatccagcgattctaattattggaactatatggtagcacaattacctcaaatgagaaacgtaacccaccaaatccaaaataatcaattttccaacagatattccccaataatccccaaggaactgaggaaattaagtcctgaaagatattctacactgttgaaatcactttcaagggtcaagaataagcattttccagcaaattccaagggcgttttaatacttccctctttcatggataaggaccaggttcaagaatccttcagctgcaaattaagtgtcggaaagtcatttaataaggatgggatatgtaatacaacatattatacagattaagttctagtattaactgtggaacactgtacacttgtcttgggccacctagtccaaatcaccttagcagtgtgtttatcctcatcggcacatgttccaacgatagtcgcgtcaatttctggtgaaattaaacttgtttcagggttaaaatcaatgtttttaacaattgaaaccttctgtaacgggcccttagtctcctttccattatagtggaatagagtcagggtgctcaaatcctcaccttgactttctaatgtaatgtagtattagaatatatacttaccatgttgtgagagtactttggacttataccactctagcatatttgtccataatactataccagaatctacgtccatgcttgacacagcgtcttgtaacatttcaggaatccctaaaatattattgcagactagtcaattggtagatagtgtggctaaattgagtaggcggtacctagaagatttaagagccttgataacgatttcacaggaatgtatttattatcatcgacgtctaacttactccactcctcaaccaaagactaaagttaaattttaaacacattaaaaggagattaacagtaatacctgttcgaccatttcaagtctggaaaagaagcatgcagtaccatcaaggccaaatagcacagtgtagtggttggaactacacactacccaaattggaaccagtggattcttatagaatgaaccaactttatataatctcattgcttccaaatctgttagaaatccgagtgtattctgggaaattatcccctttaacaccatagactgtgatgaatcgccttcaaaaagcttatcgccgttgaatacattagaaaccgctttcccatgtaaaaataaattcaccagctcctaaatcacagtaacttaggtaaaaatgataatatcaagggagagtgatgacaattgagtacctgtgagcaatgaccgaaagatgtaagaagaggttgtgtgggatcatccatgtcttctttaacctggaaaatgttaaattttaaacttactctttctagtgtgcgggtgcaaattactgataagactagagaaacaacacccaggggtccagttagtttctcaaagttccttaccaaataattcgccacagagttaatattatcaaatgaccggagagtgcatgaatttgtcgaagttaaatgtgtcaaaggatcagcattttcctaataacaattattggtgaaattttattagtttacctttaaatcttcaaataaaattattttatatgatgaagtctcggttgagttatataatacattggagcatgattcaatcaacggtatgacatacagaaattctacaaacaatataaataggcgtaaaatttataaatagtgctaaaaataatagtttaaaattattgtaaataactgtgaaattagtatatagtaaaaaatgtgtagataaaacctctggaaaaatctggaaatcggatggtgatgtaattgaaaaataagtcagtgaaaagaattaaggcttcttcttcatttttagactgcagtaggaatgaaaagtctgcgaaaatcgagtgattgaagagtaagcttctgagcatgaagctctgaattgaagctaaaactccacaacaaccgttgttcatctgagttaaaccccaaaataaagcactgtttgggtcattcacaaatccctgattacacctaaaactttaaataaatttgtgaatttaccaggccctgatttcatggtctaaaatcagccgagatgaatcgttaccaaataaaagtgttaaaagatcagataaaacctcggttgaaataacatttgtagagccaacaccagttgactccgaggtaaaatctttgtgcgtgtttcttggaaatcttgaggaaacagaggagtcatttaatgagttaatgtaatctttaaaataaaataatacgatgtcaagtatttgtgtaggatcaaaagtatcatctgggcccttagagctaaggtttgataaaaaatatgttcctaaacataaattaacccaatttgaacaaaaaaataaaataaattaattatatcataccgtctggattaaaattcacgtaaggagagcctgaattatcctctctatcatcatttccttctaaacaacgtcatttacaagttaataatagttattacatagttaaggtggtaaattctacctctatagtcttgaagtgactgtttaatggcttcatttaagtcttcatcgaaattggagtctttgtcacaggagtttgagtcgttatattcataaatatcatccattgatgaatcaacagatgaggaaaatattctttatcatgttaatagataaaatttttcttgttaaaatatatattcagaatttgtgagttaaaatgaatgttgaataattagaacatttaaatttgtgcgtgttgaaattgggtcacgcgctagtttacacattttaagtaaaatttgctatcatcaattaaaactaaatttccttatattttaacttatttacaagaccagaagctgtggtataaatgatttcctttgaactcgtccagcgcgtacacgttcctctgtcagattcctctccatccttacaattaacctacaaacaacattatcccccgttatatcactgttaatagtgttggtagaattagtgagttgaataattggttacagtttggagtgggaatttgggtgatctgacgtctaggagaataacacttccgtccagggaaatcgatgaaatgagattattacttgggttccatgaaatgtcactgactaaacggtcaaattgcatcgactgtgacactttagcaaagttataagaatgttcttggggagaattgagactaacagaagtgttctcagagtttaaatcccaaattgtaagacttcctgaaagagttccagtacaaaccatatttccatttggtgatatatcaaaacatgttacagcctaaatcaagtgataagaggatttatcttacatttccagtgttatgtgatgaaattaaactctttttctcaatgtcccaaacacataattttccatcaattgaagaagataaaagagtttcatttttataaggatagaattttagtctctatagaataatattgagtaaaaaatcgtaccgtgatgggttttgtatgatttgctagagatcccagctgagttaaagtcttagtctcatgtaatgttctgaaaattgtttaatttgagataaattaccttttattagatttagaatttaataattcctcgtctagcatttcaacctatgaaattcatttacacaggttattgtatatttgttacattttggtacagtgtgatcagattatcgtaaccgccagatgctataactttacaagaatcctcaactgttactgagtttacagtatcagatactctaaacagatttattaactaaatagcgtacgcgttgtttgaagccactaatgtgttcagcggggttttaacctttgaattaacgtagtacacctcaacgaggccgttaaaagtaccacaaataagctcagtaaattcaggattcgacctaataacttgtaatgataattaaatttacttgtttgtagtaatgcaaactgatgattttgaagactgatttgtgaaattatgaaccttttccatggtttctgatctgtacagtgagactcttccattataacaacagactgccgatatgtctaaaaaatgttaaataattataaattacctgaaatcttgtcatatgagagacctgaaatccaatcatccaatttatcaagagtattctcagaaggctcacttatagtcaatacatacaaaacctcaattgtactctcagattgaatattcagctcctccaatactctgaaaattaattatatcccgttttataaatggtttggatgtgaaattactcggaaactgtggtacggagccgattattatgaattataatatcaaatgaaacttgattttccaaatttagtaactcatttatcatctaaaatattagttagaatatgaaatttagtaagttaacttatgattaaatacctttgataatgaacttcggtccatatcagtggatatgagaaaagtgtcatcttcaagatcatacttttcgtcagatccattgatgaatttggcataaatctcttcaactgtcattttcttatgttaaatacggagaatttaaatattttaatgatttatagatcataataaaggaatctgcgagcatagattctacaataaattagtgttaaaatagtttttttacaaatgaaactacataatctggtatttaaccagtgaaacaaaattaatgttatgaaattgattaattatattgtaaaattaaatacattttaatcaaatgtgtatggggaaatgaagttaaatttctttactaaaatatataatttattttataaatttgtgtattgataaatatttatttgtttcggttgtaatttagtttgtttttgggataaaattggcctgatatgaccgattttaaccgtagattgtagattgtaagcagccgatgtcgttttaaagtttaaattaatcatgttaattttagtaatattgtaatgtagaaggctgattgagtggtaatgactcattacagagattcagcttatttttcaaagttaatatcgctagagggcataccgaaggagttcctcccaaaccttgacgacaacgattctgtgataagtgagcctcagtttagaaagaatgaagatgaatctgagcgcgaagctaactttgaggcccaggaaaaggaagaagttgtgaggaagacggcggagcggaagttagagtggccactgtgttgttggatttgtaggcaaccaataacaaagaaaaagacatacattatctgtactgacatgtgtaaacggtcgtatcataacagatgccacgactttatgaagaattacttccgcagtatctacgacaaagttatcgccaacaagaaatcctcacccaataataatatctcagagttcaatattgatctttcttacttcaatgacggctctgttttcacctctgatcttgacctcaaagttgataccgacgatgtaaactgtaattctgaacattctttcaacgccgatgattcacatacctttatcgataactggaagttttacaacaccaccaatgccaactctgctaccactaacactgtaaacaattcaaacaatgttgactctgttgacaaagttgataaagttgacacagttgttaaagttgataaagttgagtctgcaggcacggatgaatctgtagaatccgtagacgaaatgaatgtggaggataatgttagtgttgatgatgttaaggttgagaatgttgagaggaaatgtttcttttgttcaatatcacacattggctgtaacggttgcaggcaattttttgtgcccaaaaacttggtaaaatgttgcattgatgagtgtcctacgttctactgttatccaaactgtttgtctaggaccaggataataatcccggacaagaaggtgattgacataaacatgagcatgtgtggtcatttacataatttggtagactctaacgggcgtccgaagttcatttgccactctcacacatgctggagctgctatgactgtgaccgctactcctactactgggaatcattttggcgtaacgagtatggaaaggggaataacgcctccctagtttcagcctggaacacgcttaaaacttcgtgtagaggaaaggttgaatcttcccactttgcaaaggggaagaaaatagctaaaccgcaacggtacccagatgtcagagggtttaaaacatttatccagtcgagatcgtattcagtgttttccaccaactctgatgacttatatgactcatcagatgatgaggaggagtatttccagaaaggaccgtcaagtgtacttttaaagtgtatccgctgtgataggacttggtgtactcactgcgttcatccggatgtacacattgtaccaaaatctgggaaacaaattgtgtgtcaagattgtattcatgtgcagattggatgtactttggctcaaaactcacgggattcaagtaatatgtcaaatattgtcaagagggagtgtatatatcctgtgataagattggatacgagtgtccctacggagatatttacgcagttaaaaaacttcataactgagcatgcgaattatgaaaagaagttaaatttagagccgtcatttatatccaaacatccagcgcaggattctgacgatgatttgcagttacttgatttacacaagtccatactgcaaagagctaagtcaagacgtagtaaaaagggagactctaactccagttctaaatcttcccaaaacaaatcaactcaaaataaatccaaccaaccacccaaattagatcaacagtaccaatcgaaaactggtcaggtgtcgaaacagtttggcgtttccaaagaatggaataacataatcaaacaatctgacgaatctgttttgaacaagatatcgagtgagtttagatatgtaacctcgaatgtgataagtgctgagaataaaaagttggtagtggcaccggaggctgagatgaaatgtcattgtgataaaaagtgtggatcagactgtagtaatgttacgaaaaacatcgagtgtactgtgaaaaactgtggattagctgacgtaaactgtggtaacagaagatttgcacacttttcaggtccgaaactgagacttaattatgttgacggcaagggtgtgggagctgtggctactgaggagattggtgagggagaattggtttgcgagtatgttggtgaagtgatttcacaggctgatttccagcgttgtctggcaagtgcaagttttgcagaaattgatgacgggaatcagagtcactggtacgtcatgaagatacacagggatacttacattgactcaactcacctgggcaacgttgcaaggtttatcaatcattcgtgtgatccaaactgtgccagtgtcccaatcaacgttaagggtacttaccggatgggagtgtttgcactgagaaaaattaaacaggatgaagaagttacgtataattatggcttcacatcgaagggagttggaggtggtttcaggtgtagatgcagggctaaaaactgcagaggaattataggctcacaattggcacactcgccagactcactcatgagtattgaggcctccaaattctcaggagctgaagctgatgtgctgtcacaactaaccactgacatgtcttcgttaacagttgccaataagactcaatcactaaaacagcaaccgtcaccactggatgtattgaatggcatttggacctgtggcgacttacacagatatgaaaaaattgtggaagttttagataaaatgaatggtggaagcttgagtaacccgttgaaatatttgttagcagataacgctcacgtgtctgaggcgcagtttaattacgtaaaactgctcacactgaactcaatgtcatttctggatttcgatattgcaaataccaaaaaagtatttttacaccttttaattgtctgtagtttgcaactaatgtgccctgggcactcatagccatgggccataaagatatttcatcacaagtggtaattatctagttaacattgtttagctgtttaattagtgaattatttaattaattggttaattgcgtattgatttgattgtgtattgatttgattgtgtattgatttggttgtgtattgatttgattgtgtagtcgatggagtctagtacgggatttttcgatttttatcaacctgcaaaacgcttcatacaaatctacgtaaccacattaaccatatatttaagtatattatggtattatactagttaaatgtataaatcttgttgtatagtcgatgttattggctggaaaaaaatcaggaaaacaagcatgtgaaaacattcaagatctcatggacctaacttggggcggaaccgaagtaaatactcaattaaataatattattatattatcactgataattaacttgtataaaatattgcataattaagtaattgtttgtagagttgttcggcatgtggcgggtatggagactgtaagtggtgtgacagatgcggagacgtgttacacgacgataacaactgcggcgacttctacgtcaataaagaaggctacaacacctgcaccatgtgccaaaactccgatcacaggtattatcacagagctataatatccttgtaccaagtaattactattttgtaccaagtaattactattttataccaagtaattactattttataccaagtaattactattttagtacttagtataataggtgataaagtgttgtagatataaatggtatttatcgagtaatattgagagggaaaaaatggcgatggagttgtggtcgataaggatgaggaaaaaggttgatgaacacttccaactgttatcagagctgtgtaccagagaatcaaagggaaagagtgcagagttagggaaaaaatatgaaatgtatattgacgaaaaaagattattttgtaccggaaacgaatatgaattgtttaaaaaagacccgaaactgtactatgagtcacaggagaaggagaaaaattactgcctggaatcaatgaccacatttgaatgttatacctgacctttatatacattagaaaggggtaaaaggtgtttaatacacatttttgaaatttttgagaaatgttacaattttccataaaaaatgaaataatataatttttcatatttataattaataaattaactaatttaagccaaaataagggagaatcatgaaaataaatagtgatggtgtaaggtaaaaaaaggtgatctagacactaaaataagaactctaaaattattaatttcattgttttatttaataataatgttttaaattatttgtaacatatttttatgtcaatattatctaattttccagatgatttattaaaatgtgtagaatgtggatttgaaatagaaattcctaggtaaataaaaatggagagagttgagagatctccaaactggactacaaatggaaaaaggtgtggattcctatataacgtagtggtaacaaatgtcaaggcgtcgctggatttaaagagatcagtagaactaaagaaatcagtaaaatattcatccactcagtcaagagatgaaaaggattctgataacttttacagtaacaaatcaggtttaaatgttgagagccagtacaactcggccctaacaatgcactttgtgtctgaggatggtactgagtggagcacttccttgatatactcgccgtacttttacatctcagttttacgtgaagagttgatggatatcgcattacagtttctgtataataactttagaagtcattcgataggaccagtgttactagagccttgtagacgtatagacctgtcactgcctaaccatttggagaaagttgaccctgttgaaggagtaagtaaacataacttggcaaaattgattaaaatcagctttaaaactatagaccagcttgagcgaggacgtgacatgataatatcactgaaacgccaatttgaaaaggataatcaaataaatgagtcaaaaaatgaatatgacgaatttgatgaagatgttttcacatcaaattatcaatcaaaaacgcaatatgacacatttaacacagggtcaaaggataatgaaatatcagtagatggcatgggattaactcaaaaatatgcctcaaactcagtattaagaatcattggtgacttatatgaacatgacgttttatatataaatagagtttgtatagacttaggaataaggtgtggtacatggtacgaggtcagacgtgaggattttaatgtatcagtaacacctctggaaaagacaagtgtacctccacttaacgtgtttgcatgggatattgagtgttacaaggcgcctctcaagttccctgatatggaaactgacgaaattatgctcatctcagtcatgttcaacggtcagggatatttaatagtaaatcgtacaatagtctcaagagatattgaagaattcctctaccagcccagagaagacattgtaggaaacgcttgtttcaaaatttataatgaaagaactgagcgtgacttgttgatgaggtttttttacctaataaactatttgaaaccgcatatatttgtaacatataacggagacaactttgatttcccatacgtaaatcgtagagctgagattaacgggatacacatgaacaaggtgtcaggattacatctgtcaagtgaactgtttcaacacgcctcaattttgaatatggactgttataagtgggtagaaagagattcttatttaccatttgggtccagaactttgaaacaagtttgtaaactaatgttaaagtataatccggtagaaattgatcctgaggacatggtacatttggcccgagttacacctcagaaactggcagtttacagtgtttcagatgctgtggcaacttatcatttgtacatgaagtttatacataattttatcctggcacttagttacattgtacctctagcgccaaatgaagtattaagacaaggtgctggaacactgtgtgaaaatttactcatggcacaggcgtacgctaataatattttattcccaaataaacatatccagaaggcgattcggttttatacaaacccggaaactgagagacagcatttagtgtatgagaatacgtacattggaggtagagttgagagcctaaggtgtggaattttcagagatgaccaggctgagaattttgaactctcagcagcaacttatgatgatctcattaataacctagagaactcactcatctactgggctaaacattccaatatcattagcacaattggggataatacccgagttgaagactttactatggcagataattcgcagtccagtgccacggacaatactaacaatattgttactgaggaaacccatgtagaacccgtagcagaacgtgtaccagaacccgtaggaactccgtctgcaagattgaggaggatattttcaagatttgacaattttgatcaagtatataaggaactatgggtgagattaagtaggttgagagacgagcctacggtgaggacatatcccagaatctaccacttagacgtaggagccatgtaccctaacattattataacgcagcgtctacagcctacagcaatagtagatgaaaaattctgtgaaaaatgctcatactactctgagtctgagcgatgtcagaagcgcatgaggtggaaacagcgactagaaatctcacccatagacaagagtcaaatcttagtagtaatgcagaacctaaaggcccgtacgtaccaaccctcggaaatgtcattttatcatcatgaggaggctgctgaggactcagaagctgaaagtgacacgccggaaaacgagcctaaattaaaattacgcacgtgggatcagcttacagagcgtgaaaagggcgcacatttacaacgtgcagtaaaggcgtgttctcagaaaatctttaaaaagacgcgtatatacaaggaggctgacgtcgagagtattatatgtcagcgggaaaaccatttctatgtgcagacagtacaaacattcagagaccgtcgttacgcatttaaacacttgaaaaaagaaggtgaaaatgagttaaaagagttgataaaaaatggttgcactgacccagtcctcatgaaaaccgttagagagaaaatattaattaatgactcactacagctggcctacaaatgtatcttgaatagtttctatggatatgtaaagagaacaggttctagatggtatagcatggaaatgggcgccatcgtgacctacaccggcgcatcaatcatcgattctgccaggaaacttattgagaaaattggaatcccaatcgaactcgacaccgacgggatctggtgcatgctaccagacatcttcccagccgtactagatctcacatacaccgtacacacacccgaaggtaacaactgcactagttgttttattatacttaataatacctaataattattattaataataataattgattgtaggtgacaagaagaagagtgtggagttggagtatatgacaacggtgttgaatatgttgatagctgaggagtggacgaatgagcagtatttagacttggaggattcgggtcgttatgtgacggtgcagaaaaatgagattttctttgagcttgacgggccatggcatgcgatgtttctaccagcctcggagaagtcagaggagctattaaaaaaacgttacgtggtttataatcataacgggcaaatagttgagttaaagggttttgagattaagagacgtagtgaaatgaggatgattcagttattccaggaggatatttttccacagtatttgatgggccagactaaggaacaggcataccaaaatgcagcaaaagtggccgtgtcatacaggaaaatattagataccagagcgtcagacttagctgacgatgatctttttgaccttttgctgtccaaaaaaacagttagaaaagctgtgatagaacagccgcaccaaaagtgttttggcataacatcagctcggagactctcagaactgttcaaaaacgacacgtacttaaatgatgcaaatttgtcaatgtcatttctactagcgtcacagccgtcagatgcgccaagaactgctcgagcaataccaatccagacttttaaagttgataaaactgtacggtcacagtttctggctaaatggcttaaaattcaactctctacagcaatgagaatgtcatcccgtgatatcctcgactggaattattacaaggaaaggatagatacgcagatattgaaactggtagttttaccagcaatcatgcaaggattagttaatcctgtaccacaagtcgagttacccaagtgggtcaaacgcaaacaatcaatcctagacaacaaacatcataccatctcatcttactttaccgtcaccaaccacaatactgttaacactgttaacactgttaacactgttaacaccgtgaataatacgaatagtgttaatatgaatagtgtaaactcagtaagtagtgtaaactcagtaagtagtgtaaactcagtaagtggtgtgaaggaggatttgttggattggttggacgagttgaagaggaggtggataaagagtgtgataaactttaagaatatacagaaaaacacgtataataagataaattacaacttatataaagagttgaaacagaaactattaaataataaagcacacggattagattttgatgactactactcactgttcaccgaaacatggcatatactcgatttcacacttgatcccaccgtatcacattataactcagtttatccaaataatagtgtttatacagttaatataatcaaatttgcgtagttaatataatcaaatttgcgtagttaattgtaaactaagtaattgatgaataggattgtggatatttgaattgtaaggtttcggtgtataataagccggtgatattaaatgtgagaatggagttgtggcgtaaattatatgtcaacagtaactcagaatttgaagttggaccggaccagaacatccacttgaaggaggttaaggataaatatttcctccctagaggggctaatcagatgagattaactgaggtggatatgaaggagtcgtattttatcaagagtgttaaaaattccatcaacgcaatattacacaaaactgaaggcgtttatgaatctaaaatccccgtcacattcgatttcatcagtaaaatcggaaccatgatcaatatacgcaattactctcccaataacggtatcttccacccacccactatcaactctttctatagttaacatatagttaacattatatagtcattctatagttattatatagttaacattatatagtcattctatagttattatatagttagcttggttatatattgaagtgtataatgtgatgtagtgttgagtgatgggatggagtttaaatcgaatagtataagttcgaacatatcgttgcaaacggttgatttgaattatttcagtgatttcaccgtaacattcgttcacatctttcaatccatcgataacgataccaaacgacggaataggtactactcacccattaccaccatacaatattattatacaatagtttacaatagtattatggtatgcaatagtattatattatgcaatagtattatggtatgtattcctgggtgtaaggaatggtttaggatatttgtgggagtatatagtagaggagatcaaagtgtgaataggatatacataggaggaccatcagtattaaagaaatatgatgaacaattcacagatatctcaaccccaatattacaaaaatataaggaaaaatggacacaatccaatgtactgattacagttactcagtcaacagtcatttttctaaatatatagtaatattatggtttaggacgtgattggccagtatgtgaatccgtatgtatttccagattgttttgggccttattataatcttgacattgaaggcctagatgcagcgtcaacagcctgtaaaaatacattaaagaaggttgactcataccttaactcactaagaccctcaatctccaaaaagaaacactttctatacatctactcctcagttgataaatccgaagtaatacaatagattatttatgtacatagtgatatagttacatagtgatggttgtatgatgttgtagttgggagaatggtcaagaggcgaatattatccggtgtattttgatccttctggtaaatcgcatcctcaaatcctgtcaaatctctttctcaagtatgatttacttagttaacctgaaacaacttatacttttagatcctcgtttgaagagtcgatatcactgctgtgtaaacactttagcgtatttgaggagaaattatcattatcgaggatttctgctattccgatctttgttctactctcacttaatacccttgataccttcaaatgcctatttgatgtcatgtattccagagctctcagactctccaatactgtaactcacaattaccccgttacttagttacagttaattttatttactcattacgtatgtagtttgatataattatatcatttattgatgaattagttactttggggaacgaatgagagtggtgtggatttgggaataacgcactcgaatagttcacattgtgactatgacatacaagaaaatgaaaataatttcgatttcacgcttcctggaatctatagatcatatggagcgaaaataacctttaatcagtcgataatgtacaatgcaatactgctggagtctaaaatgagcgattacacttttgatcaaaattaccaaaaaaatgatgaaaatccagaattagacctatactcgtccatctttcatcccaactccttcaaagtaactttttacccagttttatgcagttagcaatggtacctgtggacctaggctctagtcttaattttccatatttacacttaatttactttaatttgactgatagatacttggaacgatgttggagaatttgatgaatttgacgaatttggtgtaccagaaggtggattacgtcacttttcaaaatatcgtcaacatgtgcagttatctcaaatcctggctttcagatccaaccagcatcctatacgatcctgctctatactccatggtatacactatttaccttatatacctaatactataccttactatactacatttactatactatataactatactatagtaaatattattatacgtggagtatgtaaatttccataggcgatggttggaacaagacaatatttgatgagactgatgaagcaattattaataaagcataagctgaagactatccatgtggatccaacgtatataatagtccagtctgactgcataagtataacaaaggggagaagcagaattgaagaagcactcgttgatttagcctcaaatcagtcaaaatttaaaaacactcccttctacgtaaatttatacaattgtataatgtgtaggtggaagaggagtatgtggcgatggtacaaattgataagaacaattacataagatataaaaattacgtcgacgcatccaaagataactgtaccgaaaacttaaaagtactcgaattcatgccattagccgtcgaaatgttcatcagatagtatccaaacactcaacttacttctgcccagtcataccataccatttacactattatatcataattatcataattaacatagttatatcataattaacataattaacataattaacatagttaacatagttatatggtatttatgtggtaaatgtgttgaaatagttttatgaagacgataacgttggatccgttatggcgtagtttgaaatcgtattacgaggatgagagtggtgagacttcgggtgacggtatagagccgttgaacttggtgcgtacggatttccagcgcctgttaaagaagattcaggacatgataatccatgactggcaccagccaggcgcatacttttcaaggctttatgacctgatttcagacactgaaacctttactaaaacctttgataagaataataaacttgtcagaattgaatttcccaggttaccaggaaccactctatccgattccgacgactggagacttgaaactattaacctgctcctacacatcatgaaaattgataaatcactcgattggtccaatttctcactcatttcttcttttgacgtattcttactttagttatcagttttagtcatcagtttacagttatcacttttagttaatagttttagttaatattatgagttgagttaatatatttgtataggagaaggtgcacagattatatatgttaacgagtaaaagtgaatactgcgtaaatacgtggaaatcaccctcaaagtatcagattactcatcttatgtacacaactatgaataatgtgtagggaactggaattgaaatcgctgaggtgcggaaattgttttatggtgtcggatttggacattatctcaaccctctcatactcgcaaaatgatgacgactccatctcatactcctggtaatatccactatttatcacaaatataataattatataattattggtttaggccttgtaagatatgtttgaagtcgtttgataatgtgcaagttgaagctaaattaatacaatacctcgaaaacatcttctacgcatatcaagtactgttttactatattaatagttagatagttagtataattgggtatgttggctggaggaccaaactactccactgaccctccgagacctaaaaattttcacacagattacccttatatacttaatttacttaatttactataattagtgttacaatgtgtaataatgtgtaataatgtgtaataatgtgtaataatgtgtaataatgtgtaggctcaagattatgtgtgtcctgtgtgtaagagtgtgaagaatatatacagaagaagtaattgcacgtaagtctgattccacaaataataaaataatttgcagatgtggtaaaagatttaataatcgtttatcagcaagttgttgggagtatttttaattattgtgcatgtgtgtttagaaattgtttctcagtggcgtctgaaatagcccaagcggcaaacatgaaaaatctacaagaatgtctcataatattcaacgccctaatctaactcaaatctctacaacacacaatctacggtgtagtaataacttagtgtagtagtaacttagtgtgtggtaacttagtgtagtggtaacatagtgaattagtgtggtaccgtttcgtatgaaagattccattcgtgaggggaactgaagagtaatgaacttttaataattaccattgcgtggatcggttcaaacgccaatgagactatttccctacacaaagttactcatacggagttgtagcatgagtagttggtacctgattttattgcggtgtattttgagtagtcgttgttcagcctctgtgaactcttcattgtcagctcttctctgagcgttctcaagcatcattactccgtctaaagtgatgtaacttgggtgaacatacctaaggaggctagagtttcctcagggtcctcatgcggtggctaaaacataattactcaaattaacacaagtaatatttaattagtcacatgaatgttaacggcaaaatcagctaaatcttgtattccactcattacactattcctcacattctacaacaaatctccataccgtcaacaaaattaactatttaactatttaaatagggtaaatagggtaaataatgtaaaaatgtgtaagatgtgtaaaaatgtgtaagggcgtaaaaatgtgtaaagtgataccattccgaaggggaagatgttactttgttgatttacacatttggtaaaattaagtttagtaaaaattaatagaaaaaaatgagtataaattttcatttaaaataatttttaaattaataaagtaatttaactccccatccgatgtcgtttttggaatttattattcacacattaaataattaatgaaatttcatgaaattaattatatttttatatataaatttgttatataattttatatacaccagtggaacgagaattacccctggtgatgaagaatctaatgataaatcagtagcgtcttcactgtcaaggtaataatattactatagcataggtgttaataatgtgtttagtgatttgggtgacttatcggagaatgtgaacgaggtgactgaggaatacagcgaagactccggagaaacaggcactcccaaagaaattaaagtaaacatctaatctttttttaaccctgaaattaaaatttaggagaaaaaaataaggaaaaactaccaaaaagagtttgataaagactttctcgacgtagtctacacatttttacacatttttacacattttttaccccgttttacacatttttacacagtttttaccccgttttacacatttttacacagttttacagttaattacatagttaacgaattgtgtatgttaagtatgtaatttgttgtaggcggaaaaggtggttgagaagcagtataataaatatgtgaaagggacgtatgagtcactgggtaactgttggaaagtaatttgtgattagatttaatacaattttcatccgaacatttgaagagattttggtaaattcatgaaattacattaatttttcaggtacacaggacagtgcaagtttgttcacagtgttcctaatcacacatttaggcgtaactatactcttgaatgtcctaaaagtatgttaatactattttcatatgggtaggctgggtaaaagttgaaaatggctgtaaagcaccggaaaattacagtggcgagtaagtccgacacaacctcaatccctatagttgtgatgatttaagggatttttcaaatatgaaaccggaggagaaggaagatttcgcatggaggtttgagccacactccaaatctgttttaggtgtcaagttgaatggccttgcatcaacggtatgataatattattatacttgattagagatgccaattgatgagggattcgaatgcccatttgagtgggctccaatatcagattcactatgtctagcaccaaaggtatgatttatatgttaataattcccagacttatgatggaatatgctcaccaataattgatatgtcaactgtggacattagtaagaaagcgttttatgagtggaaatgtaatgtttacagtagctaagcatgtcataggtaaggtaaaatggcgtagaaaagtgaatctggcaagtgtaccaaatgagttgaaagagaaaataagtaatttgaccggaattagcggagtcatcgataacggaattatacacactctttaatattaatttctatagcagcataatagtgatattaatacatggtatataatattgtatgtaatgtgtttattatggtatagtagtcttgagttagatttgttattctttgtagttggtgtctgtaaattcgagttcttgtatcagtttatgcttaggtttagaacagcactggagtgctttatatgtttattggatcctggcagtttttcaattcctaaaatcgtatcaaatattttatttaactaaatttccagtaagttaaggtaatttaaggttaagttagggtgaatttagggtaaatttagggtaattttaggtctagataaataacacttaatacgctgtcaagtgtagtttaggacccagttactcagtgtacacagataatttagagttaattataattttctcattcttaacaatgatttattgagtgatttgagttaaaattagtttaaaaaaatttttcgatttttggcctaaaatgacccggacccaaaagtgacatttggttcccgaaaaaatgaaaaattttcgactattccgaaaattaaattaaacaattttaaatcattcatattgatgttttagacataaaactacctttttttatttctaaaagttgttaattagtatagaaaattaggttagattatgtactcgagcaccgtactatagtactattaactactattactcagctattagagcgaaattttccagttattaccccaaaaatagataattttggtttaaattattattaaattatcctaaattaagttctataaaatcacttttcaacctaacaaaaactagaaccttcccctaaattaacaaaataaacataaaattccttaattatataccttaaatactcccaaaactcttatctaaataactataataccaaatatttactatactttgtagttattactgtgccttgtttgggctggaccgggtcctccaataactatcagtgcatcactttcttaatttacataacccagtcctccaactattcaccacacttccaaatcaaccattactacactaactattattaactatgtattattactaagtattgttactacgtattattagtaagtattgttggaaaattaattattatgtggtttggacttgaattggtagttctcgatgtagtcgagttcagcttcggttaagttggctttatcaagtagcatttgtctgagttttcgctgtcttctgaccctcatagactcgcctaaatccaattattaaccgctaggtacctggcagaagagtaaaaatggcgtaacccgtgacgagaatgattaaaatgttagtaataaaactgccgggatcctccctgtaactcacaaaccaacggccacgcttatacggaccaaccttcaaattgttattcgtctgagctccaaccacacggtgacgccaggcaaatttctcatccctcacagtttcacccgttctagtatcaccagtagaattcgtagttccagagtttacagttctaaaattcgtagttccagagtttaaagtagtagaatttacagtacgagaatttgtagaagtggaaaaaagtctgtttgatgtgattttggtaaaataactaaaattcctcaaaacactaaaattacgaaataaatattcattacaacttcttaacattaataatacaattcttaataatataattcttaataataataataatataattttgaatgataatttgatggaaaattggtgaaaagtgtgttggagtggtaaaggataaatttggatctgggattcctcaggttatttcccatttttcatgaaaatcttaaaatattattaaatctaaaattattaaatttaaaaatgagaaattttaaaaatgataaattttaaaaatgagaaaatttgggattgatgagagattttaggattaatgataaaattcgttaatctgagtgcttgaattcggtaatgaccactggaagctccctcaggggttataccatcggaactactctaggcgtcggatctttcgccaaagtcaaacgtaatccaccactcatttactcttatttcactatatttaccttaattttaccatacaaatgttatattaataccttaattatgctatatttactcttaattatgccatactaatgttacattaataccttaattatgccatatttactcttaattatgccatatttactcttaattatgccatataaacacttaattatgccatataaacacttaattttaccatataaacacttaattatgccatattaataccttaattatgccatatttactcttaattttaccatataaacactatataaactcttaattatgctatatttactcttaattatgccatactaatgttacattaataccttaaagttactatataaacactatataaataccttaaaattgctatatttactatataaatactgtaagaagatgtagttggagtggataagcgtacgggaaagcaggtggcgataaagataattgacaagactaggatggcgacgatgggcctgatagggaagctgtcgagggaaataagcgcgctccagggctcttatcacaggaacataatccaactctacgatatcatcgatactcccgacaccatcttcctcatcatggaatacgtcgacggtaccttttactcaatttactctatttactcagtcaatttactcagttaatttggtcaatttagtcattttacttggtcaatttacttagtcattttgcttggttatgatgtgttcaagggagtaataatgtgtaggaggtgaattgtttgattatatatctcagaattcgaggctttctgaggttgaggccataaggatcttcaggcaaatactctcagccgtagatttctgtcaccgcaaaatggtaatcccaccaaatattcacccaactaatatctacccagctatcccaccaaatatctacccatctaccacactagtaaacttattaatctactggtgactggataaatcttgttgtagttgtgtcaccgtgatttgaagcctgagaatatattaattgacagatacatgaatataaagttgggtgatttcggcttatcgaatttcatgaggtagtttagctcgtgataaatttctcagggacggcgagtgtcttaagacaccgtgcggatcaccaaattacgcatcacccgaggtgatttgcggtaaatcctacgctggacctgaaatcgatatctggtcctgcggtattatcctctacgtactactctgcggtagcctaccattcgatgatgatgaaataccagcactattcgggaaaattaaactaggtacaatttacactgttttatcttactacttaagtatataaggggagagggagctactttaccatacccctagagggagctatttaatatatacccctagagggagctaattaatatatacccctagagggagctaattaatatatacccctagagggagctaattaatatatacccctagagggagctaattaatatatacccctagagggagctaattaatatatacccctagagggagctaatttaatatatacccctagagggagctaattaatatatacccctagagggagctactttactatactatagttagtactaatataataataataatactattgtgtgtaggaaagttttatgtgcctggtcatttaacgagtgattctcgctggttactgcagcgtatgctcgacgtgaatcctcaaactagaatcaccatgaaagagcttctgtaaccactttatactattaacacaattattctaatgatattaaatagtataattttttagatctcattatttactgtgtgggtttgatgcgattgggtcacatggtgaggaccagccgtacagtaagctgggcagaacattcccaatggagattatcgactacgtgaatcagaattatgatccagacccctttaacccgcacgtacaagttgaaacgcccaaaaccgtcttcacacttgataataataacctcacatggaccctcggtatcttcggcatcaagtccgaattcacttgcttcaacaaagtaatcaccaataccatatagtttatactatatagttaagattatatagttaagattatatagtataatagtgtgataatgtagatatgtgtgtatttggtgggaaggggatatgtgtggaattcgaggactgggtacagattactgtgtaagcaccgtgagaagccgtttagcttcgtgtttcagttatacaaagtccgatacaagacatatttgctcgacttgcaattgtcgtcaggacccttgttccgtaagccaataatatatataatttttagcgtgtctacatgaaggacaaaagatactcaatgatatcaaactcatactcaataattaatatcctaacaccttttatacacgtagaatagtatgcgtaaatgcttagaatagtatagttaatactatagttaagatagttaatatagttaatatagttaattagctccctctcggggtatatagtaaagtagctccctctaggggtatgtagttaagtagctccctctaggggtatagttaaggcattaggtacataatattctaggtacagtagacaagtataatagtgtggataaacctaagatattacttaataaggataatggttaggacattagggtattgtgtgagtatgaggagatatcttctgagatgaatgtgatgttggaatcgttgatgatgaacctgcgtacggtttggttaatgaagaagagattgagcctgtgtatcagcaggttaatgcaaataaggttcaatttttcatagtctgagttctcgctgaggctccagagtttagtgttttggtactcaaccatgtggcactcaacattaaaagtaataatcaagtcacagcttctaatgcaagtttcaaagcctgaaccgtcagtgcaatttccagtggaactgccagtggaattcccagtggaagtgtcaatgggattgtagttcttgtcataaaacttgaactttgccaagtctatgcccaggtgactgatattctcccaggtctgctcctcggagaatctgaataccaggcacttggaattgttaaccagggtgataatatactttgtgatgtcatttaccaccacgacttgcttggtaaactcgttgttttcagagctccaaattagtaaattcgactcctcggaggactctatgattttcgtaaatttgaacccctttttacactcaaatttactaatctcgccaaatttatagcaatttttatgcttgtcactgctgtcgttaatgtcaagagttatcggctttccgcttttctccaacggcttcgggtactcctggtgtgactccggccaactcgcatactttacccttttagactttggtatagtattttcaaggtaaagcttaatctccgtgtcgtccaagtcaaccgacaccgatttaccattcgtaaaacggatcttaatcgtgttcttcaccaagtcatatatcaaacacttggccagtattttttccctaataccatgtcgttctggtcccaatctgtcagatcccgagaatctgtcggaattggcatatctgtctgaatatctgtcagaattattaaatctgtcggaatatctgtcagaaattctctcggaaaatctgtcggcaattctgtcggagttatttggattggtgaagcagatgcaatacctgagataatagagtgagacagaatagttgagggaaatatcttgtatataattgtatacgctttcgacatcggttctgtacttgaagttgctgaggttaactctgttatcggtgatgttggtccagtttttactctttgtggaccatttgaagagtaggtaattataattcaccagtaggatcccgaggtatttcttgtcatttctgttatagaacgacacgtccttggcgcactcgaaggggttgttagcttcccaaatgacagttcccagtccgtcgttatcaaccgagtcgataatcttgttaaacaggtgattgtatgtggcgacgtagtttctgtagtagccggtgtttaaaatggtttcgaattccagcgcggtgtaccttgttttagaggtgtctgagcctagaatatcaaactcaaactcgtttgaagtgtagcatttgctaatgtcaagagtgattttatcattcctgagccagaggttattcttctttgcgaagatcctgaagtcgccgtttaccagtgataggcaaacttctctcgtctttagagaagtgccgaactttaagatttcaactgcgtagtggcttggattactcgcctcccacattaacactgggacttccccgccctcagaagagtcgatcagtcttctaattgcgaagcccttgtagcatctgtagctacgcttctcctcgtcctcggtgtaccggaactggtcagtggaagtctcagtcttaatgtccaggataatcggcttcagcagatgcaaatacttcaaactgtcgtttggaattccgttatttaacgccattgtcactcaagccttttaaactaaaagttaactaaaccacaaataaaacataaaattaaaagtaaaaaaattttaatcagaaattactccaacacacccttggcaaattttttagatccgcgccaaaaccctcacgtaaccaattataatttttcaaacacgttcatactttaaaactaatcccttttcacatttttcaattctttacacttttattctccgattcaaattttgtcaactgctcatttcgcaatttcggctctcaaatctttgaatttttttcactctgtctaaatattaatcagtaaaattcaggtaaaaataatttaactggttgagtagtgataatttaattggaataagtggattatacgttagtgtaaggcctgggataaaactgtttggccaaggtgtctggaaatcccgttccacataaaatttttagtaaatatttaataaaaagtaaagatgaaagttttagcggatccggagcatcatgcaactttgaggcgttccaagcccttgctgttcagaaaagacagttttgagcgttgggaggacgttacacacacggtacacaacattgaaaaggtacacgacattgataaactaggcgacattgaaaaactacacattgaaaaactacgtgacattgaaaaactacggttcattgaccgatacggcagagttagcacttaccgccactgtcggctaaaattactcaagctaatcctcaggatcattttcaaatttaagtataaagaggtcattttcgacaagagggtaatctggtccacctcaaaccccaaagaatacccaaaatgcctattattcgacctcaagaagaatcaaatgtacctcaaattcaatcaagcaaaaatcattaaactggatctaattgatccagttgcagacgccagtgtgtctgtaatgagaccacttgagtctggtgaaaaaacacctgaaatccccaaaagagcgctagaaaatgaaccaaactcagcccaaaacactaatgaacccaaaagacaagttaccaacggctctggaactacagcaacaattgtaacactaactgaatctgcagtagaaacttcaggtgtggaactgagtggaacttcgaaaactaatgaagagaacgtgttgagtgatgagatgttgagggatgagatgtcgagtgaggagatgtcgagggagaagatgttgggaaaggatcacgaattaattttggacctttttcaggagaactgggacgggattatagagtttgagggttacactatgactcgtcacggctgtaatcgtcgttacaaggccatagaaactatgatttccgactgcgccaaacgtctgagtaaagtgcttgacaattactccatcagagaattgctagtctacgcattagatttctacaagaaagagcactgcattgttatgaaaactgagccggggtacattgtgtataagctccaaggggacgtttgggatgagaaaaagtgccaaaaaccgccagtaatcttgctgctcagggccaataagtatggtttcgactcactaaaggatgaccagtacgatgttgagttaacaattgtaggagggatacaatttgtgtttagagtaaaggaaggtgtaaaatgtgtcaaggtactgttaaaagaggagacagtctgggtaaatccggtgaatagtacagagtcgctcaggactctggtgtataatttggatgacgggactattttagtcgagactgacaggatattcaagtgcacaaaaactgatgggaattgggtttcaaccactcagactccgttttatctaagacactatgccgacgacgggtttggagactttgtgccagtttacattgagaacgtgaggaaatccaagtttaacccctttggatacactgtggattacacaggagtgccgaatattgaactcgtgaaatattatgaggggaacatttggaagcatcaactgggcaaaccctttcccaagagcatgacatttcaaaaggacaactctttaaaagcatttgcccttaaatttcaccggaaattcatcgtctacgaaataggccagacattctacaaacgttaccagattgacagttccactgggaatagttccactgacaatgatttgactgggaattgttcagatgtgaatgatttagatgggaataattctactgggaatgatttagatgtgaatggtttagatgatgatgtgtatgaccattacattccggatattacgttgtttactggtgatgagaatgttgtagagcttgggtctgataactatagtttagacttttcaaagcgtgacgattttacgtttctttacactattagccctgaggtgtcctgtactgagatcagatgttctaattctccagtttggacgaggggacctggcgagggaaccccggttcaagtttgttacaccgagcgagatgaaactcttacagttgcgttcgaggacaaaatacttttcatctacggtgaccttctggatatcgtggatactcaacaactcccgcctgagctaactctatacaaatctcatgaaaaaggtgaactcataagactaaacgctcgtgattacgtaattcagaagtatgattgcgagggattcgagtatgtgattaaccagtacgttgattgcacggagttaagacataacgggacagtagtttggaagcacagggaaggtgaacccaggaccacatcgttcatttactggcccaagaaaactatctgcgtcgttaacaaatgtggaaccgcgtggtataaacccaaactcgccaaatgggtactaaccacttccatcaacactctataacacacataatatacatatatacataatatatattatatagtattatgtatattatagtagtagtaggtgtctgggtttacggctagtaaattgggtgtatattacacagggtataacaactctattatatcttatttaagcttataacaacagcgttaagtggtattaagtgttaaatagtactgtaatgagtgttatcttactgtatgcccaggtatataatataccctagtatactcctattactatacatatactattatacatagtatatattatatatagtatataatatatggtataataggtatagtaagagttgagtgttatagacagtaaatcagtcgtataaataccatagtataccaggatattggggttctaatatactatttacagtgttttacaacggtatacaagagtgtttaggagttgaaagtggtcgtttaggccttaattcgtaccatacttatatactaatatatatactactatattatatatagtatatatatagtagtgtttagtatatttatttggttttaatggatttgtgaaacttgagaagtcttgttttactgcgatttgagggctttgtgttcagatccacctttgggggtgttgagaacccaaacgcctttgctactcgcttcaaatctaacgagtgcacgttaaatatatccttcaaactatgcgacatgtacgcctacaaaatatcaacacaaatttccaacacacgtaacttattaacagaagtaactggggaaataatactgtagaataactggggatggtatactgtagaatatctagggaaatggtaaacagaagtaactaaggggaaaatggtgaacaaacgtgtagataagatctgtatgcatctttggaggatcgattgagatgaaagttcttttcaatgagtttttcgagttgtacttgtacgtttgcgattttgttcaggttaaattcgtacttgttgatggtgacgtttagtgattttaggtagtgcaggaaccccaactcctcaggcattaggaataaaatcgcctttcccttaccctcagcgccacgagccgttctacccaccctgtggatataatctttcggatcatccggaggatcatactgcactatccagtccacctaatacaaatttaacttatccagtttattcattcattaatttagtttattcagttaactcagttagttttagttagttaattcagttggtagtgttgtataccttaggaatgtctaaacctctagcagcaacatcagtacacagtaaaatacccttctaaaaatcatatcaaatatactcaactataccccgagagggagctaattaaatatatacccctagagggagctaattagagaagagggagctaattaagtataaactgtgtaatgtgtggttacgttggatttgcagaatgtgtagtaggtggtgagtctgttggtttgtttttttctgccgtgtattgacttgacgggtatgtcgacgtagtttaggagttcgtcatggaacttgacagagttgcagctgctgaaaaagaccatcaccttcctgtccaggttcttcttcagaaatgtgtacagtaacatgaacctgttctcagcctcacataccacataaccctgctccaacccactcaccgtcgcactctcattactcatcacctatcacattattaacactgtaatttattatatatatagttttactgtatataattaagtatataattaagtatagtagattcctgggatagtactagtaggtgattcccagagtgtaaatacactcataaaataactaattactgtgtaatctcgtaaaataactaactataaaatgtgtaaaataccataaatagtgtgtaaatactgtaaaaaagacacattagtgtcgaaataagacacgttagtgtgtaaaatactattagtgtgtgtaaaatgtgtaaactataaaaaatgtgtaaaaatgtgtaaatgagtaagactgagtaaagaatacttcgaggaacacgggtgccttgagtgagagtctggcgagatcctcgacgttggaagtgtgtgtggcagagaataaagaggtctgcctattttttggtaggagtttgataatttggttcatttcctgttcgaatccgatttgtaaaattctatccgcctcgtcaatgacaaacaccatcagatttttgtacacaaatcctttagtattttgcatgtggtccaggagcctgccaggcgttgcaattaagatattaacacccttgcagagtttaaactcttcttgttttcgatttgcaccgcccattaccagccccagggtctgcggtaagtacttgcaaacctccctggcaacctcgaagatttgtaaacttaactcacgagtcggggatattattaaaccgccagtaccgttacgaggcaagaacttcacctgatataacacctccgccaacggtatcaaaaacgccaacgtcttacccgaacctaccaatcacacatatttatataataatttaattgcattttaatatagtaaaaataattaatataattaaattataaatagaattattatatataaatataattaaattataaatataattattatatataaatagaattaaattataattaaagttattatatataaatagaattagtgtgtgatatggtaccggttttggctttgccgagtacgtccttgccttggaggaggggagggatgcatttcgcctgaatttcagtagtcttcgtaaagttattctcagtcaacgatctgagaatcggctcagataactcaaaatccgaaaataacatacccgaaaaatacttttccactcctccctctttcttctcattcttatcattgtttacattgtgaatattgttgatattgtttacattgtttacattgttgatattgtgagaactattatttgtgttatttggagagttggaatcacgtgctgtggaatcggccattttaacattttactaacaatttaaacaattaaaatttattaaataaaaatttactaaaaaattctataatacattaaaataataataaatgaaaataatagtgagataaaatttgttatgatgcgcacaaggtttggtttataatttataatttgtggctggaaatggcttttggaaaaagggaggataatttcaggcccagttccaggaccagaaataactcctcaaacccaaacaaatctaaccccgaacctctcagttccagttccaataataataatttgagtaataattcgaataataatttgggtaatgtaaatcctgatgaagatttaaggagaagtaaacatcgcaatttttactctccatacctcaattctcctaattctcctactattcattccagtagtaatacctctaatactactcataccactactaatccctgtaatattgttcaggacacaaatcaccctgtggaccccgttaacacactggaaaatctggataaaggggaaaaacaggatgacaaaacgttggaaaggaatgtgggtgagagggtgtggcgttacaggggcagggaactgtctgacgagcgtaggttagtgattttagtgcgttgtttagactctgatgtgactgaggagcatatcgagtctgtggtatcagaaatcgccattaaaaacggcttctccacaccaaactcagtcacagtcgcctcattccacaccaataacatctctggagaactaaggaaagttactcagaatatcacacactctgttcccactttgcacactgttccaactgtacactctgtacacaatgttaacactgtcccctctgtgattgagcgtgtcggagtcgtaaaattcccgtcctccagtgccgctgacaggttcatgtcagccacacgcaaacacatcaaaatcaactccagggactaccacatccagtatgacaattctaactctaactctgtggacactgtggacacagtggaaaacacagtaggtgagagaatagagttactagaggccatgtcggatgtgacgagtttgttggagaggcggaggttgaattcagactggacgtgtccgtcgtgtaggttcctgaactttgcgcgtaggctcgtgtgtctgacgtgtgggttaccgaaacccaccgacgaggaggttgagatacaaaataaagccatagaaattgaagccattaaccaggccaagatcctacaatcgagcatgtcagacttttccccatggcttatcgtgaagaacttgacacactccagtgatatccacaagattgtcaacactctcaacacaatcacaaactctccaatcctacgcgtcatacacatcaaggattcggacgtccccagtaactcaggtaacactagtgatagtgttaacagtagtaatactagtgatagtgttaacagtagtaacagtgtaaacagtagtaatgtggtaaacactgtaaagagtggaagaggatttatgtttgtggtgtatggaggaaatgaggtggtggaggagtttgtgcggttgaggggtgtgaggacgtttctgctccggtgtgacggcgtgtatcacagagtcgacaccgtcaactccagagagaaacacgccgccgaagaactcttcaaacgcatcaaatttatctcctccaaactcaccatctcttcacatagtttacacaacttacacactacagagagtatagaaagtggtaagagtgtggagagtgtggatagtacgatgataagaatgagaagtacgacgttgggtatggtgtggtgtcagttgtgtgtgagtgatccgcatggaatagtggagaggtacataaggagttggatgtcagagtggatactggtgagttctaagcctgacattggtacatttcagtatgatccgagctctgactacttgtttgatcatagtctctcactcttttacgacgccgccagcgggtacttcctctcacccactggcaactttttcatttacaatccacaactcaacgctctcaccagagttaccaacgcagttaacgcagttaacgcagttaacggagttgattgtggtgatacaggtgacacagtaggagtcacaggagttaacagaggagttacaggagtagacacaggagataacagaggaggaggaggaggaaatacggtgggagtagggggaaatacagtaggagtaggagtggtggatacgggagtgagaaagatattgcgatctgcgatgagaatagcaaaggagtctcagaataacattaagcaacttagtaacatacagtcacacagcgccacaggtaatacacttttgttatcacgagtttacagaatttttcacttggtaattttttcaacaaatttaccataattagatattaatttagccttatttaacctataatataccatatttaaccatatttaagctataatataccatttatagcccttaaattaccatatttaacccttaaattagtatatttaagctataatttaggcatatttaagccttaaattactataattagctataaatttacccgtatttaagccttaaattagaatatttagaccctagatttaccatatttaagactaaatttaccataattagctataaatttagccttatttaacccttaatttagcctaattaagctataatttaccataattaaccatatttaagactaaatttaccataattagctataaatttacccgtatttaacgctaaaattagaatatttaagctctaaatttactatatttatcccttaaattacgatatttaaccctaaaaatcgtatatttaacgctaaaatacaccatatttaagccttaaattactataattagccctaaattacgatatttaactataaaacatgtaatgaatgtgtagagggtatgaagagtgtaatatctagtgacaaggggaatgagctaaagagtaaaaacgtcagggagagattcgagttcaaaaacgaatccgacgacgaatgcgacatggacctcgataactctaacacaaccacaaccaactcaacaaataacaataagaatgataaaaatgtgaggggtgtgagttatgagaggggattgggtgtgggaagtatttgttttgtttgtctgcggatgtttgacagtgtcgagaatctccactcacaccagcaactctccaaactacaccaaacactcactccacacaattaactcaatcttttcatcaaaattattttattttttaaattatttatttaaaatgagaaaaattattatttatttgtaaaatttgtgaaaaaaattaaataattgaaaaattgtgaaaaaattgaaaaattgtgtaaagatgtgaaaaattctaaaattaataaaattagtgaaaaaatgatgaaaagtatgtcgatggaggagatatcggacttgttggtgagtgagagtgtgtcggattccgtaccgtcagaagatgccctggtgttaattttggatttatcgcctgggcgttggagctctggcgttccgctgaggcctgaggagcctgaaaagcgcattcacttgcataacttcttcacagtactcgccaacttcttaaagctcttcgggtacatgtcagtcagaaataaaacactcatcatcacagccaataatcactcaacgtatcgaacacacagttacacttttacacatttcttacacatttttacacattttttacattattttacacattttttacacattcttacacatttttacacattcttacacatttttacacattcttacacattcttacacattcttacacattcttacacattcttacacattcttacacatttttacacatttttacacatctttacacagtagtacatagttactgtcacacagtttactcagttagattaatcagtagtactcagttagatcagtggtagatatttgtgtgtggtaaggttgatttgtggattaggaggatattgtatgagggttttgtgtataatgactggacagattcttgtttcggcgttaactcctcagtttatacaaattcacaacattgtgacacagacagaacgggtgagaaagttgacaaaacgttgggtgtgatgtggaataagatgattgactttattagtgagggtttaacgtatccagacgccgacacgcaactcacctcagcaatcgccacaggatttctatgtatttacccctaatctaggctttatttagctatttttaggcattatttaggctttatttagtcattatttagggatattttaggcctaattaagctatttttagtctttatttagtgttatttagtcatatttattcctgttttagtcacaatttagtggtaaatttgctggattttaggcagtttttaggacttaaacagtcctatttcaccctaaattaccattaatttacccttaatttacccctaaaatacccttaatttacccttaacttacccctaaaatagttatttttacccctaatttgacagtgtatgtgtagacttgaacagaataaggatgaggaacgagggctacggaaggaagataataatatttgacgtgtcaacctctgaaaattacaaatcgcagtacatcggactcatgaacatcgcatactccgctctcgcacaagttctttcacaacgttttatcattcttcagaacattaccatcaacaccttcgcactaggacaaccctccgtacattcacataatcaactagttattcacattttttactagttatacgcatagttatgcatttggtagtggataagtttgtgaatggttggtttagagaattttggagcagttgagttcgataacgaggggaaagtatttgttagtttccaaggtgctaaacttcgatttaaacttcagtcacatcaaccaatacctctcacaactcatcacagtaacaccaattccattagtcaactaagttaacatgttgtagttttggtatttaccgtcggaggggatgagtgagctgctgtctacgaatttatcgtttgattttgggaacgttggaatctgctactgccactacaaaagcgtcgacgtctcatatctatgcccctgctgcttcgcaggtacctctcacatttctatactagtcacatttcaacactatttatactattaatattaacattatactgtacatgtggttgatattgtgtagtatattgttcggagatagatgacaaggggaagtacaggataatatgtatggtttgtgggtgagtttggtggttagattgtgtggtttaggtcaagacttaccaggaaactcattaaacaaaaactcgccaccgaagccgatttctccaaactctaatctcactcactcatatattatttttatattatatttatgttatatatttgtagttagtgtgtgtagtgtagtttgagggggtttcttggggttgttaagcctagtattacacggttatatgacagtgtatagtactgttaaggcttctaatatagtgtttaaggttataaagagagtattaagtagtatagactattttaattataccatagtaatataccctagtatactcctactactatacacatacatatatacatatacaatatactatagtataatatatatagtatagtattataggtatagtattagtagtatagttaggtatagtaatatactaagtataatagtattaagggtattagtagtatagtaaagtagttatagtattcttaagtataggtatagtattagatatagtattatggtataggtactaggtgtctgggtttatgtattatctatagtatagtaccaaatatagtataggtataaagtattagtagtacaaatatagttaacactatagttaagctgtaggtatagtatagtatagtatagctaatgcctgggttttctagctattgtagtcagtctagcaccaatactataccatatactacattactacatactatagtactaatagtatagtatactagtactgtgtgtctgggtttaaaggtctaattgggttattactttgtgtataaaatactaattataacacaatatgtatagaatttataatattaaacgtctccggtgaagggtagtacgagttttttcccgtaccactttgacttagcgaagtagtagaaaaagtccacgtagagcgccgtttgtatgagtcctgcgacccagcagataatgcagacgtacggcgggttttcaaagaagtagcgatagacccaattgacaacgtacaatgccctgtaaagtcccatggtagcaacgtagtgcgacgttatgttctcaacctcacgctgctgatacaacatcgttaactgcggcaatatcgccacactctccaaccatatcgaatacgtccacaacacatcaaacaccttgtacgtcttcgtagtcaacaacgttaacactacatattttcaactaatataactaattattactaactaattagataagtaattgagtaattagataattatgtgtggtgagtgtacgtaggacgggtcctaggaggtatttttcgtaggagaatttatcgattttgcggttgtaggtttgagagatcgggggtttgaagcgaatgaggtaaatggaaaaggaagttatcgtaataaacaaaaccttcatcacagtgttatacacacttataaagtataaaaataaatcaacatatctgaaacaatattaacaattaacagtaaattaacagtaaattaacagtaattaaggaatatttgggagtaaatttaagataattaggggtaaatttatggtatttagagatattttacaggtaaattaggagtaatttaagggtaaattagtccaaaataaaggctaattaagaggtaattaaggccaaaataagactatttaaggagtaaattaggggtaaaaatgagtattttaagacttaaatagctttaaaaaagtgttatataaggccaaaataggaataattaaggactaaaatagagctaaaatatggctattttagcctaagttagaggtaaaattagactattttaaagcttaaataggaataattaaggccaaaataagcgtaaaataacaataattaaggccaaaataagcgtaaaataacaataattaaggccaaaataaaggtaaaataagactaattaagctaatataaggccaaaataaagctaattagtgggttaaaagggtgaaaacaacctgcagatgaatacgatgaggtagagttcctgcattctggctgagattccgaggcagtttttggaggttttgagtttccagatgagtagcagaagactgaccacgtggcacatgtcgccactcaaacggaacaaattcatagacattttacaaacaaattataaaaccaatacaaaataaatttgagaagaaataataaatttgcgaaaaagtaataaattcatcaaaataataaactcatcaaaataataaattcaacaaattgtaaaatcaggaaattaataaatttgggaaataaaaactgtggaattttagggaacttgttccatgttagagtaactggaaaataaagctgagaatgtgaagccagacaacgggttaaaacacgccaagataaattaaatcaccaaagtcaacgttaaagcaaaaatactttctaactcgcgctactacacctcacccaacatcactcctacacattctcaatcacgacactcttctacacaactctcctcattttctcactcatttttacctaatttcactctttttcattaattttacatattacttataattttacaattatttatcaaaattccaattaattggggaatttggatgaataatgtgaatatatttgggaatgtatgaatttgaggagattaaaatgttttacttttagttgacatttcttctaaaaactccagtaccggcgctataaaccacgacgacggcctcaatcctacaccaatccaaccattacacattgttacaacatacaaatattattatagggttaaatatatataaaatagtgtcatacagtgttaaatagtatgtaaatagtagtataaagtgttaaatagtatgtaaatagtagtataaagtgttaaatggtatgtaaatggtatgtgaatggtatgtgagtacctgagaggaaggtggaataaccaccggtttgtgatacatagtatacaatattcggattcctacaacaaatttatcaacaaatacttctaaaatacttctaaaatatgcttaaaatatgtaaaattagctctaaataagcctaaattaagctctaaaatatgcttaaaatatgtaaaattaagcctaaaaatggctaaaatactactaaaattagccctaaaataagcctaaaatacagctaaattaaccataaaataagcctaaatacctctgaaataactactaaattaaactaaaatatccctaaaatactactaaaataagcctaaaatagcctaaatgatagctgagactgagtaattggagagtaatctgggtttaaagttgcgaagaaaaaacagcagcaagaaaaaaaaattcgctctcggaccagtctactccattgaccggtcctcgagcctcctcaacccaccccttacagtattactatactattcttaactacttaatcattactcaatactattatttacttaactatattattattactcaatagtattgtaattacttaatagtattaatacttgataacatcgaagatatcgatatctttgagggtgaagattgagttatcgagagaatacaatagcagtgtgggtactttgagtgactctaaattgtctctgatgttgcttgtgttcctggtgtattccgagttaatcaagttggtaatatatttggtcaccttgtaatcgagcattttatgtaccttggccagttttctcctggagaaaactgatttcccaatcctcaaatttgtgttcacagttttattaatacacttgtaaactgggggttcggatatgtgtctgaccttgatcttagaatcttggccttcacgctcaaacctgtgcttcacagtcatgagcacagataacttaaaatcagcagttgtacggactccacacttgaacagatattcaccgtagtccaggtagtctaatcctcttttaaccaaatccctataagagtgacggtattccctgtgtaaactggtaatcaacttctctatggagtagttgtgtgactttcgtttccgggcagtgaacttgaacatgtggtagaacattttcttgacagggttaaacttggagacaaccctgttaaagtgacagcagttgaagttgttacactccttggataatttattattagttctgtgacagtgcacagagtttagtaattgggccaactcagacctgaacctggatagacaatatcttttatacatagaacgtctactcttacgctttgacaagttgtatagaacgttacttgataatttaaggtttgggtttatgcaaactgcagctgatatgcgctccgggtttaaaaacacttccctagcctcctcagggtacacagtcttaatatccgtgttaaactcctccctacccaaattcaacataaaatgatcatcacatatctcattctccacacccactaacgggttactcacactactattcaatggattattcagttgattattcaatggagtattcagttgactgtgtgtgggttgagagtgagtattaatttgaatggtgtcatgtgtgagatgtgtgtttgtgttttgggaagttctgaagaggctgaacttgcgatttctgaatgatttttcggtgtttacactcttagtaccgtctgacatcacacttctactcaacctcttaccccccaaaccactcctaaacatatcaaccgaattaccaccgttaacattgttaacagtgttaacagggttaacagggttaacagggttaatattattagtattaccactgtgtgtattagtgttagagtgatcaatgatgggttgtgagaagctatcgaatgagttcccgtggttgagagtatctccgaatgggcttgaggcaattgtgttgtgtagtgaatgatcattttcggagtctgagagtagtttaacggctccgccttgtgctgagactgtcatgtactcgaggagaatattagcgccaaatgagatgccaacggctaaaattggcgagtttgggaacctctgagaaaccttgtcaagtgccgaatttaaatccaacaacacatcgctgtaaagtgagattggaaatgacctgaggggaattgactctggaaaagcctcacaggccatgcccaaattcacattcaagtgtaagtgtacgcagacgaatccggaccgtagagcgtcactgacaagtgacctaagtgtgggaaatccaggatgctcaagactgtagccctcgtggtctaatttatcactttcattacaagagtcacactggtcacgtggctcaaaaggtttatcattacagtaacaacctaccctggtggaacaaatacgatatgaaatgttcatgtcaccaattatcacaattacaccccgaattatcttcgggttcgggccgtcctcatgaacattcctacaattgtcagtacaataagtttagctagcatgtttatacagtaaagtatagttaagtagctccctctccccttatgtagttaagtatgctaaagtagctccctctaggggtataaataattagctccctctcgggtatataattctaggtatatactaagatagctccctctcggggtattagttatggtatagtaagatagctccctctccctctcccttatatagcagagtagctccctctaggggtatataattatagtatagtaagatagctccctctcggggtatagttagggattatagttgtatacctatcaagtttgtgtattgtggtatcaagtttatcattgaatttacaatagtacggatcaaatctctccgaactttgatgcgatatcaccggtgacactctattactcctgtcctccctcctattcttcatatcttctcttctattcttcataatatcatttgtactattcttcatatcttctcttctattagatgtactattagacgtactattcttcatagtatcaactgtgtgagaatgagtttgatgtataattggcgtatctgtggaggtgaaggagggtgagtgtatggagtcttcggagctgtaggaggctgagcttggagaggcatccgagtcagaattaacaaactttgaattctccgaatactccatactctgaatcgtatacatcttaaaatactcatccaaattacgcctaccaactctactcctctctctcacactctctttcacacttcctctcacactctctttcacacttcctctcacattatctctaatactcctatctctagtattatctctagaactatccctaccactaccaactctactactattaacatttctactactgttaacatttctactactgttaacatttctactactgttaacagtggtgtttggtgtgttggtattgtgaatgggatcgaagttgagatcattgtgagtgttatgagtgaaaagagaacattgttcacactgtggtgagatccacttgggtaagtaccagtcgagaataacaatggaagagttatgtccttctacggcttctcttaaacttatgattggctgggatttgaagatttttttaaagaaaaaggagtttaacaaaaatttaagtaaaagtgtaaaaaagttataaaccaactttaaaaacgataaggaactttgtagtcgatttttatacagaaatgatttgtacaacagttccaggcggcagtagatgagtaggaaaagccactgcaactttgagctaaataagtatagcgtgggtttataagtttttcctacagatttgaacttgttaaggagtgagggtaagtctggcccggtgtaataggcgcaaacaggcgaaacgcagaaaatctcgtaataaagccagaataaaaaaactgaaataaagcaagaatataatgggaaagtgtcattatttatccatttggggaagagtagtctgtaattccgacgtagtaaacggaggaaacggagattatacccacggttcaatatctccaaagcgtaatatcttataccaaccaacattctcacacatagtaagatcgttaaaaactattttacaccagttaaatccattaaaatagttgaaattaacattttacgttaaatttcatattaaacgagaatttaaaattaaagtttaaaaattgtaaaaattaaatttttcctttttaaaaatgagattgataaaataaaacaaattaccaacagaataatgctatggtgcttgaaaatgaatttattttaaaagttaagaaacaattgatgataaattttaaaaaattaaaattttcatttatttttcttttagtttgagggaaattgatttaaattatggcctggttcgtttaatttttattcttacacagtaattatcgtttatttttgtgaatttggctttgtggctgaaatttgtgtaggaattttttaacgggtctttttgacgggaatagaagcaaaggtgttactttctacgacgataaacttccctctccgccttcctgcggaggattagtaccgccgccaggtatcccaaactctttaaacttgctgtattatcccttcagaacccccgaaaacacttaaaaacaaatcttacgataaatctttcgatgccgccaattttgaattcaaaggcttcacaccgccgcccaaatctgacagtatctcaacactcataacattattttatctttatttacattattttatctctatttacgttattttacgtaattttatcttaacttgtttgaatttgtttgtaggtgatacgaattacgattctaaggattattcagatttcttgtaccacaacttagttaactaaataactaacaatttgttaataattgttagattaacggataaatcgaggagtttgtataataggccgtcggagattgttgatagattattcaagagtcccagggctaagaactgttacgagagtataaaactgggctggaaaatggtaattacgctatgaattaactcatttagggcggcgccgttggcggcattttcggcactctcaccggcgtctacgccgctctcaaacatcgcagtctcgtcatcattccaatctccactgtatacaactttctatactctctatactatttattctatttctatactttctatactatttctatacttattgtattactgttgtgttaatttgtgtagattggaggtgcagtgagttttggattttttctgggtaattagcgggagagttaaaattttttaggctgcggaatgatcgtcagatgttaattctcactaatgtactaactacaatgttttattagattagttattgggttggttaggtttaacatcttcttgagcgatggacttgagtagtgtgtcgactttgtcgttgtttagcatttcaacaaagggctcaaattcgccagtctcgcccttggacaggacgccaacttcgattttatccgcctgcggcgttgaagaatccatcgccttcgtcaacactcgtatcgccaatctcaccgcctgctccaacgttaaatcctctttccactcctgtacaacattatattagttattgtgtaatctacgtaactaagtgtgtgtgtaaagtgtgtaagaatgtgtaagtgtgtaaaaatgtgtaagtgtgtaaaaatgtgtaaagtgtgtaaaaatgtgtaagtgtgtaaaaatgtgtaagtgtgtaaaaatgtgtaagtgtgtaaaaatgtgtaagtgtgtaaaaatgtgtaaatattgtaaaaagtgtgtgtagaatttgaatacttgtttgagaatggattgtgcggattggctgttcattccgatagcggttgctttccagccagagtaattcccggatgggtcggtgtggtagagttggaaccccaaattctcatcccagcccccaaacaaaaaactcacaccaaacggccttaaccctccaaattgcgtgtaactctacaaacattaaatattacacagttaaccaagtaaataatgaccaagttaaccacattactaagtaaattactatgttaaccaagtaaataatgactaagttaaccacatagtaatgagtaaactaagtgaatgggtggagacttgtttgagatcgcagatttgtatgatgtgttgttcgatggattgtggttcaccgtatgagtatcgatgtctttgtgcgtataatttgcacatgttgatgagtacgttggcgtctgcggtgagtcctgcgaccgcgcagaatatgtgcgagtcaagtttgtacagcttctcattgattttcccagggtcaagtagtttagagctgataggtttatcagctaccaggacaacgccagaactgcataaaacgccaacggtaagactggcattatttatagcttcaagagcatattcaacttgatataaacgcccttcgggagagaaggtcgtagtacgagaatcgtaccgtctggacattattaattaaaaaagaatcatttaattgtaaaccgaggactgaattggtaaaaaattattcacaggtagttaattgcacaggctgtgtcgacaaaataacatactttataccaaatggaataatttaaatgatttacaagaggaattaataaatattaataaataaatattaattttataagtattaatttacaaacccccatctattattgtttatatcataaatttaatacatttttaaaattatttttagtcaaggaatttggaaattttttacaccttcctgcaagttattgtaaatttttcggttaaataagttttaaacatacgaaaaattgataaaataattattgaaaattacaaaatattgttgaaataattattgaaaattccaaaaaattgctaaaataactattgaaatttccaaaattgtgataaaattgtgataatgagttatgatagagcgataacgatttttagccctgacgggcatttgatgcaggtggagtatgcgatggaggctgtaaaaaggggcgggtgtgtcgtgggcgttaaatccaacgacgccgtagtcatcgccgctgaaaggaaaagcacaaccaaacttcaagatcccaggtagaatcattccaccttacaactgtaaatattatttacgtaggtgtaataagaagatattacaattggatgagaatttagccttggctttcgccggtcttaacgctgacgccagagtattagccaacaaggtaattcacctagccattagtcgtgagttgacaatattactattttgtagacgagattggagtgtcagaggtataagcttaatatggacgaagccgccagtgtcggatacatcgccaaatacatcgcaagattacaacaagtttcttctcatacccttttttggccttaattacctcttaattagctttattttacccttaatttacctctattttagtcctattttaggcttaaaatactcattttttagtcattttagctctatttagtagtaatttatacctattttacgccttaattaccccttaattatctttattttacgccttaattaccccttaattatctttattttacgccttaattaccccttaattatctttattttacgccttaattaccccttaattatctttattttacccttaattagcgttattttacgcttattttacccgtatttagtgttattttacccgtaattagtgttattttacgccttaattaccccttaattatctttattttacgcttattttggccttaattattgttattttacccttaattacctcttagttacctgttagttagctataaatgattaatatggtaataatagtgttgtagaaatacacgcataagggcggtgttcgtttgtttggggtttcgttgttaattgttggatttgattataacgggaaaccggcgctcttccaaactgaaccctccggaatctactcatcctggaaagcacagtccataggcaaaaactccaaagtaatttctaacccatttttactgttatatatacttttgttctcccctccgggaggactatactttagataaatagttaaatagttgtatagttgtatagttatatagttgtatagttaaatagttgtatggttatggtattgagaatgtgttagcatgtgcaagagtatttggagaagaattacaaggatgatttgagtagtgacgaggcagtgatgttggcggttaaggcgttgtttgaggtggtggaggtgtcggcaaagagtctggaattggcggttttagtgccaggaggcatgaaaatcctggaggagtccgcgctcgaaaaaatcgtagaaaagttaaacgccgagaaaatggaatcagcccaaatttaactccgggaaaatggaatcatagccaaatttaacgctgggaaaatggaatcatagccaaatttaacgctgggaaaatggaatcatagccccagttaaacgcttttaacatcagtaaaactaatttaataacttttcatgataaaattaatttatcaagggtaaaaattggatcttatgagccctcactacagggttgtggtcactataaatttcacgtaaaagttgaaattttttccaacttgttgttaggaatgagattgtgttataaatgaacagttgatggaaattgttagtaaaattccagtccctgacttaattaagttagagtcctcgctatgcttcggactaacgccgtttgaggtgcttagaaggcccagaactattgattttgagagttttgagcactttgaaacgactttaaataactctgggcttcgagaggagctcacctgcgcaatttgctccgggatcatctcgaaatgcgtcgtcatcaaaacttgccttcacagattctgctcaaattgtatagaaaaatgcgtccgagtcgggtaatctcgtagatatttcagcttttccattttacacgcaaattattcacatttttacgcccagcgcccctagtcacatttgtattaccaatttttccgctaaatgtttaatttatatggaaaatttcatgtgataaaagttaataatttgttttagcacgagaggatgcccgaaatgtaggaaacacgtgccatctcgaagattcttcaggaccgatcccatctacgactcactaatctcaagaatcatcaccaacgtcgaggtaactcaaattaatcatctcattccactcaaatttcaaatattcaacttaatatccatttttaaactccaatttcaatattcaaccggtgataaaaagtgtgtaggtgtttgaggagttgagtgatacctttacaatggctataaataaaggtaagaatgggcctaaattttcattttagggatgaaaaatgatcccacaattaatacaattcggtcaaaatacctcaacgagaatcccaccattcgcatcgatcacctcaaacaaggttccacacaatacaataatccccaagatatttaccaattatctatactatgcttgatttggccctgatttccccctccgggggacttgataccctaaccaatactcaataacttaactaatactcaataacttaactaatactcaataacttaactaatacctgagatatttatactactgtacttataacactaagtgatatgaatagttggagaattgcatgagggagatttttcgttggagagtaagtttgataataaggtttacgtgcgggaggtaaaagagaaacgccgtgaagtgttaaaattaatgcccaaatcgccacattataccaaattacccttcaaaatcatctccgatgatacactaccgcaaatcataccaaacctcgtttctaccctttttttactcttcttagttattctcttcttagttactctctccatagttagtgtattatagttactgtgttactgggttgtatgtggttaattttacgatttaaaaaaattaatggatgaaacagatgagatgtgacggtagtgtaacgatatatcaattatacttttacgttaaatcggcgttgaagctgagtcggaattcaaaaatgtgtatatacttgaaggtaattcctgattatctacgttttttcaggaccacgatttcataccctcactcaatgtcacactggcactcttaagaaatatcgttagtttccaatactactaactattagttaatcatgataaagagggtgtaacaaatttttagacgtatacgatgtcgcatgagatacttaatatatattacggatcatgtcacttgaaattataaagtgtaaatgttatcttgtatatttgttaagctcttctgttagtgattgtatgtgtttaattaacgtattgtacattgcacaggaattgattatcaactgcgaattctgagtctccaaaagatttatttttcgctccaaatccttaatccgagaactacacaaattagtacaacagagagtttctgtagtagaatttgtatctgtagtagaatttgtatctgtagtagaatgtgtttctatggtagaatgtgtttcaattgaggaatgtcgtctggtttttatgtcatcaaaagtatttacggatttaagattaggatgggaaatagtttcagaaaattcttgagaattgaaagaatttaatttttcatttttaaatgataaatctgggcctgaaatggaacaatcttttcctgaaaaatccgaatctaatcctgaaaaatccaaatctaggcctgaatataatgaaaaggcttcagaatccgcaagagagtctgataaagataaagattccaaaagttccacaccctttcgtaaagattcctcattttccattacaatcccattttacaaataataaaataatataattataaaataatataataaaattataaaataaagtaaaatggtgaaatgtgtagtagtgagattagtgagggcgtatttttctggatttgcgtttgggtttgattttggctcttctgttatcttgtttcattctgcgatcaacgtgttttaaaaccttcctggcgcctttgcctgaggatttgccggatttgctctgtttactgagtttaccgacatttgctcttctggaaatgacatagaccttttgacgccttgtggattgtattttcttaagtcccctgagtagttttttaggattctcagtgctctcgcggtcatttgagatggcttcaattttaggtaaaatgctcctgagtcgcttcttggccctttgagcttttctatgtttcgcttccagaaccttctttatgggccgatttttcagctctaaaagcttctgtttgtattttttcaccagctcctttgtcactgggtactgaggcttattgtgcttattttcatcctccacaaaccaacttggcaaatcctcgtcagtaaacgttcttttattatacgcgccgtcaatcagcgccatcctcgtcttcttatttatcatcagtgaacccaacgcctggaactctgctaacttctccggatcacccagtagctcctcccgctcagaatttgatatcgcaggcactactctcatctccacattctcctcagacggattggatagttttagtctctcctcagacggattggatagttttggtttgtcagaattttcaactcggtcctgtttgggtggtttcccgtattttccctgattgtttgtttggagagtgaaaatatcattatcaaaccatcgttttgtgactaaatcatctaaagcttcagagttgtcgaaatctccatctaaaggttcagagttgtcgaaatctgcatcagattcctcatcggactgtgtggaatctgtaaattgttcattagtatgcgtaacttcagcttcgtattgtaatttattaatgaactgttttagttcatttgattgttctaatttatgtttttgcttctttgatagttttacgtgtttcgggttctcctgagcattcaacttgtcaagtgaatgcctcacctccaaatcaacttccattttcatcaatctactcatctcatcttccaaatcatccaattcatctgatggttcatctgacggttcagtgtcactctgtgcatccgatcctatgtcactctgtacatccgatcctatgtcactctgtacatccgatcctatgtcactctgtacatccgatcctatgtcactctgtacatccgattgaagatcactctgtagatccgatccccggtcactgtgtgcgggagattcaacatttgagtgtgactgggataattcagtgagagattctaaatttaatgattcaaggctgaataagtcaggatctggtcctacgaatgttgagctagtgccgggctttaacttctttagcatttttctctgtttccgctccagacgtctcttctcttgaattattttactctttaactttttatccaatgaaagcactgaggaatcaacggcttcagggtcaatctccactgattcattactcgtagatttactactggtagatttattacttgtagatttatcactcgtagatttattacttgtagattttgtctctgctactgactcatcctcgggtttcagggattctgattgttcacttgatttcctgtttagtgacgggattgagttgataagtttaaatctccatttgagcagtgattggaggtcagatttcccagcgactttaaggtctgagcaaagtaacttaatctcctcagtcgtcaacggactctcctccaccatagataacacatcatcatctccaatagtacccgtagtactgttaatactactgttaacactattgtgattactgttaatacaattgtgagtagtggtgaagagaagtttattgtgtgtgacgagaatggttgcgggttctttggatttgagaaagtcgatgacgctaatttcagagtaaattgcgccatcgtagccttcacggttcgttttcttctgctccttgaggagttgatttagtgttttaggtgcttgattcttagttttagcgcttttatcatcttcaatactcagcggcgtgttagagctttggaatacaaaatccgcgttaaaaagccgtgggtcaatgagtttaagtgatttaaatccgatacaaactgcgaaaatctccgctgatacgtttctgctactctgaggctttgtcacttttactctttcaaaacagtttcccaacatccagaccaacgagttgtagtctgaggatctgaaaaccttagtcacgaagattccacccttcctaagtaaactacaggccaacttggccgctgttaacaccaaaacgttctgattaaacgcatccaaattccagttacaacccatgttcggtgatccatcatgcaataccacatccacactcaaaccctaatacaaccattatactagttaaagggtattatactagttaaagggtattatactagttaaagggtattatactagttaaagggtattatactacttataacactattatactagttaaagggtattatactagttaaagggtattatactacttataacactattatactagttaaagggtattatactagttaaagggtattatttatggtataaaactagatgatagtgtgaaagatacgttgagttggttggtgatgagtgagtggcatttgggagtcctgatatcagcttggaatgtgataacgcctttaattggtttgattggcactagatcaacgcctatgatagtgctagaaactggtaactgatttgacgctacttggagccaaccacctggagcggcacataaatcaaccaaaacactaaaaaaatattaaatccacaaaataaatatatcaaattggtaaataatttgttgaataatttgttgaatagattgttggatagattgttatgggagatacttgcaattttggaagatattgaacttttttgccaattgtatgattttaaatgcagaacgggatctgtatccgtgttcttttgccaagtgataatatttatcaagtctgtttttcccagttttagtctttgtcttcattttttaaaatataaattataaatcatacactacatgtggattccacccttaaaagtaattaatattcataatttcccattaacaacattaactcataaatttacaactataaatttaagtaaaaagatgtgaataaaatgtgaaagagtgtgaataaaatgtgaaagagtgtgaatagaatgtgaaagtgtgaggagaagattatggtacgagtgacacgatgataacgccgacaatgactccgaagaggcctgaaaattgtaaatacgattaagatacctaagacgctggcgaaaatctcaaccatgaggaccttgacaaataattgaggtttctgtgcatctgccagggcacaggcgcttccaacaacgccgacagatattctaaacagtattgattgcgtttgtattacccgcagaacaggtttgagaatccgacaattaggcctacggcgaacattgagtagccgcgaaacaagtcattgtaatataacttagtaatttccttatcaagcaggtttagaggcgccttttcacccgtaaatcttgatgcgatgttcatcagtagcactgacactattagcccgtaaatcccaatcgcttcacagaatattaccgacactaaattcttcactgttatccgaggcgatttcaccgaaccgcccattatcgatggcccacataacattaatcccctaatccacaattaaccaaatacacaattttcacaatttatctaacaatacgtaataatataattatgtaatgagtagaatagagtatagaatagaggagagtaaagaatggatgagagtatgggaggtacgttgcggctccgaaaacggataatccgagtgagaagaagatgcctaaatatccccaaaatgagggtgataaatctttaagtattgtggaccagttgatgtacattttagtaattttaaaaatatattacacactttgtaaataaataactgcgatggatattagaaattgatataacaactcaagtacaaatcatatttcatgaaaatttagtaaatctaagtttagataataatttataaactatttgacccgatggggaaattaagaaattctaactaaattaattaataaattcatccaataaatttatatcaaagttggataaattagtttaattatttgaactaattatgacatggacaaaggtaatgaattctccaacttcaacagtggtataacaaactttaacagtggtttaacaaattttaacagtggattaacaaattccaacggtggattaacaaatttcaacagtgtggatgtgcagaatttaagctttcccttaagctctgacgaggatttcagtgctttggggaagctaaaaaatgaattacgggagaatcttgaagtgttagagaattatttgaaaaatgaaccgagcactgagcatgagtggcagtcagttcttaactataaaaacaacttaaaatcaaggctaagtcaggcgaattctcaagtttcgcgcctgctgaagcagtattccatgaattctaacagtgtaaaatatgtgcaaagtcagaggtatagtagcatttttgaccagttaacctccgagttcaacaacgcttctaagcaaatagatacgagataccaacgatttatcctctttagctcacctgacaactactacaaagatgaagaaaaaactaaaattacacactcgaggggattagtggatgcgattatggatgttgagtcgcttaccggccaggcaactcagaatcttgaacttcttaaaaagggaaataggaaactcgctaaaatatacaacagagtgaatactatggtcaacaagcatctgtttgatgttcagaaactgcaaaagaatattaactttatcatgaccagaaatagagccattttctccattatcattggaatctttctatttttcatcttctgtaaaatattcctcaaattcaaataaactttttaaatcaaccttttaaatcaacatttaaatcctccaaattttaattttataacatttttactctatttacatattttcgctctgtttacacatttttaccctgtttacacagtattacggtgtataaaaagtaatagtttaataatggtatagtttaggggagagaaggtatatgagagttggagtatatggaagatggcaagggtgcaatatggaggtattgagataacatttgtatctttaaataattatcaaaattgtgagaaaaaaatgttatatagcgagtggatagtggaagatataaaatggtgtatggaaaatggattattaagaaatacgacaaacacattgtgtggaatcagtcaagtcaaaacacattcgagatctgaaattaagttaatcttttcaaacctattgaatcaattaattgaatcaaaattatataataaagatgttaaaaggattgaaattaatgtgccggttgataaattaatagcggaagctcagaaggaatctaccatatcaaaatcacttgaaattctggtcaaaacgctaagaaatttgattaaccattttcacgccagaagttgctcaggaactgattttttctactcatttctatgtaagtaatttattcaattaatacaacattacagttaatttttattaggtgacttaatctccatgagaaggtttaatgaaaataattttaaaaatactttggagagactatttgacagggaacttttgactaaaaaagaatatttcatgattaaaatatttgtaacattggtggttaaaattttaaagttagccgctcagaatgttaataatacgaaaaaggttaaccttaaaattgatggaaaatggacagattcaattttaattgataatgaattaattaatttactaaactacggttcagcatcgggtatttacagcagattgagagaattgacacttgaaaatttagaaaatgctattgatccagaaggtaaaaatatttctgattttaacacagtaaaatccactttaatgtgtgaattaggaaaacttacaaagtaagtaatcaattattacacatttgattctacagatcaaggcaagttgtgttttctaggatcctttatcacttgagtaaactgatactaaaggatgaggaatttgtttatttacatgttttacccgggaatgaaaatatgttaaatattttactatggaatcttataactgaatcaataatagaatctggtaacactaattaatatcaacaattttatagaaattagaacattatattatgatcacgtaaatttaatgaaaaatctctataaattgaagaatagaggttttaatgtgtatagactgttcataattctgaaatacgccgaatcctctaatgacaccttggaggaccttgaaaaggcaaaattaagcttaataaaccagaggtgtaatgggaaatccgaatttaaagggggaacgaaaaacttatggagattcgtggacttgactggaggagtcaaatgagaatttaaagttattttttcattatatttaatagacaatttgagctaaatgattttctgagattggtgcaaattataatcaaatcacaccaggcgggactcgaacccgcaacctccgctttaggagagcgatgcgctatccattgcgccactggtgctcgcgaaaaagccaaatctcttatttaaataataatcaaactgtaaaccataaaataaaccaaattaaaaaataaagttgaaaaaaaacaagaaatataagcaaagacaagtgtgagtgtatagataagataaataatgtgaaatcattaatttggtaatagtgtaatgaaataatgagaaggttaaggaatcaaacggataatttaatgtataaataagatgcattgaaagatattgatccaaggttacattaaaagggaaatgaaagtcggatggggtgtagaaggatttgaccttttcaaaatttactaatcgccgtaaatgaacttaaattcattttgaatatatattttagagtatattttatctgtaaaatgtgataaaatgtgtgatcttaatgattaggatgtatataaaatttttactgttggattccacataaagtccccattacccttgaagatttactctcagatttcatacagttattcccctaatttttttcttttgcgtttaggtatttacagtaatggccggatatacttttaacacagattacacttttcctacactgattattgctatttgtcataaattctccatttcaacgattttaatctaacatttaattgtcattttcacatttttcatcttggatttttgttaattatattttaactctaatttcacttagaggttcataaaaattgaatgccattaattttctacattttaacacaattgtttgtttaaattaaagagatttactcacgccctgacttgacactcgtcactctttaatttatatccctcactgtttgacattctcaactcattttatgtcatcttatacttcacctaattgttattctaatttgtaattcacagttttgacactttgttttgatcaatagaactcacgacttgttacacactttgaagctactcacgacgcttgctttaaattattgatttatcttattcacactttcttgaacatcttacaccttagttttggacactttacttttgaacattaacatttttcactttattgacagttttcacattgacagttttgaacattgacaatcgctttacaactttaataaggacttgaaattcacagtgctttatttgctgaagataattagagaattaattcaactcaattcagaagttttaagtttagaaaattggtgattttgattatttaatttaactaatttcgcgtgtataataatttcccgtgtataataacttcgcctgtataataaaatcgcattatgataagtgataatgttatcttgtgacgatataaattcagaaatttcatactctggatttcacaggaataaaagagattactcaagtaatatcgatatggacttgagctccctgagcatctcacactcccaaaacgatcactcactctccgaaaccatcaacgataaccaattccgggataaccagttccgtgataaccagttccgtgataaccaataccgtgataaccaataccgtgataaccagtaccgtgataaccaattccgtgaatataatggaagtgattcgaattggtattcggatttggttgattcgaggagtgattgtgacaggttaagttcatatatgtatgactcggttggttctgaggtttcacaaagtattaataatgaattgggcttatctaatttaaccttgcctttgtttgactattatcccaactataacgtggagtctgataagcttgatccaggcaacccactcaagaatattaactcgtttgacacgcacaggtcagattctattaatgcacaaatttctctaaacagtacagtttcaagttcatttaatgggtcagtggggaacagggtcagaaataaacggaatgatagatttgcaaataaacccgggaattttacaaatattgacaagaactcacactacacacctgattcacactattcccgtggtgattcacagttctcccgtggagatacacactattcccgtggtgggtcgcagtataacacacgtttagactcggaatttgatacacagatggataaatcacacttttcacatgtagacacacagtataacacatatgcagacatggaatgtaacacacaaattaataactcacacttttcacattcggacacacacttcacacactcagaatcgtcccacagtcctgaaataaactcttcaatacacatggaatcacaccctcaaaggaactctatacagatggaatcacagagacagatgaactctatgcagatggatagttcccaattgagtagtagtcagttgagtagtacgcagtattatagtccaggtccagagtgtacatcaccgttggaagtgtcaagtctaaaggagacaaggaagccattttatcaaacgaaggaatcgccggtgttcttgaagattttagctacgcagttggtttcagggacaataataggaagaggagggaagggtttaaactggttcagacgcaagagtaaggtggatgacatagtactctcaatgccgtgggaactgtatcccaagacggagtataggacgttactcctaaaaggctcagtaaagtcagtaataaagtcaacatgtatcatatcagagctgatgaattcaagttactcgctgcatacggataacacgatgttggtcatggtggtgattccagacctgtttttatcagcaattgatgagattaagaggactacgaacccggattcgctctcaattacgttgtttagagatgaaaactcacgacacgaggaaatcgtagcagtcatcaaaggtgataaaccaagagtcaaggacctcatagtcgcaattgccacctcaatcaccgagaccataccctccgaaaaatactgctttgtcacctatcataactcggaacacgccaacacacaacctgaactaacacaatccaactcatacacacaatcaaactccaactcctcacattccagcacacacaacttccacaatcataactcaccaaacaatcattacaataataatcaaaataataattccagtaataataatcaaccaaatagtaataataattccagtaataataataatgtgaatggagtgtatggaaatacgagtggatgtgtgagtaatggtacaggtcaatgcggtaagggtcagaaatatgacgagattgacgctttgatggatcagattgagagttcgctggataaggggaatttaggaacattgagtaacatttcagcactgctaagatgtaagccggaactgctttctactcaggttgaggtgcaagtaaatgtaccaaatggtgtcccagaagacgtattcgcactctcttcaatctacaagtgtgatctcgttcagacggatcgagacggagacaaagtccagtgcagaatctcaggacaattcgcaggatgcttcgccacactcctattcatcctcactaaagccaattaatttttttcctcaattatttattatgtaaatagaaattataataaaaaattatgtaacaaaaaattataacataaaaaattaaataacgtgaataatttgtaaggaagattaatggttagacaacttcttccttgagggctacgcgggaagactgtttcttggtcaaggtggcagggaagacagtgggaggaagatgaaggtaacttctgagaaactcaatgccctgatcagtgagagtaaagtacagatgctgccagttgcaattctcctcaacgtaattcttagacttgagagatctcatagtcatcagaacatgaagattagggacactgatctcaggatgggctggaatcttaggattcttctgaacaacaagaactccctctaaaaaataattaaaaaaatgtaaactaaccctttatcaagtattcgtaaatagctacccggttctccttcgggattaagctatatttcatgccaacaacggacattgtttatgattagtaataaaattagcaagaagtagggatctcggtctcagtaagatatggacaaaatttaaaataaaactaaatgtatatagtaatagtaaatagtactgatttgcttcaaaggttaaaaacatggggtaataatgtatgaataaatttagctaaaaataaagtaaaacagatctaatttagtttagataattattttgccatggaagattttacgtggaaaagttgctagacaaaccaactttatattataatccttctaaccctaccatatggttccccttatttatgcacataacaattttcatattttatattttatgtattatatcataccactgatctgatctctattgttcatacatattattcatttacatttgattattagacttcagtttcagatattttatacaatattactttattgtttatttgaatgttagcgttgatttggattattaaatttttctgattatatgtttctgagttagagttgaatttggataatatgattaagagaaagagagacgactctcccgacgttgattcagaatctgaatatcctaatgctggacttagtaatttaactaaatcattcaataatggacagttgacagatgactttcagttattgtcaaagtatttcccatttctgaagaaacatatgacactaaacctgagatggaagccgtttatgccaaaatcattaacatatcattatgactttaatcacccggacgcagtatatcacttatcaaaagctattttaaagcataactatgggttagagttgtatttaccctgttcctgtgaagaagattcatgtaacgagaataaggacttggaagtgttaaaccagcactttagagatttgaacgggagttcagatcttgttagatacttggcaccatgcgtacctaacagactcagttacattaaagccgcatcttcactatttagcttaaagaataatgagccatatatattcgatgttgaggactttaacttgccttcagatgattatctcaagggcagtaatattattgtactggatatcggaacaggagcaagttgtatttaccctctcatcggggctcgtgaaaattcctggaatttcataggtaattttacaccatactctacttagtctttagtacacagtagttaacactatgctatagtagtcaacactattctatagtagtcaacactattctatagtagtcaacactattctatagtagttaagagtattctatagtagttaagagtattctatagtagttaaaactattatacagtagtttagagttgaaatttagatgttagtctgtattaatgttttaggaactgacattgacaatttgacacttgagatggcgaggaaaaatgttgaagtaaatcatttggaggaaagtattagtctaagattacaaagaacgccaacacgtatctttaatggtgtattgtattcccatgagttatttgcactaacagtttgtaatccgccatttcacgcacgtttggacatgactaaccttaatccacgcacatccccaactggaactgagcgggaacttgtatttggagttccagatgatgcaaatatggtattggaacagacatatttagatagtattgaccaagttggaggaacctgtacatcagtttctggccagcttaagtgtgctctatcagagatgaaacagggagatttggcgtttatagagataatgatacaggaaagtaagttatactgcaataatgctgtttggtttacaaccttaatcccgagaatgacaacgctgaaaaaaattaaaaatttgatccacagggagatgagacattatatcttgaatcatttgcaacaggccgagttcctagactcgaaaataaaccacatgtactacgaaggctcaaggttcaagttcgcaactaaacctgaagctcaagttgacgtgtccaatgtgcacatttgtgaattcaggaaattcacacttaaaaatgggaatcaaacgagatgggtagttgcgtggaccttttataactcgcaacaaagattgcaaatcatcaacaacctcaccaaattatccttacaaacataatgtagtatattgttaatattatatattgtaacgtgttaaataatatataatgggtgaaaataaggttaaaaggagtaaaggtgggatttatttaaatttaaaggggaagaaggctaaaaaaagtaacggtaaaatcgcaacgtcgaagttgaagaatcaagcagattcttttaaaaataacaagaaaagaaagtttgtaaaattaaataaaaatgaaaagaataaaatacaaaatataaatggtaccaacgagaaggaaaatgataaagaattaaataaaaataaatttaataataaattagttgaaggaagtcaagctgaagatagtaaaacttctaagagtactgagaacgtagatttaaataaggaaaatctgtatgatcccaaagattcaggtaaaaattaaccagttaacaccggatttagcgcttgtgtttatcggaaacgtacctttaaccattaaaaccaagtcggatctcgtaaaaaaactgcaaattgacccgaaaattatacaatcggtaataaattatacaatttaattctatgtgtattgtttaggtacattttagatcactgccaattcatccaaaatatgcccgaaataaaaaagttgcagttattaaacagaaattctctgatgctaaggataaccaaaatgcatacgttaagctgtcagacccaaagtatttaaatgagttgcttgaaaaaaatgttagttccctctcttaaacaatggtgtagacgttggaagttgatggtcatcacctctttataaataccagtgacaaggactcatttagtgtattttttagactgttaaaatgctttttagaagttcagtaggaagaaaacagtgtttgtgggaagactaccgccaaccgcaaacgaggacgacttgtataatattttcatgaatataagccccgttaaaggtaaaatattaatactataaattgaatttagccgtgagaatagtgagagatcctgtcacaatgaagtctaaggtaagaatggcaaagtatacacaaatttagggatttgggttcgtggcatttgataataggccagcagtagttgaagcaataagagaacttaataatacagaattcaaggtataaaaatattatgctatggttaaatgacataatttagggatacacactaaatgttacaaaatgtttagaagaaattcaactaaaagataaaccaaagtttaaaaataagaacaagtttaatagaggtaataaagggtctaaaaataaagataataaggtgtctaaggctattaaaaaggttaataaatccatatctaaatgaggaaaatgatcgaattttaattttcttacctgagaaatttaattttattcactttccatttatattttaaatagtaaaattaatgcccaaaatgaagataattgatgaaattagcaattataagtgttttatagcatgtaacaactttaagtatgtgagtaaaatacttgaatactttgagaaactttataaaagtaatatcgtccactaccgtataatcataaacaagctcaagaaaactttgtgtgatttgagtgataaaaaaaggttcattttgagtattgtagattatcagagagagtcaaatgagttcatggaagaaaaagatgttaacctcaaggaaaaaaataataagataatggaacaagttatgagaatagaaggtttaaataggaaatatgaagaaagaattataatatacggaaatgaaaaacataacattgtaaaccaaatcataaaaattgagtcaagcatggattttaacaaaaaccagatattatacatgaattttatagttcatacatttggaaacaaggtaacacctataaaaattaattagtggaatttatgcacttaataaaattgattagtgctaccggttggagatagttgtgaagaggaaggataacctactgagaaacttaaaagcccaaataaaagataaaaaagatataatggaggaaagtaaagacaggttattagaaataaaaggtgaatattcaagaaatatacagtcaaaagtaagaacttcagtcacttaatgccactgtagatgaatattgacaaagaattgaaagttgcaagaattaatattaaaatagagtttacaaaaataaatacaaaaaacaagtgtgtgtttaaggaaattgaagggcttttcgaagttataagctctaaaaagagaaaaatcgaacaactaaaggaatcagtagttgtaatttcagaagagcttgtcattcactcacaacaattatctactacaaacaaggttaaccaaaactaacaatgatctttataggaaataagtgataaagaggaagactttaacctaaaatgtttagctcttgaagacctgcatagtcttaggaatgatttagaaaatcaagtaagaatggttttatttaaatgattttatagattaatgaggtccagctagaatgtgaaaacttagaaaagtattaactttttttaacaaatttagagaacgtttagagttgaataaacagttggaacaaaatttggaggagaatactagaaaacaaaatgaatatttaagggtaaaagacatgtctgaatcagtgaataatgaaaacaaaatttcaataatcaaatataatacactagtattaaatattgatgaaaaggttaaaatttgtaatgtgtaaaattgtttagatgaaagtatttaataatttaactaataatactatacaaaacctgaggaacattgatgctgagtataaccttgatattacaagcttaagcataagaacacttgatgaaatggtagtgtatatcacaatacacataattatctctatctataggaaatgcccttgagagaaaattttgaagaaattaagaataataatataaaatatggtgataaaatagtaaacagaacattaggtatgtgataattatgtgtatttgagtagatatacgcaagaacatgaatcatataaaggacttgaaaagtgaagaagaaattgaaagggataaaatgaacaggttaaaaactattaattataagttaataggttaatgaaagaagtaaatgaactgctggagaaaattacaaaactcgatacaaaaataaacgaacatcaaaaatgcaagtctgacatagaaagagaaatagtactccaagtattaaaatattagctaatattaaaatgttttataaatgttattaaatcagaaacaaatgattgatgataaaatattacttgagaaggaatgtgaagatgatagtatggtgatattttcaacttaatatttaggagttacggaagattataatgagaaaattaactcaataacttctggaacatgtaaagaattacaagttttcatagaaattaaggcaagttcatggtgaacaaaattgattattagaaacaagaggaacagaataagataagtaaacacaacaagtctttaaaggaagctaagaataagaaaatagatgaaataaagaataaatatgaaatattagtataaaaatagtaatattatagtaatattaggaggaggaagagaaaaaacaatttttacttgataactcaatgttagatgaaaagatagctaaacttaagattgcaataaataataagactaatattgaaaataaaaatgaagctgattctgttttaaggtttgtaattgactatacataacacaatattaatgttaagagccaacaatgtgaagcaaaataggaatcaatatgtccattttgaggtaaattgaaattgttaaatgaaattttagacctctgatagcatacatagttcaactaaaagggtaaatatttacatatattcaaacaccactcgaatattgttaaaaataaatcaatagaaatgtcaaaggagtacacccaagagaaagtttatagacaaaaaaataaacaaaactctcaataataataatgattctgataaccagaatgaattagacttgttttgctaaacagtaaatatgttactatatgagtcaagaaaagatttaaggtggaacttttgaaacgttactcctggttaacttgtaaatttatacatgtaaatacacaattatttaaattcaacaatgcagaaagaatataaatcttataatcttggcattaattcacagaagtttaatgagtttgtaacttaaatatttaatattttttagaacttttgaatcattagaaattaatttgcctgaacaatttgaatgtttaaatgaaacatcaaatcaacctgtgactgatgtgtgtgttataaattctgagaaggttgtggtatcaacagttagaaataatgaagctctgggactctattttggagaaacatatgtctgtttttagtaattgaaaatgcttaggttatcgatttaaactctagagaagctatttttcctattttaaattgcgtatcttaattaattttaacaaacatcagggtggtgtctctaagctttccgttaacaaatatgatccaaacttgttaattttgggtagcgtgtagtatataatttatgaacataggaggagttcttggaaccatagatatttgggatattagacacaatgtatatatacatattattgtactgtagtatatatacaattgtgtatattagagtaaggtaattggtacagactatgattcaatggtaactcattcaagtccggtttgctattaaattgttaatactatacagataattcttgctgaggctatagaggggaatgtattgcaaacccttgatacatttgggaatttagcaaagtggtccatggaaaacttatccaagcctgtggtatacactattaggatattgtttgacagaaactactcgaattgaaaaaagaaaataacatttccgatataacagtggcaacatatgactcagaaacaatttgtggtaccactttgggccaaattattaaagtaaatgatgaagttgaagttaatcaagcccacagatcatttataactggagttgaatgtaacccatcaaacataggtaatgtgtaaggaattgttataaattattcagatttggtagtcacttcatcaattgactgtaaaatgaacttctgggacattaaagtatgaataacaaggaattattattttcagaacttcaaccttcctttggacactttaagtataaatttcgactacgttaaagatgttaagtggtagctaatcttgtaaaactagaattttaggaacccggttttccacaatatactgggatcaataacaaacagagggaaagtttgtgtctggaatttttcaaagaaatggaaggtttaggaatagtcgactaattactaattttagtgccctatatattctgatgatattgacgatgttggctataaaattgactggacaaaggatggaagagttatgatagcagttgtaggaagaattaaaatgttaaacatatcaaaactggtaattatttaactattatgtatatcctataaatcagtaattaaggaataaaataatggcttaaaatttttagatagaagaagattcggacgggatgtttattaaaaagttaaatattaaaagaaggaggcggtatattaacgcgatgttgttgggagaaggaaatgaagtttaaatttataaaatgagaattttttaaataaaaatgatttttataaatttttatattatttttaatttattttttccaattttatataaatgtgtgagttgtcaagacactttagaatcgcagggcactcaagcccaaaatactcaatactctcaaaataaagttcctgaaaattctactatgaaccaatccaaagatcaaaaagaggctgaaaatccattgccctcttttaataatggtatgtgtattagatttgcaacgacattatgatgtatagaagtagttgacgttaatgatacaataaagggtaatgtgttgaaagaaaatccaggtattaacattctaattattctgttatattgtagtctaacactatattagtataataaatgtatagttgaaaaactaaatgaattgtcgcgaggtaatagaatatgttattaaataaaatgatagatatatcaaaggaaataagggagaatccttactataaaataccagagttaactagaaaaataagggagattgcagtattacatccaggtttgttaacgattataattgattgtagatgttatggaaaaattgggagtttatgtagttccaattaaagaacaagctgaggaaacaactgaagagggtctagggtaatttatattcatttcaataaattaattaggggtgaaaagggtgaattagtcgaggataaaaaagatgaaaacaagggtaaaacaatatatcaaaataaatatttagaaaaagagttaagatcagaaatagatgaattgatggataaaactggtaatttgaaatttttaagttaatacaaaatttagaaatgatggaggccatgactcctgagcaaaagctggaatacataccacaattgaaggaaacaattgtttatcaaatactcaaaaatagaaatatgctaaaggaattatcagataaattggggtataaaaacgtccaagatgcagtaaatcaccaggaatatcaaaattcagaagattttggtaattatggaaataatggatattaccaaaactatgatcaatacggaaacaatggatattaccaaaactatgatcaatatggaaacaatccagattaccaaaactactatcagtatggaaataatccagattaccaaaactactatcagtatggaaacaatggatattatcaaaataatccatactatggcagttatggatactgagtgttgtgatgttgtgttaatttaagttaattgttagtgtgtcggttgtttttgtaattttaactttaatttaaattttaatttatgtatattcttaataattgtatagtatgtgttagaaggttcaataaattttttattcccagaggatcatactcttatcagaagattctgagtaatttcttttcagattccataaatacagattcttccgatagattcaggcacttgaatgtttcagatattcaaaaatctgaaattgaaaatgaattttcgactcttcattctaacacatccaagaacaagtctgtaaaaaatgatattaattgctccttggatgattattcatttgaaaatgtggaatctgctcttatgcagtttgtacctgaatacatatcatcagctggtaagattaaataaacatttaattgatcagatgagaataaaagcacttttatgactcctggccaggcatttttccttgagaataaggaaaagctgatggaaacagttaaaagaagatactatgaggagaaggataaagctaaatatcaacagaaatatgatgatgaacaggatgaaacattctcatcacttttagaatacgatttcaatgaggaatcatttggttcttacggggaggagtttatacctcccaggaataaacaacacctctgggactacaattcaacttcagtttgccttcataaggaacccattgaactgactaagggagtaatgccaaacattaatcaaattgttgatattttacaaagggtaacaataacttatttttacattataatcaggagcagattatcgatatatcagtaatggacatggataaatatgagcggagagatcaaggtctctacgtgatactgggaacagggacaacttctgcccattgcaggttctattaattatttattttactattatttatacatatgtttgtgattcaattgatattaggcgtgttggaaggatgttgtacaatataataattgatttggagatcccttttgtctcaaaagtctcctactgctgtaattcccgtagtgacgagtggattatttcacacctcggccctctctcagttcatctcatgataaagaaaaccagggacaagtacaggtaaaatcaataagttatatgctataatctatacatttaaagtgtaaattttgttttatatcctaacttaattttttatcagtttggatgaagtgtggtcggagcattttttgacaaaaagggatatatcgcaggaacttctggcggattaaattttaattaatatattttgcatattatataatttattttataataaaattatggtttatgtgagaagtaattgttagtttgttttatccgagccttccgtccgttgtttttcgtgtttattgcgattgactgctaaaacgtaagccttgtgtgttactcccatgcctataagtgtagaaatcgtagcacatgccataacagcgaagacgtcacgaaaagggatacccaacgccataaataatacatactaaataatgtatagggtagtggtaggatgtaggaaatttcaagtgacatttttaaaagtaaaaacggcctctttgttggtcagttttttataaactgcggagagggtctcgagtttatcctctacattatcgttttgcctatccttggggtccaagaacaccttcaaaacacgagtgccgtcttgcctcatacgagtcctaaaatatattcaagtaaatcaaacaaatgaacataagtgagaataaagtagataaggataatcgaaattgacttacactttgccgacaatttctgtgggagctgcgatatcttcaagaacagcttcgtgtacactagtcaaggtacgattcctgggcctctttctaaaggccttgttattgaactgtttagacataatcttcctctgagatactataaaaacatggcgcttggtcttcttttcaagctcaatcagaagccttccgtgaattcggcgcacgtgattttggtaaactctgtagggaacaaacactacaactgcgtttttcttgagagctccgacttcaacctctctacatgaagaaacaacaatcttcttaacatcgcccttcaaatcggcggtaccagacgattgtatataaagtaaacatttagcaacttccctttccaacggagtgggatctttgcttaataaaagtttatcttcagaatccatagtaaaatggtctaatttttgtaataatctataaaggttatattactaccgaactttaagagtgatgaaactaagaaagacatttaaaaatcttatcaggttgaaaaccagattctaattcttaagataatctataatttagaggaaatataaggaatacaaatgaaatatatattgtataggatttaatctatggtgacctagaatggggtgattataccgttggcaattttaaccataattctcccgttatttataccaatatattattaatattagtaaattgttgtttctcaaaatatattttttgtatatctcatttatttggtccagtttgaccttataatcttttaaattttttatatgatttcccaattaatgtgttttctgacgtaattttttcctataaatacttttagagtagagataatttatttttttgtcatgttatatcaaatcttgccatattgtggcatatgtgccacttgccattttgtttacttttttccgtttacacattaatcttctatatgttgaaagttcttaaaattgatttcacatactaatttttaagttttaataattttttcgtgtttacaatttttaatttcccctatatttgttttcatccagatcatgtatgattcagccttatttaccatgaattctggttcctctattaggattttgtttatttttaattatttctggttcagctattttttctaacccctctacttacttttgatttgattgtactcttttaaaatggataactccctgggaggtgtgatagatacatttaatgaaactgtatcatacacatcgtttgataatatgatggtttacacaattaaaaaaatacatacaacgtctattagtacagaatatcaatctgattctggagacttatcaaaaactcaaagcattgatgatttatcggataactctcaaaaaagtacctttagtaactcaatatatgacaataatgatggcgaatttcttaatttccctgaaattctgtcatctctcaagtcgtggtcaagtcgtttggaaagaaacacagaaatgtgtaactctctgaatgaaattttcacagagctgtgtaaaatagaatatcagtatgttgatagcttgagaactcttaaagataaaatagatttaaaatcaacgttagagtgtacagaaggactctccacagtgtcagttctgtcatctttcaaatcttatgttactaaaatggcagagaaccattctgacttcatggagtcgatctcaaatgagtgtttttttgaacaaaataaggatcaaaagatcaaggatatagttggagaaattgagtcattgaagaaggaattggataagtataaatctgacaaacttgtttgtttttcaaagatgaaagactcgtatttcagttctaagaatgcagttacactctgtttggatgcgacgcaccaggccccctccattaaaacatcagtacacaaaacagttataccagtgatactaaactttatcagggtcaataacatggtttataagtatgatgaattcaactactttgtggaattcaataataaagtccaagccgtagtgaactcgctaagtgaacttgaaaagactagaagccatcaagttaatgacattataagcaaatttatggtttgtgaaatggcaaagttaagaaaccttgaatatgatctgaactctctgattgaaactcttaataattttgatggctctaaggatttagaaagtactttctctggagaaaattggactaagaatatcccccaaattcaggataattgtaagaccaaatacgctgaattttccggtaaacaaacacacaacgtatgttacacattaatagataatttctttaacttcaattctattagaaataactaatgaattgttaggttacaagttttttattcccatcagcaataatacgtccaccgccatacagagttatatcaaaagtagaaaatgatatgcagaggtacagttttaacgtaaacttaatttcactaacaggttccttgagtcggtttggagcagttctgagcctttgttactagatgagttcaaagatgagatccaatcatctttagtccgtcaagtgttctgcgatttactgtcaaagaacattacgactcaatctgaagtaaaatcaaagtaagctttaaacttatgaatatgtgtatcagggataaatttcaatttttggttgaaatggtaaattctattttatcagtgtctgaaaggcaagcagattactggtgtggttactcgattcttaaattttctgataaatactacacgaatgatgaagattcagttgatggaaagtgctatttatggtcaaagatatgtacaaataactactggaagaataatatgttttgggaggagtgtttgacaattatactttccctggacttgaaggccatatttgaaacctcaagttgtttggaaaagactttaacccggataatctgtgttcctagcacagaggaaccacttgggttttataactggatgctcagatacggattcccagatacgggctgtaagaatctaatacaccgagtttgtatgaagttcaaggttcctcaatcttactataacgctctcataaatcgacactaacctatcccagtcaatcactaaccaatagtgaagtatattaatcaatagtgaagtattatattaaatagttgaccaattagagagtatattaagggcctgttgaccaatttcaactgtaaattttctaaaagtcgtctagttattaggtgattagtattcttcaccttgtaacatgacggagaaaaatgtgctcattaattcacagaacaccagagcaggttatctgtctacgggtgagctacaaactagaataaatttttttaaaaaatctacatgatatgttagtgcataaaataagtgttatatgtgtttgaaagcgtaattttattgaataaaatgtaattattctttaaatggacgaattaccatcaatactcaagggtgtggatgtgttctcactccttggaatacaagtggatgaaaacacagatgtagaggaagccaaaaaaagcttaaggaaattatttctacgaaaagctaaaaaactacacccggataagcaaaagaaggatggagaacaccctggtgatcaaaacgacctggaatttgtaagaataaaggcggcttttgactttttacaaacaaaaaataatttttcattattgtataataaaaccttatcagaattaagagctaaaaggagaagacttgaaaggtcgaaggatatctcatcgaaacaggcaacatatctggattctcttctgaaaagggaaaaggaagcctttgagaaaagagctcaggaacagaaaaaatcaaccaaatctgaccatgaggagcatgaggataaaaacttctacgatgatgtgtttgtatcatttcaaagggaggctaaggaagctgacctcagtttaggccagctgattgtagcagctaagacactggaaatagcaaacgggtctgaaataaactgtcttttgctaagtagtcacttcccaacgctgtttgataactacggcctccttagggttgagcctttggaagtcattgacactcgggtggataagaacatcaaggttggtaaaataatttttaaaacaaaagaacatgctctaagggcacttttacactatcggaataacagaattcgatttcggtgtgatttgtatgctctggctcttggcaaggatgagcctctagaaccaaaacttgacgatgagaattttgaagcatacgaggcctctgttttaaagcggtttcgagctctggctaagtgtaatgtaacctgattaacttaactgtaacatagcaaattaatgtattaaacttatttccatttatacttggcgtaagggtcaggataccacctgtacgattcagttaatccaagcttgttatagtaaccagtttcatgctcaagaccgtcataaatttctacaaataactcaatatatatataataatatgtaatgttatatagtaatagatatgtgtgtatgtagaatagggtgtagttgacacgttctgaatcacttttggtcttctcaatatcttccagttcttcagtgtatagccatctgttagaccataggtcaagtaaccttgatggtttatgttcagtgttgatctgaatattttatgtttaaattaatttacctcaattgatgggtccacgacgatatgatcaatcctcaaaacagttacccaatgacgaaccctgaatttggtatgtaatttaatattaaaaccttaaaaatcttgaaattctcctagatttcctgtatctgaaactcaattgttctccgcaaagagtctacaatagggagtcaaactaaattaatacctgctgttcaattgttgcctctacttttgcatatggtaccctgaaattttataatatttttgggaaaattacgttggttttccaattatagtccagtacttggagccaactaatagtacagttccaaatgttaccttgtcccctgaaaaataataactaatattaaattacctgcattctttcgctttagtcgttcaatttggaccacgtcgccttttgtaacctgtcaacagcagcgttatgtgtagtaaataccttgtgttggtgaatagggctagacttgaaaatacagaaagtctcagttttaaggtttttgatatcctgaaccactgcgtctggtgggtaaacgtgaaagttatgcgattcgtcaagttcaattttcccagggacatactcctaaaacttatcattatattaaagataccttatcgtcgtttctttctggaggcttatcagttctcgttctcggcaagttgtcgtggagaacaaacatacaagttggctgattggttgggttaaagtagtaaggctgcctccatttccttgctattcttagcctgtttttcctggaccttgttgtccgtttccatctcaagtttaagtctctgtatgtttcaaaaaggttcatgtccttatcaacatctttattagggtgaattggaaccctaggagggttcaccttggctcttttatgtttgcctactataaactcctaaacatttatagtctaagtgtgggactaacaaatttgtggcctatttggcgtctaggtttattaatgactatgctcctcttatcataataaaaaggattttgaaactttaggaaggtgggaatattgaaatgagaatgtgttccgaaacaaggtggtgtaataacatttgttgaaaagttagcatttcctttaaaaaaatgggattaaagaaatgtgattttatataaaaaatacctttaagtttagaaaagtggttgaagaagttatttcttaaaaatgaagagaatgtgttgaacattatcggattctgctagttaatattcattcttccacgaatttttaagcgaaaaactatcattttagatatttacattaattaaatgttttaaaaaatattaatacataaaaataaattcaataaaagaggactaagaataagaatctggtgaaaataacaaatgtgttagaattaaactatcatttgatgttaaataaattattataggtacgtcattgaataaaaataagaagaataaattcagttgtcccatacattattcttgtgattgtgtttaactcaaatcagtaaattttaaatatgaaaatctttatttttataaaaaaatgtaaaatattttaatagtttgttattaagttaaaatgaagctagatccttcacatttttgttatttgactaacactgaattccgagttctcacggccatagagataggaatgaggaatcatcagtatattccacttagtcttattacaaccacggcaaatttgagatcggtcggtatgagtaaggtcatttcttcacttctgaaggcaaagttaatcgttcattgcggaaaggtgtatgatggatacaagttgacctttttaggattagattaccttgctttaagagctctttctaaaagaggagttatcgcatcagtgggtagaaggataggtgttggaaaggaggcagacgttcacctatgtaaagatacttctgataatttagtggttttaaagtttcacagattaggttagtttaaatttcatcattgtttattataggaagaatttcattccgttcagtaaaaaataacagagattacatgggtaatagaaaacatgcaagttggatgtatttgtcccagcttgcagctaaaaaggagtattcatacttatcaaatctctacgacgagtcattcccagtgcctgagcctattgactttaataggcacgttatcgcaatgaggtttattgatggtattccactctcgcaggtactgatatttatcaattaataaagtcgcaggtaaaggagatgggtaatccaatgaaggttttacacattttaatggatttgatagttaagttggctcggttggggattatacatggcgattttaatgatttcaacctaatgatagatgaggatgggaataaagtcacagtgataggtatgacatagtacagaattttattatttagatttccctcaagttatctcagtttaccatgagaacgcacagttctactttgatagggatgttaagtctgtggtagaaatgttcaagaggaagtttaaaatagaagttgtagagttcccaaggtgtttttaattatataaatatttgattaattatgattaactctgtttagcttccatgatgttgttaaaacagtggataagtccaaggttgagaaactgaaggtggatattaccaaagttgacgatgaatttctgaacgatgtgtttcaaaatctgcgtcaagaggtaaattgagtgtataatattgttgatcagggagttgaaggtgatttagatcctgaatcagttgctgaagaaatggatgaaatgaaacttgaaaaggagtactatgaaatcaaagaaatacactcagacgaagaggatagtgatgaaaatgaggaagaagatggtgatgttgaaaatactttagaaaacgatcgagatgatgaaaccctctcagaagatgatgtagatggagaaaccgatagtgatgaaaatggtgatgatcaaaatcctaaacaaatccagatttggaaaccacacgttaagaggtatattaacgatttagaatacatttttagagttggaaatagagcatataacagaagacttaaatcacaaaccaaaaataaagcaaaatcagagtcaaagaaggacatgaaacaaagaaagataaaagatagcataaataacataaaagacatgtggtaaggtgtaataatgtaaaataactgctggaataatataataagaaatagtgctaagtatatttatggtatcagattgatttaaagtgatccgggaattggaagatttgacgggtcgggagaggacatgtatttagggaagacgtagtgctttccattaccgttttcattgccgtccagatcaagaatatccttatcaccatgagatttatccagaattcccattttctttaggacagattttaactcgctggatttgtcaggctttctctcatttggctgttcaataaccaaatcctcgaaagtgttactgttcctgatcaaggcgtcgacgaaggtttcgtttttattgcttgaactctccaagcaatagcttaagccttgcttgaaatcaacctcgagatttttcagcaaatcatcggaggtgtcagaaccttcgtcagaactcttggaagggttttcttcaggcttagtgtagagtttatcaataggacgaatgttgcctacatttgatttatcaatgtaggaaatcctatgacctaggttatcttcgtagtattcattaaaatcagtcttggttttagccttagggcgtgggctagattgtttaaatttggctggtttttcagttatgggttgggaatttaatccaatctctttagttgtagggggcttaaaactcttcttaggaggatatctgcgacccttagggtgataattttcaggattttgctgtttaaatctctgggaatgacctttagtgtttttcacggaagggttaaattctggagtatcgccattgaaaaaaggaaccattaccttttctgactttacttcgcagtccagggttttctctcgtttagagctttccgaggaagtagtgaattccttctcgtcctttttagtttccattgattttggtgcgatttaaaaataacatctcattggcttgaaattataaatctccttgatacccgcagtaaattaaaatattttaaaataaatctacaatatttgtaaattttaaaacgaaatttgaaatgaatctgtataagttaggcaaaacgttgcagcaaatgttgaaatccagatatatccgggattttatttaaattgaaaattaagatgatatgagaaaatcagtgaatttgtaaaataattattcatttaataaccaaattagtttgttaagtttgtatttcaaatagatgaaactatcatacttaatactagaacatacggaaaccagtcctgaaaaattcatattggacatcttagcaagaaatactttttcagaattcatttaaaatacttaaaataactaatgattagttttaacgagtttgttaaagaggatggggaactatgaaaagccgtcacaaaatatagattagcatatagttcgaaattttaaaaaaaatgatttttagtctatatttgtaattatttggtaaattgatagaacgaagtttacacatttaccatactctacatattttaagtatataaaatagatttatgtcattattcctacatgttattatttctatttacacaatttacttaattttacatttctttgttaaaatttttatttatttctatagttatgagcatattcaagtaatccccaagattttgttactattctactcgattccactatttttactacttaattttaataatttggtcattaaactgtttttaaattttaatataaatcagagaatctacacattcagtttttatagttgtttataaatgtttttatatgttgataaggactagaatctaccttcttatatcagtaagagcaaactaacctaaattatcattagaccatatttgtaaacaaggggagtctttcaagttctttgtttagcattagagataccttttttatgcctggattcttttcttcttattccagaatgaagagaatcggtacacacaacggatttttccatgcagatgaggctttagcagtttatatgcttaaactattgcctgaatatagagatgcggaagtcgttaggaccagagacccttcggttctagaaacctgtgatgttgtagtggacgtcggggcagtttacggtaattgactggtatataacagatttttagacccatctaggcataggtaatgttgttctgttcaaaaatttcagatatgatcatcaccaaagggatttcaaggattttttcgatgatgaacatgaggtaacgaagctgagttcagcgggacttgtttacaaacatttctcaaagcgactgttcagggaagtttacaaggttatggatgaagaaacagttgattatttgtataaatcaatttacgacaagttcattgaagcaatggacgccatagataacggagttccaatgtgtgacggagacctcaaatacaaaacaaacactgatctgtccactagagtatccagactaaacccttcatggattgacagtgatgttgctgatgttgatgtaactaatatttataaatataattgtctaggagcggtttatgaaggcagttgaactgactgggcaagaattcgagtaagttaattttaatacaaaaataataattttttaggcactttgtacataacgctttgaacgtattgtttatgttattaaacctgtttaggtcattttaccagcaaaaggcctacttcataaagcacttgaccataggttccaaacccacaaatcaggcaaagtgatagaagttaggaagtcatgcccattctcggttagcgagtgttgaagtaaattatattaggaatttttgtacaaacatgaagacgaaaataacgtctcagatgaagatagagtactattttatctaacttttgatgactcatcaaatcaatggtaacaccataaatatataatacagctcatcaataaccaggaggtcaacatgtataagggaaaagggctcccaatttaaatcaaggttaccatttccagaacatctaagaggtatttaaccgtatcactaaaaatactctttaggactcagagaccaagagttggaaaaggcctctggaataccagatttaacctttattcatgcaactggatttacatgtggagggaagactaaagtataaaccaatttaaacaacaaatactgtgtaggaatctgtattaaaattaattgaaatgacgttgagtcagaagtaagcggtgttattcacttggcttcttgtcaacaaaaggacaaacgtaatagtacaaactaatctcttcggaaatgttccagcttatatatgttcttattaaaagagcgccgttctcctttatcatcaccttgcacttgttcgaaatcttcagcccgttcgtaacacagtgcatacacttggtggagtacttgtacaggtgattcttggtgattttgaaatcctcgaagatattcttgtcaagtgaaaaatcccattggatgatgatcactgaattctcccgcgtctgaaaacaatgttcaaaactaacataccatgccgagaacatgaggggagctttgggtaggaggagtgacctccaaaatcatccttgtggaactggcgtcagtagtaatgtcataaatgcaagagtacaaaatcttaggctaaggggattgtgagcaaattaacttacagatattgtaaaataatcgtacttctcaatattgaaaaagaggtcctcgaaagggatattaagctaaaagtttcattacacagttaacataccggagaagctaaaatggttttcaatctgcaaactaaatgttgaccaacatcgcttgagtacttaaacctgtcatagtcagtacaattccccttcaaaacaatttgtttgtcctctgtgttgtaggacagcgataactcactctgcttaagaattaaatcagttaaactaacattttgagaatacattccaatgcaaattaaaataggcttaagtggaactgccacatcgacagttgacatattttgaggtaagttgttcatgaatgtgtatttatttaaatgttctttagaaatgctaatacatgtgtacatagattgcccttccatcatcgactgtatcattaaatctaaaagcatttgattatttgaatactttagaccaacgctcaggtttaaaaacaaaatggacataaaatgaagtgttcgattggattccaacgccttcagaaatcttcggacttgtgaaatttcgtgctgaaaatggatgctatattatcaaaattacttactttgagttggatttattgaaagtagtagtaattttaaaaatccagaagttttgaatacacactcaatatcagactgagattctgagtcatctagaccttctataaaaagcttcccctgaactacattaggggaagcagaagactgcgattctagtgactgagaacttaaaattctattccttttaataaaaagttgtgacattgtacaaaacaaattaactgagggattactcagaataaaaataacccacaaaaaccatgttaatataaacttgtttatatattttaaatgaaatttttaataatcgcaacttgtatattatttgtatgtaactactgtaaattatcatatttcctggtactagggattcgggaaccccgaatactgttttcaaaaaaatactcatttttatacccaaatcataggagaatccttaaaaatctacaaattggaaacaatgtgtacaattttttacgagattcttgtgaaaaaaatctctcgttatactccaactactctgagtatttaagggataatcaaactgttcaaaaagagccaaaacaaaaatctttgaagaatatattagcagtagaaacgagttttgatgatacatgtgtagcagtcgtgagaaggtattttttaatcaactgatttgctggaatttagtgatggagagattctctcggataaaaaatcagcccaagaggaaataattgaagaatttggaggaataaagccttctagtgctagattagcacatataaatgaaattgaaatgctgtcggataaagttattaaggaatcaggtattcaagtctgtgtgttaatagcaattaggacttaaaatttcagatatagacgaaatagcagtcaccagaggaccaggaacagagttatgccttagagtaggttacaattatgcaaaggatctctctaagaaatacaatattccactggtttcagagaaccatatagctggtcactgcttatctccactaattgatcgacatcaatttgtttactcagttgatggaacggcagtggaatctaaagttagtttaaattttttcaatgataaatattatagaatttgaaattcccgtacctctgtctgttgctttcaggaggccactctcaaatttatctggtggaaaatccttcaaagttttatctaatttgtgacaccctggatgaatatgcagggaacgttttggacaagtgtgcgaagttagttggtaaattttggagtaaattttagggtacttggccttgatgtgtcgaagggaggaggagcacaattggaaaagacagcagatgaggtcaaaagctcaaggttcaattttacaatcccaaacaagaaaagccactacatggagttttggtaagatttctgaatataaagtgtttagcttttctggagttcagtcgcaattgacagcagtgacacgaaaccttctaaagaactataaagtggaagatccaagatctctccctgggaaactgttaaatgaattggcatttggagcacagtcaagttagataattgattgtatatacagaattactaaatgttgaccaatctaatacgtgtttagctgttttcgagagtattttggcccaattggaaatggcaattaatgtggtggagactctctttccaatcaataaactggcactagttggaggtaattttgtgtgattacgacgtttgcaggagtcgcttgtaacgaaaagctcaagaaaatgatactcgatatgttttacctgagggatcattctgttcgatattcgaatcaggagaatctttatttaagaacgaaacaattgattaagaaatatctgaaatctggaggaaatttctttataggagataacccctacgctaaatattacgaagacttcagtaagaaaataagtggcttgaaagaatttatatactatttgtggaaccctgaggtgtaccctgagattttaatgcctggatatatttccaaagttggaaaagaacacaaaagcgagctgtacaagacattgttgtgtacatactttaatctaattggtccaaagaaagtaatgaagatagataggaatataaatagggctctccatcgttcttttttagtgaaaccatcggttagaattttaaaatttattcaaagtgattccaagtttactcttccgctaggctttggattgccaaaaccgaacacaagttggcacctgttttctactagtaagaattactgtactgataacgcagtaatgatagcattcagcctaattcaaaaaaacaggtttgtaaactgataataaactgttatagaatgggaatgagtggagttaaaaatcaggataaaatagatggtagggacgttgtcccaaggtgggacctgggagcgaggaaaaactgggaattagtagcagatatatgtaaactagattcattattacatttttaatttaataaactataatttgtccacgttagaatagtcagggtcgtactgcctgtcttcttgcgttccaacgaaccttacgtcgtcaacctcccaaatctctggcatcctcacgttatagaacctacgcgcctcgtcctcagcttttctagaaaccacgaagttgtataacttcctcaactcgcaaagctgtaggaaaaaataatctagtttgtgttttctcttccaacgcagaggtatttcatcaatcaggtcgggagatgtcaacttatcaatcagttccttcttctcgtgcttatccctgtgatagaggaagtatttagacacccacttcctatccttaaaaagatcatggataagcctacttttgacaggcttgtgaacctcctcaaaccagtagtcgaagctaacgagatcaggcattggaaccattagtaaacctttgaagttctttggctggccgttattcacggggacaatatccacaacccttacgtgttcttggatttcaataagatccttggacctcttgtccacgaatgcagacgacatataacaccacctctttctcctcataggaagtcccatagggttagtgaccttgaggttcttgttatcctttaatcccaattgtattctcctgacagcgagggtggccagatgtttatagtaagagtatatttttactctgagaaagcagttctcaggccatttttccaaagaaagggttaagtcatccttacccatcatatatgggttttttaggtcatctgcaggcgaccacggaggagttgtgataaaaaattcaagaaacttttttctcctcgacattttcacaggcttgctttcatcgtcctgagattccgttccaagattcgggtactttaccatatacttgttttcggaatattttggtgggttgttccaaactcgcaaggaggcccacttgttatcggatgaaccagtgtgttggtcatttggattcgatagtaatttaaaattgcgatttatattacaaatttggttgtatttttcataatttgactgtatattatattcagttgttgtgttgaaaagattaaaattacaagagtttactataaatgacaacggtttgtactgtgaatctggttttatctcggatgtgtttttaaattttgcattattaacgcgttcatgagtgttaaaatatatgttactggtttttagaggagaaataacatttaatgaaacaacaaatttactgtcgaatggaatcccagttaaattacagaataataaggtaaaaaatacaaaaaacatctatttcacataattaaattttataaatattaaaaaaatgaattttaaaacattatcataggaataatttgtgattgtataccctataatacacatgtgtacaaagtgaagttttggtaaaatcaagtatccattgtaaagtacaatccggaagctttctgctctttgtccttaactgagtcgtatttgtttattcttggtctatagtttgtaggatcccttctaaatgtaacatcaagtgatttcaggaatctgttaaatcctgtggccagaggttctgggcttagcgcagtcgcattgattctaaagaataaattaacaagtttttggaatataccctggttgcccttcaaaaacaatgactctgttcgccaggtaagtagccataataaagtcatgttcaacgatgaatgtggttttcttcttgtatagagtgaacctaaggtatttgatttaaaaaaaatatacctttttataaccctgcttgcaactatgcgctgttcagagtcaagataggctgatggttcatcaataaggtaaatatctgcaggagcccccaataccaaaattattgcagctctctgcaactctccaccggataaattcttcaattgctgatccaggatattgtcaatttgcattggtttgacaacatcagcttgaaaaatcggacagaggaaagactctctgatttttgaatggaacagctgccttagagttccatcaaatttgactgagagtttctgaggtttgtaacttactgacaattttggcatcagatcctcacattcagcgttgtctggttgcaatttaccggcgagcattctaaaatataaatatcataaaaaatatgttacttgatgaaggttgtttttcctgtgccgttttcaccaagtagaacaataatttcagaatcgttgaagtcacccggcataactgtaagtgaaaatgatcccagtttcttatccagttgaggatatttataacagtgtaaactctgttaagttattaatttaagtaaaacatacctcaatttcttccaaatcaacatccgttgcaactttaaacgacaaggattcttctctaaacctcaaattttcagttggaacgaatcctaaacatatttatttaaaattgaggataccatccaaaaatatattaatcccttccctgacgctaaaaggtgatgttacaactccatagactgaaggtttcccccaaaggcaacagacgtaatctgataggtagtctagaaccgatagatcatgttctactacaattatatatctttcatgatgtatagactgacgaatcaccctagcagcaatgatcctctgcttgatatcgaggtagctgctcggttcgtcgaacatcaaaacatctgcgtcacacagaattgccacacatattgcaaatctctggagctcccctcctgataattctgagacttttctagatagtaggtgtgataattccagagttactatcaaatcctgtcctatccctttcttgtctttagcctccagtatgtctccaactaaaccgccaacctaaaactgtaaatttttggataaaattacttgtttaggtatattatcgacgtattgtggtttaactgctgttgttaagttatcttccagcatctttgtgaaatatccttggagttcagaaccccgaaaatattgtagaatctctgcccactctggtggagaatcaaacttgcccagatttggttttaatttaccggacaatactttaagtgctgtcgatttcccgataccatttgtaccaaccagccccaaaaccttaaaataattattaattatacaatttttagtacctggcctggtcttggcactggaagtctatgtagtttaaaagaatttggtccgaatctatgtgtagtatccttccccaaatctcggggtagattaataatagtaatagcctcaaatggacactttttaacgcaaataccgcaaccgatacaaaggtgctctgaaataaatgcgattttactagttggatcaacttctatacactgctttcctacaaattaacatagaaattagtatttaaaaaattaaaaacagtttaaataagttgaatctattaaaataatagaatttattacctgtttttgtaacagggcaggtgcgtttacattcttgcctgcatttttttggtttacatttatctgttgatactatagcaatacggagcttattttcactcattccagagtcattgggtttgcttttatcttgtctcttcattttcagacagaagaaagcacaaacaaaataattttaaaataaataggcaaaatgcttgtgtaggaacacaacaaaaatataaatttatttgatccaatttaagtttatttctgtttaaattttttaatatagattttttaattttgattattaaattattgttattattttgtaaattatttgttcatataattttaattattcacctccattaaaatcatttaatattatatatcatttgctctcatacataatttaaattaccattttaaaatgaacacaatttaattcttttttattctataaactttaagatggatgtatcaccagaacattctttcaatgataagcaaccgaaacaccctccgtctgaaaataataataacctgaacaaatggccaaataaaaagaaaacaaagaagaagaaaaagaaaaggagtaatactcccgttgaattgccaaataacgtttcattcaacccatatagatccaataaattttctaagaagcctggaaagggtaacaaaatgttagtgagggatccaaggtttagtgaacattcaggaaaactaaacctagatatgtttagaaggtcttatagctttttggaagaaatgagaaaagaagaagttaaagaaattacgagggcaattaaaatcaacaagaaatttgggacggaaagcctgaaaggaattgaatcaatgaagaaaatttcacatctcaatatatcgaacttagatgaagccaaaagagcactggataggtacaagagtgagaacgctcatcttcaaaagaaggaggaattgagaaagttgaagaagtcactggttcaagaagagaagaataaaataagtttaactggaaagaaaccctattatttctcagacaaaaaggttaaaaagatttataaagagatgaataagaagaaaattgaagaatccttgaaatcaactgaaattaattacggaccaaacaaagctatacacaaaaaattggaatcccaaagcagaagattgcttcctaaggaacgaaagttgaatatgatcccaaagtttagggatgtgtagattaatttattttaaaatattttatcttttatatatagtccagtgtttatgttataccccatggctatacttattttacatattttatttatttaaattttataaaatgccgacaagggatctagtaaatcgtgtgttgaggtggagggagttatttaggactaataaatatcctccacttggaaatgaagcacctgaaggaccaaaaagtaaatatacaaacttttcattacagcacataatggaaaagtataatttcctcccgtcgttcttattaaaaaaagaattcctcctatctttatcctcaaagaatcctgaattggtgaaagatgctttttttggagataaatacaaatataacttggagactgacctccctccaccgaataatgtacaaaggaagaaagatgatttaaaagaacataagtaacatgaatttaagctttaaatatattaaaatgattttatgtgttagttattggtcaagttcaccgagtttagggctgactcctgctccttgttcaaggattctatccttttattataaaattcttcatcttcaggatctaaccactctgtaggttcttcctttagcttagctctcatgtattcttccctttcccgagcacctctaagacgacgccattcaaaaaaaggtacatggagcactttataacccattctagtcaataatctatgttttagcttagtataggcagtgtattttgtagtattggaataaaaatgtgatggaccatcaacctcgattgctattggtctttgatcacctacaggaaccttgccattctcgtctgccaaaggaccactcaactttctggtaagttccttaataatttcctgcttttggagaacctgctcttctgtcaaatcctctgaatttgagtcaaaattaaaaggaagtggacgattctcctttgaatccttcgattgtttattagttttactagattttgtcatccattttgggtcagatgggttcttatcatctggaaaatcagattcgtcactagtgtttttagaatctccagaaaattttctcagagtgttaaaaaacaacccataattagaataattagttaagtaaataagttcagtcctgaaatgtgaaatagtatcaaaatttttacaaagagacccaaaaaatctaggaatcatgatttaaaaatataattaaaacaggaaattatagtaatataaaactatacaagtttagtgtacaaagtgcgattttaaagaatatattcatataacaattgtataaatggggaataaaaaacgattttttatatattatttaaaaagaatattaatcaaacattaataataacatctaattaatatttattttattttgtattttgattttcgactgagttacctccaataaatagtcagtttttgggtattcctttatccttctatacttgaacgttagtgtattttgattttcactctaaatattcattaatatttatttatttattataattccaaggttttagttatttttctagttttttctttgataattttcacatgtgtggatataattatatcaaattttttcagcaataaacggacacattttattgataatctttgtaatggatgattttttgattttgtatcatcctgtatattattttacattgctattgtatatttaactatttccgtatcatgtgataattatataatatggatcttaagaatgacttaaagtcttctaattcaaagtacagtagaaatgaaagctttggtgggttgtataatcttggaagcggtattttggaaaggttggaaaccaaagttccagatgatgtggatgattacgtaggccaattttcattaaaaagtaaaacacaatcacattaattaattaatttcagactatatatcgcaaataaaatcagctagaagctcaaaagattttgattttaatcaaaacaaactcgatataagcccatcaataaaaccgtctgatacatttaaaactaaacctttaaccaaacatgtagatttaaatattatataatttgctttaattctttaggaaaggctacaaaaactagagaaaagtctaaatggtatacaatctaatgttgagttaaagagaagttccatcttggaggtgttaaatcatcatatgattttattaattttcaggacatatatcagaaaatcaataatttggaaaataaaataactgattcagaaacttgttctggcaaaaaaatggatttaattagtaaaaaggttagttatcaggactataaatttaccagattgagaggattgaaaagtcagttgaaatgataaatacaaagcatgaggaacttattaatgaaaaagcagatgctatagataatatttgtgaaaagttcgtataaatataatcatctttaataggtttcaccactcattaacacaagagcaagaaaaatggagggagggtgaaaagaacatattgagctctataaagcaacaaatagaatcagtgaagcaagttttatcgagataataatatgtgtagagatgaaatatcagatatgcaaagagttaaatcagacattatgtcaaaccttaagggatatattgaagtagagttaccaaagttcaagacaaaaatagagagcaataatgaaaatatctgtaaaatggaagacaagtaaataagataaagtagtaaaaaatgtgtttagaataataagtaacacatctgatgacctgataacgctggcaaactttatcaaagatgagtatgaacagttgtaagataagatttgggtcattgaatattaattaggagatatatgaaggataaaatgatgacacaattaaagaaggagatgaataatctacaaaatgaaattaaaaaggtttgaataaatttttactgtgatgaaaacgtaggagtgtgacgagagagaagatacacaaaaaagactaatcgcattgatgaaagaaacaataaaaaaaatagaatctcccttataaatttttataatattttgattataatttataaacttgaataataatattttacccgagattctatcacaacattaatatgagtttatatagatatttttagtaatattaaaatataaaatctcatgggtactcgagacgttgctcctccaaatttaagtggaaatttaactccaaccaacgaggttaacgggatttctcgccttttaaattttccaggtaattatatcaccaatttttcaatatattttcagttttggagtacattaatgagatacgatttaaacgtggcataaaacttgaggaatacggccgttttcgtaaatattgttccaggaaattacacaagctaagaaaacagcttagaacagtgcctggcaaatccaataaatatgtccatgaagtatttcctgaagtcttgagtgataataggtttgtgtaattcagaatttctgtaaatttaattattaggtacctcgaaattctcactctgaggtgcgaacgatcatggagctatggcatggatttgaaatctaaatgtgaagcttctactccaaaagtaagaaaattgcaaataattttttcacaataattcagaataaccgtggaaggcattattatatgcgtaaattccgaaaagcttatctcacctcctcgctccttcaggattattgtaaaaaattcgccgataataacacaattagcgcctctaaggtaaataatggatttgattaaaataatttagttgtatcatagtttttttgagggtgtactaaggtatgaacagggaaattatgaagaagcacactcttgcttgacttcatactcgtcagtagttgaacaaaaaataagaacaacatctggcttgccttcatgtgagtggtacaattcacaacttatccacttaagtgtgataattaagatgtgcacattccacatgaaggtcatgggcaaaccaatctcaactccaaccctaaatcaaaaagaagatagcaatgcagaactaattcaagttaaaaaaacacaggaaaattactttgtcgtgcagtgtaaaggtgtagatattcctttacactcccaattattacctcaaaagattctcgatgctttaaattccatcgacaaactctccataactgactctctgtttacagatttgtgcgattcaacagatatcccaaagcttgtaagagaacacatttcctctaaatataccaaagaagccctccttaaaaactacgaagaagttactgttctcctcaacgactgtgtagatgacgtttgctctgaattgatggtaagattcaaactttcacatttgattcagcttaataccgccggacaagaatatttgcgtaaacttgaaggttggttagattaaattataattccgtagatacgttgcacgcaatgaagtcacttcttcaagtggagaagcacgttatacttgaaatgctttgcctgtttgatttgtcttacacccgtatgtttgttgacccttatccttttttagataaccagacaccactacccgattctactgaaggggtcagatatgccaatatgttgaaacagcagttggcgaatctcgttgatgacaagaattttggttcagtgtttctggcaccaaaggagattgtaaggactataaacgcgattctcctgagcatttactgtttccaaagggaagaattcaacgaaggaatgtcgctcattaattgggcaaactcaaggtctttgatggatattaatctaccaaaaaaacagaaaaatcgactcttgtggagatgtttaatcagttttaaaaccctgcaggttcgttctaaagcttaaataatttttttagagtatgtgtaatctcgtttgtaagaagttttaccagaggttactggtaatgttcgcccgaaaaaatctatcaaaagatgaaggtgaagagcaaatagtggacattttcggtattgaaagagacctggtgtactgcaggccactactgttcgacctcgcattcatatactaccagcctccagaactggaaaccgcatctagatttaaaggtaaaaataatctaataaaattttcttcaggaatgaggaatatgttttcatctctttggagctaaagttattaactagcacataaacaaaaataaatattttaataaattattttttactacatggttgtgagttccattatgctttccacaatgttacctctgtgcttaactagggattgaacagccttctccctgctacacccggcctgctgaacaaccagttcaacatctgaagatggagggacaaagtctgactcctgaacctcctcagtttcaaaagttgaaggaagagttagtccagactcgtccttattgagggatgaaagggataattggctcaaacgttgggcagcttcagactgagaattggctccaacatcctcgagcttagcctcaccaaaaataacgtatatgtcggagtttggtaacttgaatacatcaggcttgttaatcacgaaaaagatctgtttggatttccttatgtaaatcttggatacgccttcatactgctttaagccgagtttactcatagcttttctggccttcctctcatttttcccaaccttagtcttcccagttccatggatgggatcagttcttgtgtcgtcgacatctccgttttccaaatcactctctccctcagatgaaggatcatcgaccacatcctcctcagtggctctagaaggtgcgttcctgtttttaggtctacccttggccattttagaagtaaatttttatcaagttaaaacgttcgtaatgagcagaaataagttaattttaaataaacacattagtgataaatggggcatgagatgtcgaatatcatgtaaaaaaactacataaacgtgtcaaatgttttcagtagttattatataaaacaacaacactaaatttaaaaaatctcaaattcgttatataaataaatatgaggagaaatgaaaaatattaattacacagctaagcagctgtgatcctagaaattggtggaagtaacccacaatcaactaacttcctatcacttgggaagtaaaaacgtgattcttccttagattcctcatcattaaacctctttctctcaagttcagcttccaaccgctgtttctctctagattccaaaacaagcttggactccttagagattctttccaaaaatttagcctttctcacttttctaaggtcctctaacttctttctatcttccttttcctcctttaaaatcgattttacattctcgttatacagttcatctttcttagataatttgtatataccaaattctactagggattgaagagattccagtgtagattttatttcagtttttatagctatttgtttattaatggataaggctctgagatcattttcattggaagtttggggtggtataaaatttttttgtatttcagatagtgtattgaagagttcacgcctcgatgaacgtttccattcagtttctttgaactgtttgtctcgttctttctttatatgtgctctgacgctgtctgaaacaaagtgatataatgatgagtaagaaaggggatcaaattggtatttgcgattattcttttttctttgatttgacatttattttattacgtcaaataaatatacataacatttttgtattctgtaattaaaatatacagtgataaatggaaatgaatggatgttggtataaatagggttgctattggagtgaataggtgtattcgatataaacacacatctatatccatttatgttaaatttaaacaatatataaatatttttaaataaatattttgttaattttaagagaatgaatataataaaatttgagaatgaagttcattactgtggtggaagaccaatgagtttatagaaagctaagaaaggggtaagaatttttattatactaaggagggtaaagtaaattgatattcgaacttttatatgtccttctttaacctaatttacaccattctgaacagtacaattaagttcttcttttaattcattcaactagaatagaaattaatttaaacctcggaataacaaaatgtctaatgagcctcaagtgatacctagtattaataatactataaaacaaatcgatcatgaagtactaaataacatagctaatctgtctagcttaaacagtgaatcgcacaaacaaatggaactgaacaacataaacgcttttaaaagactgctggaagataaaaatgactgctactatgataacgataacaaatatattgaccaaaaacacgacaatttgttagttacaaactacgactaccagttcttatacccatgggttgatttgataatccctaactattctaaaccatactgtacaaatttaaaaattaaatacaacaaaaaaacaaatgaaagttcaggtccttgtaattacacattaatggtaatgaaattatttatattgatcttgtatagaaacacgacaattccaagaagcaaatgctctatctcacagaaaatcagatgtttctcataactaatagcgttttggagcaggttttataatattaaattaacgttttatctttagataataaatacacccaaagacgttcctgtcatgattgattgggttaaggtttgtaaaatcaccctaaattaaactaataaatacaggtttcaaaggattctaaattgtctcaagatgtttgcaaaacattttggtggagttttgataaaacacatattaaaggtaagctaacatgaataataaaacttcaacttcagaccgtttcggtggctgtttatttttacaagattggaaacactatttgaaggtcgatgaggcttatttttcagaattaaaggtaaccgaaattattcgtacataaatttattttacacagaatcgggttcaatatctgatacgccttgctagggagtgtaaggacgaacgagagcggattctgtgtaataatcccaaccttgtttaatttaatttttttattagtgttgtataaagtatttttcttaaaatgaacttgattctatttaggtattcagatattgtggattccgagtccactttgaccgtagatatcatcgataaaaacacagttaaccatctacttaatgttttaaaggtacatgttggtaaattattaaaagtcggaatattaaactcaactctagactacggagttgtggaaagcatcaccaagtggtcaattaaactaaaattatccgaaaactttagactgtaagcttaaaatcgtttatttttttattagctttccacccgtgatagaaaagcccgtggttgatctggtagttggaataccgagacccaaatccctagataagttactccaggtacccccaatataatttatgaaccatttagtattcggcaagcattggagttgggaacatagacctcatttgctcgtccagagtggaaaagtcttacttggcgtcacacaaactctcaaaagaaagcataaacaagtcacttattctaggcctccagcaaggtgtgtgtaccctcatgcccgaagtgaacatgtatctgagcatgggagagtatgaaagagcctgtaaacaaaaggattacgcaatgaaattaattgctcatccggactctgaggaaactctcggatctctcaagttaaacacccacgtcaaaggtcccatcctcgttgcaattggtcctgagggaggctggttagatcacgaactgacatattataagaagctgggattcgttcagtttaaacttactgacaggatacttagaactgaagttgctgcagctgcaattctgtcacaaatgtccttgttgcttaatgacacgacccttagaaacgggcttgaacctgccaagcgatgattcacaccaaaactccgctcataagaggacgaaataaaagattcttaactgcagtgtagataaaaataaagattcaaaaaaaatatgaaaaaatacaaaaggaataatcacaaaaaataaaaaaaagtgtacagtcctcctaattgaaatgtatataaggtgaaaaatctaaaatggtacgtatatattaagcaatttttaaaaacttaaaagaaattaatatattcgttgccctagatgaatatattagttactcgtttagtaggtacaggttcactttaaacaaattaacttccatttaaatgggtaaattaggctgaagtggccattttagtaaaggaaatatggtccttagccagagtgttaaagcttgaaattgtctctgcgatcaaatgttttgccttttcaccgttagaagactcgtaaagagatgagagcctgagtgggtgtaaaccgtatcccagtatctgtaattgtctctgtctaagcagagtcgatgatctaacctgtcccttaggcaccaaaacatcctaaaatttaaatttataaaaagtttaaaaaatacagtgaatccaacaacatcaagaagctgattctctaccgggaacgaaacactaactctatacatgttctcaacaacgtggagagttttgtgtggtattttaatctgaaaaatattctactgatctaaatttaccttaattaaacattctgatatgaacgagtcgtggtccatctccggtgtcctcaactttttgctcttatttgattttacgtaaaggtcctccctctgataatcaagccactcctttaaaacttccatacttttcttttcgagttctccaagtgagttttttaccccaagtttatcctcaagtttagagtcaattttagcctcgagtctgtccttatctaactgagattgttgtgactccaacatctcaacatccctgaatataacattctgattattcatgcatttgagaatgtggagagcggtttgttgagaaaggaaaacttctgaaggaaagaaattttcgtatttgctcaagtgacttgtcaagcccaacaaatgcccgtcttctgaaacaactacacaggaccacatcagtcgaacgagagaatcaaggtccttgacattgggttcgaagtcatagtttgttgaaaaatactttatcttctctagtgcccatttcatgtgtaaatttgactccaccaagctccaaattaatttagaacccagctccgcatcctctattgggtgctcaggctcacattctataacttgatcaaataaagagttggtaacatggtctgagtaccctaacactgtgcacgagtggagcatttttactgcctcctcaattgatgttgaatcttcgggttcaaccttaaccagagtcatcaagttgttgaaagacttaataagttcagaatctttagcaaagctggtctttaaaacattcagtgagttgatgggaagattgttaattgagagcaagaactttaagaatatttctctttttctttctggtgataaacttgacctgtaaactctgttaaggcaagatgaaagctgctttactatggtgcccatgacgtctatagtgccatcccctaacttcaaacagttaaaaagagtagttatttgagtgacgtcaaaacatttccaccttgaaactctctgatcaatctgttctattaagttttgggctaaattactaaagagtttagacagctgttgactaatattagacccctgtagtgtgcctaagagttccaataggagaagagaatcctcagcatacattttcttgcaactcttcgaaactgtgtttagtagttttgtaaatagttgtaatgggagaacattagcgtttgtgaatcctaataggatttcaaccatgttttcaggtgacattaggtggagttttgagtcaaccacctttgcaacttggttgtaaaagttctgatcagctaaacctgcaaatccagccactatcttagatagttgtagtggtgtgaactcgttcagcattagggcagctcttgattttatttttttcaaaagcaacttgtcaatttcaatgtgggaaaaagctactactgatgaggccacatcatgagtagtcatctcatccacgtggtgtattagggttgcagctatatcgttaaacaaatctaggtcttccactcccgcgttaacgtatgcccatgctatcgttgtcatttgtctgcagtttaaacttgccaggtggctcctaaccagcggtgaaacggtgtataggaaaaaatcagggtctgcttcctttatttttgacagtgcccaggccaggtgaatgatgttcccgatgttgttttgatctgcttttgattctataaatcgccttattttcataaagagcaggtgatcagtgaaaccaagtgaggcatatgaccatgctatcccgcaaagctcctggattttgaactcttccaggtttgatatcacttgactgctaatgtgtccaaagataactgggttcctaacatttagtcgtgccagtgctgtagatacacatgtgaggtccaacggtctcttgaactgtgttattttatcctggacaagactaagtattttaaacctcagttccagacttgaatcacttgatttagttagtttagatagacaaaataggcagtttgatagctcactcaaatttaaactattagcatgtatgttaatttgttccaacagacagtccagccacttaggtgttatcttcaacttaattattgaccaaaaaatattcgtcaaaccctggggatcaaatttaagaatgtgttcctcaaccagcgaaatcaatttcccaaaagattcatggttacataccatatacctgttatacgggttagtgtacctcgccagacgatgaagtgcagttgatacattaactgcattcatctgcttaagtttatctccgatactggataaaacttgtgttgtgttctttgatttaagtaggtcttgctgtatcaaaatgtggttagggtccatgtttagccatgtttcaggctcaaggttcgttgtagattctattattgcgcttggttttgtcgcatcgatgtaattatcatcaccattaccaaatatttcggtaagaagtgacttttcctcctttaaaatgttctgaggtttaattgaatcaggaagctcagaagaatcggccgtgtttttcaagtccaccttttcatagtatgcgtctcctcccaaatcaaggtcgttaatcaaatgcgtaccatcattaatggttgaaaatggagtatccggagttttagaaacctgtgtagttttagtctcttcctttatttctgaatttattgccctaaaactgtctatttctaccaaacgtgacggatttgattccagttctcccaaagtctcaacactcttattcgcctaaatatctagtatataaacaacaaattacctttgaaattttcttttgagcttcaattcttgatttatatttgaattttaacttgtatgcattttcaatctcgttaagttgcatccaaactggcttattagagtacatgtcattttcggccaatggataactttgaaatctgtccttcgaacccttagatttatctttaatagagtctatggagtagtttgaactctcaataggatcgtctttttgtaagccagtgtcaaagtttttcaagaattcctcatgtttaactacattagagtctgttgcaaacttccttaacaatattaaaccttttaaattagaattatataaacatgtgtaaattctcctaatcattttggagtttttagtgggattctcttccgcaattcttcaattttatgttctaatgtaatatcatatgggaatttcgggtatttgtctccgtgattctgtctcattaataaccaacgtgtgaaatcctctatttcataaggctccatagattccacatcaactccttcagatgttaatttatggaacatattccttcttggttcgtagtcaggtacttctcctctaacataaagtgaccaccaattttgtttatcttgttttaataaatcacaaaaatcgtctaactcggtatctgacacaatttgtgtgttactatcggaggatttactgtagaatctaacgtattccaattttataaagttagaatgtaaccttgttttccagctaaaattaattatatcgttcaattttgatgaataaaacagaggttttattatttttgataaatgactgcacattaatcataaatacatttatttattgtcattttaaactctatagatataattaattaattaagttgtaaattaaacccataaactaaaaaataaaaataaatcacatctgtttgtgaataagaatcttgtgaaattgggaataataattgcctaccaaaaccagttgtttaaatcttatactttcaaatataaaagtaataaatttttgtatttttattttaatatgatttaatgatagcggacgataatgttgtaattaatccttcaaaacctctggactctactgagttggaaatcattagtcttcataaggttctcaccgaatgctggaggaacaaatcattttacaagggaggtgttattccaaagccgctgttcagaaaatatgatcacctgggtcgacactccacaattattgacgaagaccgtgatttggacgctgaactgggatctattatggaattcactgacccttcactaatcccagatgaactaatgttcactcacaacttagaagccttgaatagtggcattgagaaccatgtgggccccaaacagaagctaagcgccaagttaaagagcatggaattgagggaggataactataaacatgaagaattcgatcatccacacgtcgaaaaagtcgagatggagaatcttttcaacgatgatgactatgttgttggggattataaatactcgttctgtgaagaagaggatctagaccatgaaattgaatataaactgtaataacttaatgtattttacatactttatgtattctgtgtattttatataatttagaccgaattaaaccttcagtagagtactcagctttttaattgattttaaaatagtatcttcatcctccacgtggaaagagcaggaatccaaaatttccatggcctcttccgccaaaacatcctccctgctgctaagagctagggtcagatgcgaagcgacgtaggaacgaattgtcggatactggtgaaccaggagttgcagtaacgtctttagaatttcctttgtgaaagactcagactcgtacatcagtaaaacttcaaggcacctcacaatactcttgagataggcgtagttcgtggttctttttgcgtcgttgatcataatttcgatcaactcataccactcctgaacctcaacgagacgatggctgaacagaatcttgagggagttgacaagtttctgggaagttttcgagtcgtttgtcgctatcgcccggttgtatagttccaaggagcaatctctcaacaccatctcaaagcactttacactctttgcccaggatataaatgtgtccttgttctgtgaaatgaactctatcaaaacatcctccagaaccagaacactattgttggcgtgaatgttaacttctatcctgttgttttcaccaattatcttcacaattgacttgaatgcaactctggtgtaggacggtatcagaagaacccagaggaaggtcctgaatgtcagaggtgcagctgaccagccgggtattctcaaaacgacgttcaatttttcggtgtttgtgagtgaatactccagaaggttttcacagtcattaacaggaatcaatccgttactctcgattgagtacttttgtttttggagagatttttgatagtcaagttcatgttctgaattaaattctgttttgttttcataagttgccgaaatcacttgtattagacttttagaaatgtcaaaaagcatgttgaatccatccaacagtctgttatctatgttgatatacatgtcaatttcataattcctgtcaatgtacttctcaatttcatagtcgacatctctgtcggcgtcgctgtccccatcacactcttctgtttcatcatccagccgagttgaaggtgtagaagtggaattagtcgcggatacatacctggttctagaacaataatcttcatttgtagatatcatctgctcataaggtatattgtagaatatcctattccatatccacttgaagtttaactttgacagtttatttgtgaagaggtgacacataagaaatgtgcttcttgacctcacgtgttccaaattctccagagccagtcctaccaaaccacctgtgaggttagttgccatttccttgtccatgttcttgaaagtgttggacagatttcccctataattgttgtttttaaagaggtacacattaagtatgtagcaaatgacttcagatgatagttctctgacccacgagccaacgtcgcctcgtgagtctatttcatagtcgttacaacacataaccagggtttccgtgatctgttctaaaatcttcttttccaaaacatggtccttaattctgttcagaattgataaaactgacaacaatgcaaactgtctggtctttgaatccttaacttcctcatactttacattggtttttatctcattgcagagcagagttaacacctcattcacagtatttatctcattaatactgtttttctgctcagaatgagtggtatgattgtcattattaatcttggacctgttcttttcctcgtcaatatcagtaaagactctgagcggtatcgaggagaaaacaagagcgtatcctctccttgctgaaatgtggtcacttctggaggacagtgaatctgtaaaaaacttcaagaggttttccgacacgtctgcatcccttataatcataaaaagctgctcaaatgcctccactgcagacaactggacctctagtgcaaaatttctcaagctgtccttcagtataacaatatagtagtcgataattttcttaaacgtttccatattttcattgtagttgtacgtgggtaaggtattcatgtgcagcattagtttacaattcactgttattagtttacaaatagcttgccttatgatgtttgaactcttgttccgaaataaccttttcttctcgaaggtaacgggtacgtccaaaaccttaaacaatatcaaattcacgggtatatttctctcaatcacaaagtataacagccttgccagtgctctaagtgcaccctgagttgtagaggtcgatgtagtgtataaattctccagaagatagtctattaacgatgtaactgtgaactctatactttgcttgtcgttaatgttatttaatttgtcgccattatcactttgtgtgtgataattattaatgtaggaaagtgataaatgcggcgttgctgatactattttacatatcgccagtgaagagagttctcttgttgacatatctgggtggaacaactttgttctgataacattttgtaacatcgagtttgagtagtaaccaagtcttgcaacttgttggcagacttcgacaaacgctttcttgcgattagaaaccgtaaagtagttacaaatctgtatgagttccagaccctttgaaactgttccaaaccttcccacgagctcctgcaatgctgaacaagccgctcttctgcagtttacgctagagtcaaacagactaacatttaccaattccatgctgatcctggatacgtggtcagtgctgagcatttctttggtgaatgttctcgcgattgcccagcaaatgaaacaagaggcgtctctaactgcagttcctgctgagccttttcctctccacacttcgaatgaaagcgttaaaatagtggtatccagaaccttgtttaacatatgtgggtggatcaggccttctctcagaatctccgcaattgctaaacatcctccgtggactacgctctcacattctgcgctcaatggttggacaacgactttgggtgatgttaggcaactaattatgtttccgttgatattcaatacatcagctggggttccgttcagggtacgggtaaactgtgaattaatcagttcaataatgtggtcaagaatctcttcattcatttgaatggttagcctcgatgatattctacccactgactttgcgcatgcccacctaactctaatatcattgtcgaccagagtctctagaatttttgacagcataacctcaactcgagctgcatcaaatgcactggcctttctgtctgttaaatctgtgttttgagggccatttttatcctcttcagagttttttttagtgaaaatagttctatatttcctacgatatttttgagaatcttcttgaggaggcaataggtgcaaagctagacgacccaaacacgaggacctgagtttcttagttgctgcgttaacaacaatatcatcgcaattgagcagacaaaactcaaaaatgtccaaataagggatcaagtcaggggtttggactctcttgataatctgtttgagtaccattaggacaccaattgataggtgattgtttacgttgttcgctgaacccgtcaccgctaaatagtccttgttgtattcttggtttaaattaacgttatagagggggttagttagaatatcttggcaaaacttgaggaaatattggaagtcttgagaattcagtacgtctttccttgagaataagttcgatattaccatggctgcgccgtctctggcctttgtcgacttgttcaggtagtacattgagcaagtcaaaattctcgtttgaaaggttattttctcatcaaatgggtgcttccatatcgtatttaagtcaaatggagtgtaaaccatcagggattcccaggataggaatataaattccaaacaccagaggtggtcctcgtgtttgctaatttcagtttcactggttccagagttggtgttttgtatcatttctatggtttccgtgatcttttcaaacaaagatacgtcatttggagcgtagtttatcaggcgcctaacccctacgcatttagagataatgtacaggtagaagcagagcttttccaaagttatcaagggaatggatttcttagaatctactctccttgtaatatcgaacttgagtgcgtttggtaaaagtacgaacctttttagaatttcgaagatatctccaatcagtgtttctatgtactgatacaacaacacctcaatatccatatacttacccacaatgtcgctgattttgttaacatttgagaccaatttctctagaatgttatctttggtatcatttgaagcagaacctgacttgctttcgtcaaaaagtagctcgattgacagggaagatatttcttctaccatgcgtttcgcttcatcgtgttcggtgaagtacgtaacgtcattttggacgttttccatttgtatatatcaataaataaattcgaaaatatgttgtattttagtttttctttagttgtaataacatattctctcgaatacgaatttcggaataatggagttagggagagtggaatcacgagaaaaaacggcaaaacatttgtacattcagtaatagagcaataaaaatgtaaataataaatattatacagactgaaacaaagttatattagatttactatagtacaaactgaaatcgaagaaaatgattagtaaggtactacaatgtacaagtattaaaatgtcgcaatttttacacatttaagtcgtatccagtatttttaaatttaggaatattggctataaatttttcctactaaaataacctgttgtgaaagaaaaaatggaaatttccaaaaatatttatgttcagttatagtatgatgtatagcaattcaaaatcgtattgctagtataaaaaacaattattagttaattattttgttttattttttatatatactagttaaagccatggaaaatgataaaagttgtacataccgatagtcacgttactgaacaggaaaaacacttagtttgatccgtaataaagcctgaactgtttacggatgcacattgctcgtgaaatgtatttctacattcttggcagaaaaattcctaaattccattgatatcaaaacatagagtacattgaatattataatcgaggagcaagattcgcacttatttgcgtcatttaaatcgaaaaaacttgaaagatcctaattttgtggttaattactaatttttgaattacaaagtagaatcgaactcctggtgctatactagtctcatcttcgtaatattgtagccattttctcctttcaaaacgttgaactattttaatataattatttataactaatttactcaagtttaattgagctggctcctctactattaatcttttggaacatatgcttgaccacgaatcttgtgactcttgcctcttaattggcaaaggtttgcctttataacatttaaataatatttatcataccagtggaaattattgaatttatggaatctaaaattttgtcaaaaaaatcaaattacctatgaagatcatgagctcagagtgtgtaaattttgactggtttatttttaataatgatggatatttatacactgaagatgtcatattttgtgaagaatctggactcatattaaactccacacccagttttctaacaggcgtcataaagtcaacgtccatgggatcatcttgggtaggattttcagaaatgtcagttctgtaaggtatatctagggtcaaattggaagaatctagatccttgagcgaatagtattttttccctgcaacattgaccctctacgtaaaaaattataataaatacacacaaaccacaagcataaatcctatatctgacaaaaggttgttggtgtgttcaatgaatgccgattttgaactgaaagatagtcccgttcctctaattactccttgaatgagtgaatctacatcagaatcctccatatactaaacatcgcgtcaaaaaactaaattttataattttttaccttttcgtgcaataacctttgcagaaataaggaaaccgcgacattagtagacatgtaataaatatttataacaatattaaaattaaatttatgactgtataagtttgttggaaatgaagtcgatgtgttttagagagctttcagatttcagtttctgaaaataattaattgggatgattttaccttcagtaatgccttagatgcctctaaaagatcccagactaaaaatcttaaattttacgacacttaccataattcgaatcaaacctatgtaactcctggtttgcccagtaaattgaagcagtctaataaatttcattagattcattataatatatggagggtaaacgttaatagtacctgtattgtattcaagtgtgttgtatcagtcagaacctgttcaaagatatccatccagtaggccgtaactatataaattatcccctccaaatctatcctgagtacgtcgtggtttttccatacatggcaagtcggtaatttacaaattttaagccagtttgacccaaatttcttgagcatacatttgcttataaatggctgaaatgcgtcacaaacacattgaaagatcattacaacatattccaggaattcattttgtttcagactttttaaatatggtctcttttgaacacttgcactgtcatatactaagttattggacttatctacgtgattttgtttttgaaatatttgagtcaaatcaagtctcaaaagaaaggagttaaaaactagtgatttgttatctgggatgccagatattactgaagaatttatgtgtattttctcatcaaacttgaataatttacaaaagatttcattccctatcatccactcgatgtatatacttgagtctgagctaactttgttaattggagagttaatgttttttgaattaacactgctaaaaaagtgttttgggctcttaatcaataactctgtcaaacctttccctttaacctctgaatcctcaacgtcgttgttgtaatgtgatgactggtttttaataagaaacggtgttatttccagttcatccaaggtagtatccgcattagaattattgcgatcgcttgtacttgaacttctaatgtattttggagataatttattatcttggtatttagttgtatacttaggggatacagcctttgctgttaataatttgagtggtattgtgaacatatcaattatgtgaaatattacagaagagtggtttgaggattccgtgtgaaccattactgaatatttatttaatgaatgtttacaatttgtcacaaatgctccaattgatggtctgtcccatgagaacgtaaagcatccagactcacccagtatagaatacacacatcttcccgttgttccacctagaaatccattactcttgcatccgaactctgttcctgataaagagggtatatcttcatttggatattccacccacactccctcgtccaacgtgcaattcttaaacatctcaagagcgtttgaacccagtttcatctccttactagtcagatttactatccttacatgaacagaaacgttagattttttgagttgaaaacgccaatctgaactgttaaagtcccaacagaagtccaaggaaatacgcttgtataaatttacaagttgaggtccagtaaaaaaactttcattccaatcttcataatcttgctttatggttgaaataagagaattgtgtttgtttctcagggaacttatatacgaggatccgtcactggtctcttctaaatttacaatgtatatcgtttcagagctttctataaagcttgatttattcggatcgatgacctgggtgtttattttacatatgcttgtgggtacattgctcactattttaaaattactatcacttaaaacttcattttgctttacaagtggcttaaaggtacaggagaagtcatcattttctgaagacttcacaaatttaacgtcaagtacgtgcaacaggccttccaaaataactccatactgtaaatttgacctgcaagagtggcctgatctgctatttgagaatgaaattgatacgcttgaggaggaaacgattctttcaggaagccatgttatccaggttccatgtctgagtttgtggctatttctatgcagggtaaaacttgttttattacagatgttaactgtgtagactttcgtcgtcattattggccataaattgtccgatcatctgaactttgggtgaaattccacaaataccactaaatcgggattttttcagtaaatattctacaaattttagattctatatctccgataaatttcattatttatagtttatgtattataactaaaatataaaaataaatcttcagtgatatggacaaatgttaatgtgtggtaatgcgtgttcagttagaacttataatcctctgaatcaacgtcaaatccatctcaaacagcgaaactaaaccaaaggaatcaaaataggaagacatattgtggaatataactatttttcagccgaaatattacctggaaatggtatgtggaagttctttaaaacgttcgggtgtattattcccatggttccgaaggtctctcgtggttcggaggtggtaacaaatgatacacatctcccagatagaaaggaagggtctggtattctatgattaagtttaaaaataccttcaatttcctcgagtttgtacctttgattccaggattccggtattggtttttctagctcgttgtattcccacacttggtactcactcacaaatcctagattatttaacagaagctcagaaaccccttgcacttcctacaaaaattttaaaccctaattgatacctcaagtcctgaacttgtattggcatacacgcaaccacagttagtattattctttgctcctacatcggaatcttcactcctccaaaccacttctcccacctacacttttataaaaatgttttaaagcacctcgaataaccgaattggtagatttgacccttttttataatgtacagtttttaaaagtcctggtaacagtgacgtccttacagtttcattctcacttagttgtccgtttttaattacaactggagcccttttatcatcatctttcggaacaggtttacacatcatttcataagatgatttgaatgaatccaaaaccggcattagagtttccttaaaagaacaacttgtaaacacgaacctgactttctcagccaaaagtgtttttttaagtagattccccatggtaaacctggtcctcttaatgtttttatatccgtaagatattgctatatcctcgccaagatcacatgggtgttgtatatctgaatttatctttaatcgtctttaaatacctgatcttgtgattggaatcgtggactctatggtttcagggtccacgacttgagactttaccatcattctatccaggagttcacaagcatattcagctgttaactcctttattcctaccaaattagaaaggtatggaactgaagcccttaaactccgcctaaaatatattcaatactatatgacataaaatttgtaaattattttctatcattcacttaatttatattttacctggacaagtcaggtgtcgtcactggaatgtcgtattgaactagcactggttcaattctaaatcagtcttaaatattaggaaattacgtgtatggctccttgcaatactttgaaaatgatgataccagttgattcaaaaccattgagcccttgttcaaatcagtctaaagaagtataaaaataaaataattaataccgaggtgacttcgatgaatatattttttgtgtttagtgtgattctagacctgtaggaattaattacaggcggtaaagagcacacattgcgatcactatctctgataacagggtagtagggagcccctttgagtagtttcgagtaattctaatcaattattaggttaagattaaatacttttagctgagggtgtgaatcgtatgtttccatcaactctagtccattatattctctactagggtcagttaaaggagaaaaaataatctcctctgggcgttcaaatgtgtatgtaaagggaggcgtaactgtgtccatatcgtgggttccaattgctgcgattgttctctttctacacaaattttggtgtagcttttcttgcatgtctattagacttttatatctgttttcatttaaaacaacgcctctcaaaactgcacaaaatacatagggacgaattgaagagttctgtaaaagtattgtgtatcaaaatgtcaaacctctttttgtacatcaattctagaataatatggtggtttgcatgggacaagagtgaaattaggaggttggagattccacttgaaacatgagaaggctgtgaccaaaccttccagtgacagaaggtcgtatctaaaataaattttgaaacaaaaataattaatttgaatgtacctattagctggtatctcaattctaattaattccttcccattttcgtcagtttctgttccgtcgtactcaacaccaaagtcgaaacacagtgactcgagttcctccagagctaaaaaataatcatgaaaacttgtaaaaaatacaaatttcgacccccagctggtggaaaaattcgtccttaaggacggaaaccgtaggcataactaaatatacaatggatggggaattacagtctacattattgtgttaaaaatcaaaaataacatatagttgatctagcaaaaaattaaaatttatcaagcataagaaaaagattaaaataacacgtattatacccttggggaaattttcccaggggaatcatgttccatcctaagcattaaccattcttgtttacacttggtaaagctttttttacagaattcttacaatagtttttcagttttcgttcttttaaactaaaaaacaaagtaaaaattaattttgaaaagatgtgcaagtaaaacttgatagatcaagtcatttgaaaatacagcccttgagtttaaaggctaaaagatacaaccactgtgttttaaataattttaaaagtacaatccttgattttccaagagtgttaaatcttatcattatgtcttagtgctaccatttcatgtctcatttgtatggcctttctcctagcctcttcgtaacccaatttgagtgagctaaagccctgtgttttcctcttatttcccttcatgtataccactctccagaggtgacgattcgtgtcgtaccagaccccgctgaccttttcagtgttcggatggtgaagttccttgcgttcagtcttcgggtctccgtcggtcgtcgatgcgatactcgccaggtcagaatctctcgaatatttagaagacaaatcaatcttgtgcttggtttttctccgcttcgacggctcttctgtcctaaggagctcagaaactgcatttctcagtgaaaactggtcagtgttatccgcattcagcttaatgcccgtgatttctgatattagactgtttgcatttttcatgtgttcagggtttagattaggcaaatttgaacttaagttagtcttcaagttcttatcctcatctggtcccacgtaaactggcggcttatagtcatcaggcaagtaaaacgaatactctgtactactctggagttttctatacttcttcagtatcctgtcccatcggttaattagggaatacatttgagaggctttacagactggccatgactctgtggacaattccactcctgcagccaccacgttacagttcactgaatgggaatttgacccgtttggtctgacaacgttgcatgtgcaaaccagtttattgtaatcagcacccacgtaaacgcagtagttagacccaatttggtagttggaaatcaagttatagaacttgttggtcagggtcggaaagaggtacaaatcagagtcaagcaacaaaccagtgttaaagaccggtgtgttaagaaaaagaggtcttttaacttcatgggagttaaggaagaagggtcccatgttagagacgaggttgttagggtaaaaattacaatttatggaattgtcaatcatgttttggttcactaaattgttagtaaccattgacacgttgttagatccattagagtttaaattggccatagtgtttgttatttgggcaaaggaagtcgaggcaagctcggctttatccatcaaatcgtctttcattgactgtggcaaagtgtaaaggtctttccccgactctggtttgtaggtaggttgtaagaggtaatttgaagtgggcatggaagaagagtcatttttatcccaaaaatcagaacttgagttctgattccttgggtgattaggaattttagatgtaacatacctgaaatcatcctcaaaaaacagtgtgttagagttaaatggcatgaccttgaaccccgggtctgaggtcgcagtggtagtggttgttgtatctaatgcctcattctgatcatcctgagaaactaaacactcctcctcccattttggcttggtgataaaagttgaataaaccttgttaaaaggttcattttgtccataaatgtcaaaatattccgggataaagtctgattcgggtactgatgtttctacgtttgcatccaggtcctcgaagcaggtatcgcttctcttgaaatcagtggttgctgatggcgagtttccagtgccaaatccggcaagggaatcgcacgagtcctcaacaaaagatgtagttttctgaaagtcgtcggaaatgggttgttggaactctggaacaagtggtccaatatatgttttactatcaattgtttccggcataaaattcattataaatatttaaaattgaaatttaagatcctaaaaccttaaatttcatttccgtattgattaaattaaaattcagttttgacaaattaaattaaaatttcactttatttgggtaataaagtttattccatatagtaaatttcgaagtaagtttgtctattaatacatgtgtgtgttgatactcatatcagtgtttcatatgtgtatcatttgtcaaagattgacaattggtgtgttttatgataaaaggtcattaattatagtgtagtggtttttacaaatgaggcgtacttacgcgtcattgacccttccagttaactttgttacaagatttagagtgtgttatctgtaagcaaatcgcaggaggttgaaaatgttaaaaagctcatcttattaaaatactgggaactatcgttcaaagtgaatgtgtatgatccagttttgaacaatatcagcttcaggtttagaacattaaaatacaaaatattacagttgtggcattaaagagaactaacaaaaattaatagtctaaatattttgggaattgcgagtgaatgttctccaaaatattttaaattaaaattatgaagagaggttttaagataatctgaaattagtatgtcgccatcatgatcacacagcaataaaaggtcgtacaaatatcatatcattgtggtttaaattaattaacgagttgtttatatcctttttattgtgtaagtttaatgatgtgtacgagaatttaaaagtgtcgagtaaaggagccgaggtgtttcacgacacctaataaaagggatagtagaggtcaaaattaaatataaaatatagaaaatatagtttataaactaatgttaacacttgagagagtaagtgccaaaggcgtatttaaattttggttaatgcagacaagtgaacacggcttacgccccaaattccattctcccgaatctcccaatattatgttattctatgaagtccttaaatttctctcattattttaaaagtattgtacttctatactaatataatttataatgttattaaaatgtccggtcttccagatttttgggtccttgtttcattgagaaatccgacctcgttttctacacatcttaactaaatcaatcatttctcaagaatttccttaattctatcgttttagcctaattttactatattattttacattttttaagagatttttgctttatttccaattattaaaccaaaatttcaaagtgtgtaatcatgctacacattcaatttattgcatattaacttagtaatttttggataatctaacttacaatgatagttttcgtaatttattcctcattcagatagataatctattcatacatcctaatatttttgcgaagaatcaatgtgtgcaggtgtgtgtttttcctcccataattttatcaaaaacttcaagatttacttacacatttttaatctataacttgacaaaaataagatataaattaagctaaaatttgaataaattaaataaagaaattatgagagtctagagttaatttttcagttttctgaaaacagcgtgattcttagaatcttcgcgatgaaattccaaaataaattcatgagatcctaataaagagtatccgtccgttccgttaggccagattttagtgaaattctcagagattggagtatcggttatgtcgatttgacttgaaaatatttattacagtaaattaacttactctatttgtgactggagtttagtatcatgatccaaaacctttaaaggattgccagataaattcaatctaatgatttatgagataatttgtacgaacctttttaagcgttttaactgtctaagggtataaagcgctgattccaaatcctctatattgttttcagataaatccagagcttccaaaagaagcaggaacgatgaaatatcacttaacgatctaaaataatacgttaaatgattcttaattacccagaagttagtttgtttttactaagattaagttctataaccccaaaaaagggaagcagagtcctaaaatcaaaccttgatagtgataaattcccaaaatcgaccttaatatattcatttaaactacatttcttaatctttaatctaatgcaaagttgatttaaataattttaacctttctttttgaacttttaacatatatacataataatctttccttaaaggatccagagctgccagcttttcaaataataaatcaacatttctattttcatcaagatactcgagtatcttaagcctaaagtgctatatttagtttaaaattagatactttgtaagtaggaggtattttctttcagaatctaaggatatcaattcatctatcaaatttaattggttccttagaatatcgagggtgacgtcggatgccaatggtaacagttcgcttccgaccttaatgggttttgaaaccttattattttccacgaatccatcatcttgctcgtcatagacctttaagctttccaagtcaacctcatttttgtgagaaaatccataaactagtttaattctgctgtaacctgattcttcattcttatcagcctttttaacaaaaaagttaggattatttaacaagagtgaatagtattcaatcctagtgttcaaaacaaccagctcaagtttgaataatctaaaaatggataaaattaatgaaataacccttgtaaatcttcatctgagtccacaacgaaagaccaaagaagtgaaattcccaaattactaaaaaaaaatttacaaattatttaattacagttttgtaggtttccaagcccctttcaacttcaccgattctaaaagttgttatcaacaaatatattaccattcttataaaaaaaggtagaatcggtgtccagcctcaaattgtcgttgaaatacaagttgaaagttttgtaatcctccatataatttacataacacaaactaaaatagtttgttaacgtgtataaatagtgtgttactaggtgggtaaagtatttcgtttgaatagaagccagtcatagtaatgccaaatagattggtcttctgggtcagtatatatcgcctgcttaagtaattctagttcatctgctagagagtttttgtgataaggaagatttgttctttggaaccaagctgaatagttcgagaagttgtcgttaatcaaatttaaaatctgttctgataccaatttacgccaatccactaacgaacaatcgatttgtgtaatttgaataaataataaacagttactaacctgattctggtttcaacaagtttaaataatgtttaataaagttaaaataattccaacaatggaagtttctcccatcatgtgtaaacagcttgaagcataacgtaacctcctcaagtagcacttccagtatatcattagctctaagttatatatattagtaatattcatactctaggttgaataatgaagctattgaccacaatctatgatgccatactgaataactttttggggatttctttaaactggcatacgtcaaagccctctcatttttaagtgaatctagtagaaggcttttgtcattcgactggttcttctggataaacctcttgcgatagttccaggcaggtgtgaattcaggcataaattcgattattacactggagagatcgaacattttcttatcagactcacaaactcggtttaaaactgaaccgaaaactgctgaggtttcaagtttagaggaataatctacaaataaatccaaaactttgaagcctttctcgaggttcttcttaaattgttccctctcctcagaggttttgtaaaaatcgtcactcttcaatccatgcattttacgaattttgtagctaattgatttaaaattattttcttttaataatgaaaagaagaatcaaagaaaaatcctatagtacactatactttattggtccaaaaagaagaagttcaagctttgataaaattatcaaaagggaggggtaaattataaaatgtgtatatatggtcatcatatttttataaaaatgattccgaattaaaggattccaaacaataaattgtgaggaagttcaaatatagaacacttgattcctgtggtgtcagtacctcaataagtagaaataaaaatgtataaatgacaaggttttaaaatatattattttcatatttgttttaaaatagtttcatttaattttgtataatattaccgaattttgcactaatttaagcaaacttctaaaacaaaattgaatatgagtaaataaggttttgttttccagttaaattaaaatatatccatataaacactgtagttttggttggctttcattttaattaaatgaaggagggaccagattcagcagaagatactgtaaccccaaataattactatcgcaacggaaatctatcaattcaaaccataaaacaagatgcttataacgttttgtcagttttgagatcatatgtaaataatatctccggatattccgccacctcaaacctagttcctatcctcggagctgatgtttcactgctaaaaacgaacgaacaaaagttaattaaaaagtttaaaaaattggcctcagtgactgtcacaaatgagagaaaatatctaaaactcgaacatctggagccgttttttgaagtttttaatacttttgatacaagatatgtgaagctcctgatactgtgcgttgaatgtaagtttagttaaacacatgacttttagctttgggcaatttggcaaggaacgacttgctgtgttttgaagagaaggatgcacctgagttgatgaataagatattcactgaggttttgaccgttttctcaaatgtacttgaactgaaagaagatgtaagtcgttttaaacccattatttattagtttctgttgttaaaaacattcgactgttttgagcaccttttccgatcatattacggaaatcttataagtaatgaaaatacctataatctgctgaagttgatcttgtcactactgtaagttgtgtgtgggtaaaaatttttttaggagtattagaaacaggaactcgtttttcaagaaggttttttactcaaaagtgatagatttgttgctgagcgcatttgggaatacagaaaaatacggaggacacaatcacgtaaatttatatatagttaatgagaccttaggaactgtacagaagagtgaatacagtgtgcttgtttttaagtttgatgagcggaattagcagccgcttcaactctttgggataccacattgaggactcatacctgtgcatatctgacaaggatacgatgctacttttgagatcgcatcttgcaccaattttgagtagcttggcaaatgttccgacaagttacactgaatttgcagaagatatgaggagaatgagtttgtctctatttaacactagcatagaatgtaagatgttggacctgtcaaacgtgaatttggttccaattttgcaggcccatttcacgcactcgttgtacaagcttttgtttacagagtcaatcacaatgtattcgctagcgctaagaagcttctggaatttgtatattaatttcaggttctacctaaagtctcaggttgagctgttcctgaatcacctgataacctcagttatgaaccagctgtctacagccaaaaggtcgaggattgatatcctcgaaatgaacatggaatttctaggagaactgtccaaaaactcatatttgctgcttgaaatgtttttgaactacgactgcgatgtcaagtgctcgaacctgtttaacctattcgcgagatgcctagttatgtgcctgtcaataaacacagaaaatgagattaacgctaataaattggaccagtcaaagtccaagaaaggaaccactaaaactaactcaaaaaagacaacgacacagtataagtcaacaacgagcgcatcggaaaatctgccgcagcttaacttggaaatgttctcattaaatgcattgcataatatcgtcaagtttgtcatcacagaccacaaactgtatggtaatccgaaccctaataactgtagtaattatcaaacctctaatgaggaccaggataagatgaaggagaaaaaatataaagatttgacaatgaagtgtagtttaatgtttaacagttcgaaggcagacgagtggatagaaaatgctaaaaatctaggagtactttcgaaatactgtactgaaaaggaggtggcattatttcttaaatactcaccagaactcgaccttaaaaaggtaggagaatatttggcaacacataaaaatcccgagttcatggacgtagtgagggccaacttctgcgaactgaaccacttcgcaggagtcccaattgtgatggcaattaggacttttttgtcctctttcagacttccaggcgagtctcagcaaatcgaaagactaatagaagtgttttcaaagatttacttcaagtcacagccactggtgaatggtctggattctgaagtttcaagtgtgaggcccgataacaaggatttaaatgtagctaaaaagcatactcggagtgttagtggagttgattctgatcagaatgagttaaaactggcaagatgggtggtacaggaggatttctactacaagcataggtcgattcagcaaaagtgtaatcagtttgatgtttacgaagataactgtatcaagtgctcagatttagaaaaatcagagaggtttgaaactgaacctaacaacaacgaacattcaggtgacccaggtaaatcaaccgacaccggtaaaaagtgttttgattatactgtggcctcaaattgggccagtaacgttgagatgtacaagtattttttatcaaatgaggttgagagcttaatttgcaaacaaaattatgagaaaatatgtgagtaccttaaaaacacgccagtgacgatggaaacacaaaccacaattaatgacgtcaataatagtgaaggtgatacaaatagaagtagtttgggaaactcaacaccagcaagtgagtctgggaagtcagtaaactcagtaaattcaacattaaacagtcaagtagttaatgagaaggttagacttgagcataagcctggatttgcatatattcaagactataatgccatattcgtactatgttactccataataatgctaaacacggatctacataataaccagataaagaataagatgaagttggaggattttataaggaacaacagaggaacaaacgacgggaaaaatttctcctcagagtttttgcaggacatttacaagacgatcaagttccacgaaattaaactacactcgagtttaacactcaataactcaacgcaatatgaaccatatctctggtcagactatgttctaccaaggcagaaacaactttcaccatatgtacaattgacgacttctaacgaatttcgtgactcggaagatgataaagtgaggaaggagaaagctggagtgaagttggtatcagaccttacagatagtgggttcaacgcaaatcacaggttacaactgtttgaagtgcttttgaataataatattttggagtttttagatcaattattctcgtactgcagaaaagtggaactcttgaagaaaaccgtggagttgttctggctaattgtaagcctggcactgaaatattctaaacacgatttggtaaataaagtgtttcagctttcgagtattgacgtgggttattcaatgggatacaagtgccagatatcgatttctttcgtgttgaacatgttagcagtgtgttcggagtattttgacaggggctcctggcagaagcttctggatattgtgaccaggttttactgcttgaaccttcttccgcctacgtttgctgcgcttgacggagatcacagactcttcgcttcaaattcctatgcagatctctcagtacccagcatacgcttcaaacggttaactgacaagaagagtagtggttggttagtgggcctttcaaacctgatgatcttcacaaagggatcaagtcctgaggcattaaaagcccttaacaagtacaacgtggatgaggagaacgcagaaactttcctattcctgtttgatgttcaagcgagttcttcggaactagtacagaacaaattctttgatgtgtatttgctaagaaacaagttcagtccagtatactcgagtgaggatgaagcaacgattagtaacgtcacaaaaacactatcaagtgagtcagaccgggaggaactgctcccaccaatactcacgtacataaacctcagattagcattccttaacatttataaacttgacgacctcttcatgggagcaataattacctctaacctgaattctttccagctatttttatctgtgataatggataacgtactatcagaccccagtaacactggaaagtatggtgataaatattacgataaacacggtgatattgaaagggatagagatggattcggaagtattttggacccaaaccacatggaactggaccgattcagagataatataacctcgatatttaacctgggaattttttcaagactgacgctcctcatcttaaccaacgcacataaccatcatgataaatcagatgatgcgaaagaggttaatgggacgtttgaaaatgataagaagaggatgatattgagttattttctagagttgttttacttggtgtccagaaaattggtcgtgaagaattcagtgaattatctccctacaagagaaagtttgtaccaatttttcaacctcagttatgatgaaagtttgaaaaggtttgacacaaactttaatttggatgataaactccctaattacgtcacattcatattgcttaacctcgttttctggttcattgatcattacaatacgcatagagatttagagtcaccaagtagtcatagattcaattcacgcgctaatagtaacaatttccagaataatacagagaaaactgagggatttgtagtgaaagaaaggggcgatgtgataataaatgttagtggatggttgctgcatttgtttataaattttgataattcgttgtttggattatatttagagccgtttgaaaagctgttatacaacctggcagatggttactgtctgtcacggaacgtttacatggtgtcactggttttatgctcaattcagcgcatggtaaaccctcatcttccatttggagctgactccttaagtctggcaaccacgaaaacaagcacatcaatcctgacactcctgctcagaaggagtaagtgcgtcacggtgaataacccgctggtggcaaaactagcagcccaaacactactctcaattgcactcttcacaaatatcacctcaacactacccgcagcaaagcaaaataattattataaagatcacaaacatactaatcgcgatgaaaataagaataaagaagaaaagggtgagaaagataagaatgataagtatactgagaatttattggctatacagttattaatagagtttgacgcatttgcaaatgatgaaaataaggaaaacttggagcatttatggcttctttcagtccattgcttgtcgataatattttcaataggccctcacgagatatcaaatgaggccatgaaggggcttaataagctgttactccaacagccgtatccaaaaaccaactgtacactcacatcacaaatctcaagaattttcgattacatactctcgccaatggttaccctcaatttctgttatccattgccaaaacacatacaatgtaatctgagagatcaaggtcaagctgaattggataaaaccgtaggtagtgcaaatggacaagggagtgagagcagtgattacgtgatttttagtccatttaccactaatagtggtagtggagtgggacatttgtggatgagtggttctatgaacgaatatttgaataatttcgcattcaaagattttgatgatttggcaaccagaaaagcaacagcaaccaacctcatctgccatgcactcttgtcaaaactcacacacgtcctgagtgaacactgcgaaccagtagattctcaagtactaaaatcctcagcaagtaatctagaatgtcttttatagtaagtttatattcgaacaataacgatatttatcctttataatataatatttgtagttaaggatatttagagctattgtatttttttgataatttaacaatttttcattaagtataatttaactatataaaaattatttaaaaaatgttataaattatgattagtgatgccagagaagtttgtgaatcgaattgcgtgaagaagctgatagtggtgacacagtatgtgttgaacgttatcatcccaagtaacggagaggttagttagagaaatcagtataaatgtttagatacacactggtcttagcagagacacgtatttggagactttgaagaacttcattttggtgcttttgacttcgccagagctcaaatctgcaccggaatcatgcttagggcattttaagtcagactcggagttgaagtcaagcttagagatactcaaagatcaaacgtcatttgaagccgcttcgccaggagaatacgtattggcgtcgcttttagcgcataccttctcatcctcagattcactcaagaatcttttcctggaagttctcaaggtggttttccccaaacctgctgaagaacccacgcctaacaacacacaagtcactaaaactaatgtatcttaattttacatgtttaactaggaatctctttttgccatttattcggagaaatagactgtgtttttcaacagaaactaaacgccaactagatctagtcaaaaacctaagaaaactcacaaatgagggtgtaacctcctgtaaaaaggcactcgttgaaaataactgggtacataatatttttaccacattattatattaattcttttatatttttgagattgtttgggaggaaaatgatgtttaggatattaacagggccgctgtgtacattctcgggaaccagcaactaaaaagagtggaatttgaagaagataaattaaatttcggtactttaaatttttatgaaaaattttttaggaaaagtgtcactttcatttacacaaaaaagagaccgatcagttgtagttgacctgaggtcggattgtgacatcgtagcctcgacaaagttatttgaatacgtctgtaaacaggtttcagactctgttttggccttcctagagctccaaacgcctgaattcttctcaaataagccgcacatatttaccattaataccacggatttagattatataccaattcaacattccagccaagtattagacaacattttacattaacattactataataaatatataactaatattagttagttaatactatatggctaatattaccgtgtactcaatactacatagttaatattagtttatatgagaattataggatacagtgggaggtgtattgaagagagtatcaagtcagtttgggaagccagtggtggctgaaaatatatacgtttgtcataacaaggagggggattttataggttcatacacgcacaacactttaccgtcaagttcagaacacacatttgtagcaaaaagagcaggaattgcaagtctaaagtgtgattgtacaggaggttttgagactgatctgaaaaggtttggcgatttaattgccctccaggcagttgcagacccgaatttctgcacactggacgagttcatgtccctgaaattgctaaaatatgaagaatttaatcacatgctgactaatttgagtgatagtgtaaataagttaaaaaggccaacggatactaaaataagtcaagttaaatggactccaataaatgcaaacacaaccgtaaaagaggccttagaagtagttaaatttctgaatattccagaaatctcaataaacgcacttttgtatataaacgcaggcaaagaatcagttttagtcaataaataatcatttcaatagtgtaaatcatttgaatgccattaactgtattatagaataattgtaaaataattaaaatgataaaaagaagtacagaatcgtcaatactagacgtaatgttgagaaatgatgtggttgctaccactgaattgttggataatgaatcacctgattcacccatttgcaaatatttcgtgtatggactttatagttataacataaattccgaaaataaagccccaattagtagaaataatcatctgttactcataaacactcaacataggatcaacgttcatcccataacccagtatcataaggatgtaaatatctgtaattcccacaaaaaacagactaaaatgtcacaaagacgtgataatatggatttggatgatggaatgacttattacgatgatggagtagttgattcagatgataatcgtagcaaatccgatgacgtaattgaggacgatgacataattgagtcagaagatgatgtgatcgaactgaagaagaatgcacttaatctgaggaaaatattcatcccaggaaaacctagtaaaagtattgcaaaaaacgaacttcacctgataattgagtcaccggttaaagttggaacttgtgaattcaacttttgcgcacttttagaatctggaaataaactcacattcttctactacgactccgcagaactcgaatatttaaacgattgcgacaccataactatcgatcacatcacattcaaagtataaatatttatttagttctgtatagttaataaaggtatacagttaattttagacagttaataatctatagtgaataatactatacaatagcatatgaataattttaggatatatttccgactgttaaatcggtctataatgagagccctgtgagtacatttagtgaagtgtaccatttgttatgttcttccttgaagaagtttaagttcagattaaagggttttgacgaggttgaaaatttgttcgaccaggcactgagcaactatagacaaataaactcaatcccagaggtttcatttattaagttacacgaatttttagactttaaattatgacgggttgtgtattgacaagtgttacctggatgaaaaaaacgtggaatcattctcctcattcagctatttagatgattccattatcgatttcttcaaccaattcacctataaatatgtactatactacttaacacagtactatttagcacatagttagcaccatagtaatagtaccaaaagtgtaatatatataatagtaaatagttaatatatgaatttagttgatggatgattctcaaagaaaaacatgggcgatattgagcacatattttgttaggaagataaagcagtacaaggacccaaaggaggcttacgctaacacttggaagtggacaaggaagtttagtagagctttaccaatgaatgactttattttcataccaatcaacctctctgaggttcactggtcactggtaatcatcgcttaccctaaatatgcaataagatatcataatataaagtctgaaaagaaagccgcaatcatacatctcgactcacttcgacaccaccaactcagccatgaaattatcgatttactaaaaaattatctctatcaagtattaccacattattattatcgctattattattattgatattattattgatatagtggttatatggcccctacaaaatctgttaactcgtgataacaaattatacaatattgccagtataatggatgtttaggaatatgatagtcgatgtagaacgtttaaggagaggggtttcgagtttgatttggatccagattcgtgggattacataacgccctccagaggagtccccctgcaaaacaatggttacgactgcgggatatacctcatcgagtacataatgtaccttacactcaataagagtgagttttcaaccttgattccaaagtactttgattttcaaagcccaagcaaagcagactcaggaagatacacaaagtggttcactcaagttcaaatacacaacaggtaggctaacaaatgtaaatttgtgtaggaggttgaacatgaagcaggtgctgaagttcatgagggataacccggactggtcaaccgatgaaaataagattcaatacatcactgatcaaatgactcagcaatattaattcatattaacactgtaaattatagatttatcaatgtcttactccattaataatatgtgtccacttataatgttacggatatacaaacagtgttactaactagtctgtaactaatgtataatagcatgagtttagaacaatcaagtgtttacatttgtggtagacgatttttccgaagaaatgtacattttaaagccgctaaggcggtggtcatttttagcatttagttcagtgttgggggagaggagaaagcagtctccgacatcaacttttagaataaaggtttcctgaggtggtgaagtagtgcagttaggtgaagggtttagcctaaaagttacctcagggttcgagtccaaaactatacacaaacaaggctcatttgatgaaacaaacgtatcctaaatcatataagtagggtaggtataacttacttcatccccagggtttagggtaaacgaccagactgtaaagttacaaacgggatcctggggatcgtatttgaatatatagtcagacaccttcgtcggagtgacataaaagtcctttgccgaagggtttttgagattctcctctagtaaacttatacataatttagcgtccctgggcttactggtcagaccacatctgatcacattatcagagcacttcattatctcaacacagtcacctgatcaataatgttattagttttacaaaatttttacgtaatttaattatttaaataatagagtgaatgcttatgtacctgagacgtaagagtgtattgtgtttggtggtataaaaagagcttgaccaggttcaagttcaaagcagttgagaataaatgcaaaaaacacacaattatcaggtccataagcgttgtagagtgcaagaaaaaacgcctctggaagatcaggatccgtgaatcccttaagtcttcgagctagtttctctgcaagttcaccaaggtttggtgagaaaaaaactctatttagaatttcaatgtagagggttttaggatttgagtaggagtaactagaagtaagctccttgccgaggaactttttaaactcgtcgtgtttgtcggagaatttaaagatttcaaaaatgtcgcgaaaaccacacattgccctgaacttagaaagagcaatacacatttcaggctttgagtagttatccacaatgccaggataccgagcagtgaaaagttcaattgcagttttatcgtctggatgaatttgaatgcttaagggtttttgaattgacaaaaccttaagcaaaataagcaagtttcgacgcacaagaccagttgaggtcgaattcatcttgttgaaaagctctgaaaggtgcatgccaagcctagaaaaaggactcgaatccgaggaaatgccttcaaaacttgcttcaaatgaccctaaagtgacgtcccgttcgccagaaggtaaaactaatgagggacttgaagggtgagtgcctaaccaaagctcagaaaacggaccatggaggtcaagattccattccttcacaaatttaagctttaaatagttcttaaacagtagatataccagtgagttttcacttggtttcccccaatcatattgatttaccgtaggtaataaccgatatacacactccatactactatagtacaatttcacattaaatattataattttatcaaaaactacattagattaaaagattccaaagtattaaaaaattaaaaaaatacaaaaacccatatatgaaaaaataaaaggggtctgatgttgagaaaattgtcctgacaaaaaaaagctggatcaagaaatttttttaatctttttattttaaataattacacacttaaatttcccgtatttacggccttagaaaaaagtatgatttaaaagggatcgaaccaaatgtctcaagcaaaggagagggaagtaccggcggacgccgaaccgataccttcaaggaggaaggagttaatgccaggctatagctactatttttcagactgttcaagcattatttcctccgttaaatgtgccgtttcagttgaagacgataaaagccggagcgtttcacctaacttcggaaatctttcaaatcctaaccctaactctaattccaaaaatgatttaacttcgaacgtgaatggtaaaagtgaagatctaagctccaaagaagatgatctaaacaacaaagatgaatatctaaaccctgaccctgaagaagtattgtattcacttggtgaaactgttatatatgactcaaacaacgtgaaatcatattcaacgagttgtgaatcgttgaatgggactacagtaggattttatcctgaaattaacgcatttataaagccaaacagtggaacttttgaccaggaagatgaactggcttctgcctcaattgaacattacacagctatgaatttagacaatttgcctacatttgcagagtcggatttggataaatttccaacctctgtggattttggtgagtcattgtacaagtttaatcgctggtgtaagagatattcaagtggcaatactgaaatgtttaagcgcggccaacaggaaataatgagtacgattttggaggaaaacaaccttaaaataggagatttaaatagcaaaaattttgacgaattcccaataaaagtggtctattcaaagggcacaactccagcagataataagtttgaccttaactctgtaaaaactggtgaagttttggttgaccgttttatggtcgacggagtgcttggaacgacaactttttccagggttgttaaggccacggagctgtcttccgctcttcccgtctgccttaaaattgtacatccagattatttttaccaggctctcgatgagattctcttcttaaaattattgaattcaaaggacaaagatgacgccaattgtatcgtgagacttttggactcatttttgtattctggcgccgtatttttggtcttggaactacttggagataacctctttgaggccacaaaggacttttacgtctctagttttaaggattttttcgcacattcaaggcccaaaaggtggaatttgaaccaactaaaacacatttcacgagatgtactcaaggcactcaacttcattcatggacttggaataatcaattgcgatctcaagccagaaaatgtattactcatcaattcagaaaatacattacaaaatggtaatactcatatactatttactaatactaataatatataataatattaatatataataatattaatagtatataataatagtaataattgtgtagatggtagaatgataaagttggcggactttggatcaagttgttttatacaggatcagttgaatacgtacattcaaagtagatcatatagagctccggaggtggtgctggggttaccatatgatacccaaatcgatatttggagtttaggttgtattttatgtgagctttacctgggaagaattttgttccccagtgataatagtgcaacgttggtagcttctatggtgagtctactaggaccacctccggcatacatgctacagcacaagatgaacagtatgttcataatattgccaaatggaaatatcgctgatttaaacgtgccagatcatatactgaagcagtcaccatactataatagactagatcgctcatcgctctgctgtaacgtttcagcaagtgattcctcaaagtgctctcacgtcacttataataagtgggacaacgcaactgttaatcttgagccaactcttgacgataattccagtggattggaagactcaagtgactataacagaaacagcactttctcactttctgacaactcattttcattagtggacagcacattttcgtttttggataagcgctttaaaatcactaattacgacgctaactccagaatggaagataatacacttaataacacacttgactgcaaaatcaaacttgacattaggcacaacaggaaccccctggccaagttcatgaggataatacagccagcctcagcgtcccttgacacaatgctcgactcaagcaagagctcggaactctcactcttttgtgatttcatcaagggacttctacaatatgatcctctagatagactaacagcatcggcggcattgcaacacccattcatactctcaattaacatataatattctctatttatactttatttataacttaatttacgacggattagacctcaattaagagttatacaccattagtattgtttatgcgctgatttgtttatttaaaacattttacacatttttgtaacaaatttaatatttaataatgtatgtaatattattgtatagattttgaagatttaattgtggatatatttaaatggttctaatttaaaatattttaactgagaataggctttaatagattccatgaaggggtctggagcctttaatctgtttttgcctcaagatttgttgggagataactcaagagactataatgattgtttgttgcttggttgggaagggattaagggccaatttttcattattgatgcctacactccttccgatgtgtgtttaaccctaatcattccctaattttcctatttcttagatttaactaattaaataatttagaaattaactaaaattttggattccgtcaaaaaagactcgaaacttgagaatgttacatggatgaaaaatggtttacagttgtttgaaaattttagacttaatattagcagagataaggatagagtttccagtttatccgtgtaagtttaagatttctgagttttcttttagaactgataaatcaactgggaataacgttcaaaatgtggtcgtgttcgtttacaaaaattactttttcgatccaaaatgttctggtttatttgaaaatctaaagcctaaccctgagaaacttaaaggtaattttaaaatttttaaaaattttagactgttctgaccctaactgtgatattggtccctgtttgttgctggccacttctattaggaattacgtaaacacgatgcttgatacctacctaattgaccacggtcggccctgcgacttgcggtttattaactcttttaatagaaagcccaattttttatccaatttgacctttatcgtttacttgatccttgtaaagtttaccttttgtttgtcgtttttcacgcaccttgttttaacctttttgaatcgcatagctggaaggctcttcaaagttctaaaatttatcccaaaatattcgcaatttttctctctactcataaatagactcacaactctatctcaatggcatatttcatacaaggaattactcagtaaaacaagtgacactctgctattatttactcttaactatatagcactatttatatacttaatgttgtatataatggattagaaatgggcgagtattttgtgttgaggaatgagctgatgaactttgcgttttctttttatttttcccttgcggtaggatttgtggagtttttcctgtacaaaaaactggtttttgaaaagtttaaccactacaaaatactttgtaagagtcattacgtagaaaaattgaagtaagttaatccagaattattatcgtgtagagcacttttctattatttaacgactaaaatcttcatatacattaagctgaacaatgaagtatccgcttcactagcgaagtttgtggttaataaagtgatcgtttggagatatttgggagagaaactagagcccttcagggaattcctactcaaagcgctagagtattctgcacttttaggtgtagcagcacaagcttctgttctttatgacctgttctcatttgaaacgcttcatttgtattatctttactacataatgttgtcaatcatgagttattcccaaaaatacctttacacccttttacacctcttcaagtaagaaaatatatacagataaataatttgcagggggaagaaatggaatactctcaagtcagttctggacacaaccgagttcaccaaggagcaactcttcataggagtcgtgttctttgtcatattcgcactcaactatccaaccatctggatcttttacatctcatccgtcacactccttgcaccaattcttcgtattctcatacttagttattatttaattcacctattaaattatagctaattactatatttgaagggttaattgaactgtttagtggttaaggtgttccttctttcgattgttgagttgctctctggactcccgtactacgttctggcctacaatgccctcccaaataaatatgcagaagggatttatttcaaaaaaataaactgtaagttacacccaaaatttatttcttcagtttttttccatgggttaaaacctgtaggcttaaatgttagtacaatattcaacacatttacacaatttttttcatctgttaatggtttattaggggttgtatcttagggtcgtacctactaagatatcgctagtgaagtatactgaggatgttaagaggaggctgtgggagaatcttcaactcatttctccgcctaacattttgaggtttctttcttagatttaattattttcacaggaaggtcataaaatgcaatgatattttttgttaaaacactcttaatttttgtttcacactaataaagttaatttttgtattaatttatttttgactagttagtgtgtgttggtgttgtatggattttaagtttttgatttattaaattaattttgttttaaatgcagtttttgtacgcggatgacttacactgtcatctcagacagggtgaacttatggagaaggtcgtcaaatacgttcgaaaaggtggatggttcgtacttaacacatagtttacccttaatttacaattatttgtctttaatttagtatattttaatctaaaatttctaaattttactctattttatatattaaaccacaaatcattacttaattatggataatttgccattagttaatgttaattttattctaagttacaatgttgatatagtaatagagtgcttgttatgccgaatactgtgcctgagattacaagctgttctcaggctcttgagtataggaaaaagttactggaacttgacccgaatgtagagtacctcatgactctttatctcacagacgatttatcttccgaagatttaaggaataacgctaaaaaatgtcatgtgcagggggtaacaacaccaaataacagaatgatttaggtcaaatgttacccttctggagtcacaactaattctgatagaggttttaatgtttctaatagagatgttagttttgttcttattaaacccttatagagttttgagaagtattacccgctattttctgagatggagaaaattggtgtttcacttcacttacacggagaattacctggagctcctccgctgactgctgaaaaggagtttttaccaatcgttgaaaacgtaatttgcacattttaatctcctaggtttgtaggaaattctcctctttaaaggttgttttggaacatgtaacttcgaaagattctctacaagttgttaaaaggattcaaaatctagcagccacaattacgcctcaccacatgagactaacagttttggacgttctaaacactgctgaaaatgtaacattacaaaacgtgaccaaacatttgagggacccttatgcatactgtaaacccttagctaagtttgaggaggatcgtcacgctattttggaaaccctaaaatcaggacatccaagattctttctaggatcagattcagcacctcatacacagtataacactattcatactattatctgtataatgttactaaaatatgcttaaataagggttatttaatacaattgacccttatttttcttagtaatacttttaataatgtaaatgatctgttctagtgacagtaagagatcagttaaccctccagctggaatttacactcaaccatttctgctgcaggtatgaggtaattgaaaattatgtttagtacctttctgacacctttgacgatttcggttttttggataaactagaaaacttttgctgtaaaaacggccaggagtttttacagctaccccccaaaggtataactagtggtttaactttcttcaggaccagagtactttgaacttgtaaagcaacccttcaaagtaccagaagaggttgaaggaatagtgccattcagagcaggacaatatctaaactactcgattttatctcaaacctaatatacttttactatatttactatcctacagtactataactaatataccatacaatactgtataccactaccactatacacatacgtgtgttacatgtatattatgtatgtataagtataaacatatattaatggcgtgtgttagacgtgattggtgagttttaaacccattgtggaaaatggcgagtcgtctgaaaactcctcataatgatttttgtgcccagcagggtccttcagagacgtaatgtactcgtaaaaagcaaacactgaagtgtcatcagagaacttttccttgtaatagaagtttgaagctatgtatgacgcgaataaggctctcaaatatatctgaggtaatcgttccactattttctccacagttaccaactccaacaatgaagcaggaacacatctacttaacactgtgtgaactagctccttatcattaaacagtgtgtttgatgatttaatcctcgatttcaaggcgttgatcttatctgatagaacatctgtcaggtcacaccttggaataccagtccttaagccctctgaccatagtgcttcaaactccagagtggcattcttccttattatttccataatgtcatttacgtacttttttctaaactcaggcacatttccatcccgctcaactgccactctttcataagtctcatcatccaacaccaacgaaagtagtacttcatagctactgctcgtaacgccacctttattcgttgaggcgtctttaaacaggattacaccctttgactccaggaaccttctggcattctgtgtgatgtagacgttacttccttcaacaatgaacttgaagcgacatttacccttttcgtcaaacagacggttaacgttaaagggagtgattgaactaggtctaccaccacatggacaaaacaagtcagccttggcatagctactcaaatgaaactcgtccctaaacttgtacccgtttttgaccacaaacccgtcaggcaaaaccacattcattgcttcttcaggcaccataaatcccttactagacaataacctcttatcatatcccatagagcatgtttttaacctagcacccaataattcctcatcgccctccagtgaactagacctctggagacttgagttactatggtttaaagtaacgttattggggttatcagttgcggaaaggtgagttgtatcacgtagaaaagccagtcttctgagctcattgagatcaagaccatttggatcatggagcacgccacttttatccaaaactgttagggtcttagtattggacactttaattgcattacttcccaaatcaccgtcaggcccgccagttagaaacctagttacttcctcttcttttaacccgtacttattaagtattccagtcacataggcttcaattgacgttgtcgtcattccgtagatatcgtgtggaattccccccagttgaggtgctttccctgtcgtgaaactcctccaatacttaagtcccttaaactttgcatactgggatgcccagtccattaaacctccagtgcccgtaaactcatctggacccaaaaagtatatgtcatcctttcccaacaagtctactatgtgcttatttggcaatattaagtccagtatcccatcaatgtaacacataaaactcgttcgggtgtacaaatccgccttatatttagtgcttgttttctccagcaatataacgcccttgctgccgccttcaggtatgtccttattcttcaaactctgggtgaaactcagattatatgcctcatcaaaaatctgcaacttattcctcgtataagcttcctctgagaacgactgcactacacgaacgccgccacgtgaaatctctgaaaatcgaatatgaaatcccatgaagtgaggcccaattataagtgcaatcccgtaaggcaccttcgggtaatctaattttgacaggaatccgcaattgaatctgaacgaaagcgatatcttattcggaacaaagaagtttgtacgtagtgtgtgattattgaactttatgaaatacagcagtatatcgatttcttctaaattttctagctgtttgattgttcttataattttctttgctaagctttcagcttctaaaacactcttgccacgcatgggaactgtcgaataactgtactctgtgctgctgtcaaaatcacggtcactctcaattacattttctggtgaaccattttccggtgagctgctctccactgaattatcgtttactaagttaggctttacagagttatccatgccactactgccttttgatagtttaccagtgagaacaggattttccataccttttacattttctgcagaattcattagtaaattattaaactattagtgtattatcagtaaattattaataaattattggtatatagtatattataactagaataatagtaaactagagttaaaagtgtaataccatcttgtgattgtaatttgggattatgtagtatctcaaaatgtttatataacattttaacaatttccgggttatttgaaattgcggtataaatctgaagtggcgtgtatggttgaatctttagtttcgatttaatttcgtgcaattcagactgtgaaacttgattattcttggccatgttatcaactgttgaaacatatggaccaacacttccactaaagtgctgaataaaagttgatacacagtaactgtaagttgactcgtagaaacttaaaactctatccacattcaaaattgatattttagaacttggaacaatgctagataacactattgagtctattaagctactcatcctctcctttattggtaaatcaattttcgattgattaggtggcaaacaagttagaaaactggtaaatatacaaactttgttggaaaggggatcgagatactttgatttagagtagagatcgtgaaaggtaattgcgtctgagattctagagtataaatccctgtgcacatgcccacgtttgaaggcaatatcaagcctgaaaacgttgtcatttcttggctcataattaattgccaatcctaacccagtcttcgattcaactaattttttattcaaattatgaaaaatctgttcagtgatggtatttttcttatttaaataaaattctcggtcaagcaaatttgcaagttcagtttctccggggtcggggttatttaccgtaaatttcggcttttgtaaaaagtaagttttgagtctatcaaagatatgctcagtttccttaaacactgagcctgatgaacgaaaacactgcatacgccagcaagtcttcctgtcatcgtcaaggttaaagtactttccctcaacacgctgctcaactagataattctctgaagactttctatttaccgatgaagttctcgcaattataaacgctgagtcctcagtaatctgttcaatggtggggaaaaagtttgagccagagttttcgtgcaaaaccttcgccgacatcactgagattacgttattggcaatcaacgcagtgggagatgagctaaagtagtactcgttaagccccaattcattgtaatagtcgtgcataatctcgatgatcttgtcatccgaaaatgttttcatcgaacggatcagctccgaaacctccgaaaactgaacgcagtaacggtcactcaacaactgattacattgctcatcatgtacatcagataaaccgtcatttatagcaaaacgatccgaatacgccgatacgtcctccataagtgtacctaaacctaatttaagataaattatatataaattaaagataaacaaacagtgagttagaatagattttgtttagtgttaaaggatttgtggataaaagtgacaaattcctcagatataatcgaaataaattagattataactctgataaagatttatctggtaaattgaaaagatagaatatacaacaagttataagttggtgatatcaccaaaggagaagttagtagatgaaattagaagtatcattttaagaaatttaacgaaaaagttgatgtgtagaattttctagtgtaaatttacaattatttaaacaaaagaaataataaagagaaatcagaatcacagcccccatgataaggtgaaaaaacagtaaatttagataattcccacattttaattttattttccctcgaaaaaataattattctttccaactttcaactttgaactattagtccttctttccagttcaatctaatttaggattatttattcataaaatagccgtcaatattttattattaattaccttattttacaaataattttttataataattatttttgtacttatttttctatattttcccttaatctgccttaattcagcttcatttcccctcttaatacggagagtcaataatttacatgtgttttatacacttttatcttaaatatctttagcaattcagaagaattttcagtttttgagaggaatctgaaattttaatattttagatttttttttaacaaatgtgtaggtgaccacatattaatataggaatgtatttaatgtttgtattttataatattaatactatgtcaattttgtaatattattgtgatattaatttttgtaccatatttttaacaattttaacaccttatgtgttgattaaaactcaatattttaaaatgttagactgagtttgagtgagaatgtatagtttagaggagtatgtgttgaattctccccttccttgcgtcaattttgtcgtttctgacaatgaccagatgaaaatttacacattactctctacttttaataagaacaaaggctctggaaaatctgagcgcttcaatctcagagttcttgacagatctgacattaaccgacctgtttcaaagaagttaaactggttccaaagaatctccaaggagccaacttgcgtagtatattgtactgattggcaaaattataaggtagagtctagtaagaacctgaatccggactcattttctgacccaaatttggtggatatattgtcaggaacagttgggattccctcgaattttggccgggaaaggaggagcagcgggaagagctttgatccagaatcattcctggaccaaaatgtgtacagagtaactagtaaacagctggagaagttaataagggatgatattgaccattttttagttccaatgaggaaggttaatgcaactaaaacaatccctcacaagtttttattcctggtaaacttgaacaagagtgttaaaaatcccaacaaagtgattgggagtttgaagagtttggaccctgccgaagtttgtgcggtttgtgtttcctgtggtcccacagatattaacactaagctggagaaacttgagcaaatgatatacgaaacctcaatctcatactatgagaagaagattaagaagttaggcaaaactatggcaaatttaaaggcacaaattacaggaaatttaactgaggttacggagctctacttcacccttttaaactttaaaatcgcatacttttcagaacttatctcaaaccgtaaagacgcacatgctaagtattcagcgtgttggtcaaatttaaaacagatggattcaagtatttcagtgattgataaaactagcctttcattccatgtttgcatcagaatattggattacctgttttactcaggtgatttgctagagtatcacaatgtatacaaagagttcgagcttttcattaatcgcctaatttatgataagtttagaggtttgtattataatttgttgtatttaatgaattattttattggttttaaactggagactgtgtcattaaatgacaagaactccaaacaatttctgttaaactcttcaaactattacaaatgggcattgcactttcttatactcttacgtacagaaatcaacaagtttaactctgaaaatgtggataataatgtaatggcataccatgttgcagggaattttaatagtatattctattacgaggatcaagactatgtagatcagtatgataaggagggtggaaaaaatgagttaactgaggaggagctgaagcttttggatgaccagtttgagtctgagactgttagacttgtgatgaaggtgtttgggatttacaaaggattcaactatccaagccacttgttgtatatttatgacaccttgggcgattcattctttctccacggaaattataaggaatcatttaacatatatctcagcatcataagacatattgtttacaaaattaactttaacgaaacatattcctcagttgttaataagtactcaaattttatacctgttgatcctgatgtgagcagtgagttggaaagtaattgggataaaataaccgatagtgttattagtttagagaatactaacaaagataactctgtagcgaacaataaatcggctggagtgtatgagattgactatgtggaggtgattaacatgtttatgtatagtgaattatcccacgaaggtttgttcccagttctattccataaggttttatcgaagcttattttgtcattggttaatatactagagattggcaaattccctgaaattctactcaaattgtcaaatctttcagtcccaaaatataatcctaaaaatcaactcaactcaggctcagcatatatggcagtttataaattagtattaatcaagtctttgattacattcatatcgatttccaccgaagaacatgatctaattgattatctaaacgacactattaatttattttccgcccgtaaatctgatcaacccaatcaattagttgatttagatgatgaaaatgaattagagattgatatgatggaatcctatgtactattgagtaagaatgtgatcagtcagtacgcttataaatttgaatctgagagaatagaagtgttgattagttttgagacagacgttgatttggatttacagttttatgagggatttttggacacttcagaaggcattttgcgtttttaccacgacaaatcggagtacttacctgaggcgtttgtagtttactgtaataacgttggtaatgaaagacgtgaaatggtacaactccccaacaacactcggataatattgataataagtttgccgttttacactctgaagaggcttagaattaatggagtggttcttaaatctttatacttaaagttgttagtaaatgcagtcattctcacgaataagtacttcacaaatgagtttacgagtgtaagcgtgtttagagatttggatagaaaagtcaggattggtaattattctagtagattaatcactggcgagaggccatcccgatatttgtcacatgatggagatggtgagcgtattcttaacatgatttacctatcatgtaataattacgtctcagacgttgttgacaaggaacttagtgctatggataaggcgaaggaactcaagatcatgaacctgaacatgaagatgaagatttttgtgaaaaatatggtcaaaaagtttatgtcacccatcacaatcgtattactatttaatcataagttcagacaattatacacccaatactcatatcaactacatgtaatccaaccatactatttaccatatataatatactatttactaaatagataacattaaccatatatcgatagtgttacctatatagtgttaaaaagatgtataggttaatgattgtgagttttatgtatttggcgagactgacgcggggtatgtaattagtaagacgaatattgtggattttgaccttgaggatagtttgatggatttagattacgaaaacttggaaattaaacttgatagctcaaaatcacaccctaaggatattctttatcacttaaccaatgataaagattgtgtaacccgtccgcaacaatttgatgaagaggttttaaactacattaacatttatagtagtaattatgacgtttacatcatctacggcttaattaacattaataacatcgaaacacaaaatgttaaacttgaactctttattaatgataaaaatcataatactcaaaacattactagtggtaatagtgtcagtaatgtggataataataatactaaggacaatactaatagtgttttggagagtttggatgataaattattgtcattgtatgttaggaaacttgatgttgatttgagggatttagttaatgttaatgttaactacaagtattacaataactcaaacatgatgttgtatattgatctagttaacaactctgaaattgtttatgaacttgtaaacgttaacatactgtacaataatcacgttttaatctcaaatacagaaggtgcctattcttacaccatagtattagttattgtagttaaaactactcagttaatgtgctgaatgataatttaggaaagttgtatgggtataagaataggattgagtctgaccagagtgtgaacttgatatatataataaagaattaccaaaactatcaaagccttggagataacacagtccaggtacaaattaccaattacgtaagacaggagctgaaatacccttttaactgtatggaacagttcttaaagcataccataaatgtaagttatttcgtcaagtaaatccgttgtagaaatttgtaaaagttgagaaactcaacaataaaatccaactactactcaagcataggaacatagtccacttgggagaacccttcgaactacatgctgaaattatcaataacaccaacaacacaattgtaacgcatcacatataaaattaatactatatagttaatagttatacaattaacaatagcataatagtgtgtaacaatagtataatagtgtgtaacaggagtatgtggtatttttggacgagtgtgaggatagagtgtacataatttcaggaccgttaagtttaaacttggtggctcttccgagatcttcggataccctgagttggagaattgttgctacaaagtgagttttattgatgtacaataaatttgttcaggtgtgagccatttaagttaccaattgtaagagtttcaaataagcttgattctggacctacacgtgaagtaaaatcagagccttgccaaatctacgtggtgccccgaggaacacctgccctgtaaaatattgatacaacccttaatttcacttttttacaatttatttttctaacattataaaaatatttttagagtaaattcaccaggaatccagggaatttcgtgacggaatctggtggaaggctgagccgggaactcacaggtagaaaaggtgccaaaaggagttaatgtgtaaactcaatctggcatcctcagagtcactttaaaatatccttaaatcctagaaggttactaattctttaaatgccctgcaatcattggaatccttaaattgtgtgcaccaacttacatgatcagatgcctggaaagtgcatcaaacgctttttagtttacgactctacaatctctttgtttgacctaatttttattataaattctacttttgacctgtttttatcataatctctacgtttaagctctgtttatcacagcctctccatttaactgatttttatcttaaatttcctgtttattaatctaatttggcgttaactttgtaatttaaatattattaagtgtaaaataatgattaaccaattgtaaaattaacatacaaattggcccttgaaataggtaatttgtaacgtatctcatctcattcctttattaaatcaccgaaaattatacttaaaattaatttaaatagtttaagtaactttaaacatgagtaaattattgtaaatttgatataaattaacaactagaagattcccagataaggtgtaattaatgtgtaggttgagggtaagatgataaataacattggaaaattgtaaaaatagtatttaatttataattatcgtacgtgtataatttggaaggatggtgtttttttcgaagaagcacgggatttatagttcgaagctgacgcttcatgtgtacagcatagctctacaatgcatgatgggcgttaggatgattttgtgttccccgaacttaggagacttgagtttggtctttaaagtgagatcacttcaagacgtttatgagttgggatttgaccttttacaatatggtggaattgcccatatcggattagcactactgacactgggcggtgtcttcctaacctatttctttgtgagccttttcaggattccaatgattgtggtttcaatgattcaaggctcattttgcagtaccacggccttagtctgcgtgtacttcttgcaaaagggctattctaatgttaataaattagttgactacttggcaactactggcagttatttgggatttgacctcaagaaaacggacatgcttgtggataaacgaccagaactgtttttcattggagttctagccacaatggcctcatcaatgtattctcgtgcgcagtgtataagtggcgacgattcctgccccgaaactatgatcaacgcacccagtcttacaattggtcttgcaatttcatttgccctcattgccccttgtagagactacaggattgtgattttaggtgtaatttggctcttggcttgcatcgtaggtgaagttatcacaaccatagggagcttcaagattctcaaattcgttaactacacattaatcattgttcacttttcgatgttcgtgttttcactggtaacaatcatacattgtgtccgaatttacactcacgggagactggattactcttcgtacatctcacttgttaggggtgaaataaataattatgttggagactacgttaatgagcactctgaggccttgaaaagttacgttaattacgatactgttaagggttatttccataatctaacaactcaacatactgatgaacaaatcaacctttatatgggaaatgggaatttcttgctcgtggtcatcctcttatgtactgttaacactgtttttactttaattgcaactctgtacatgttgttcaagttctttgacattttcagcgacggaaaagaaaaggacaagtccaagaaaacatcaaagaaaacgcccagggatgataggagcttctgtgtcgttattgaccaaggatgattttacacctcttttttaatttagtattattttaagtataaagtatagaatattctgcaaagtgtgttagtgttgattttttgaaaagaattgtttgtattcttaatgatttatttgaattttttataatcttatcatttgtcttttaaaaaatttgtaatatttatattatttatattaatattttataattaatatttaaaataatgaaattaaaatattatagtttatggtactgttgctgatagtgttgtgtaagtggtgtagtgattagtataaaaaatgagtgaaacattgggatctgacagtgttttcagcttcggaaagcataaagggcggactttcatgtacgtctataacaacgatgtgggctatgtgaactggattcggtcgctgcctgatccctctggaaaattacttgaatttctgaattttacaaaacaatatgaaatgtgcaaaagtccggaaaatactcctaaagattccacgcaaattcaacaagaatcaaccaaatgtgtttcaaccaactatctttcaggtcttttatcgccaaatattggaactgtgactttggaatcctctttttcctctagaaaacaagatattacacctcttaaatcttataatactaccaataataatactgttaacaagcttgttgctaataataatgtgaataatttgactactaagttgagtgatgataagaacagtttgaatgataagtcaagtgatattttggatgaaataagattagatgagataagtaagaagagaaaaataatggaaaatcctacaccgaatgatgttacatttagtagagataaggactttgagtctgaaaagtccttgctatcaccctcactcaaatatatgcttgacattctgacagcagaacaaaagaaaaccattgacagtaataccgatggtgatgataatattaacacagataacggtattgagattgacggattgctggctttggttttgtattctgaggatgagttctatttatcctatagtagaaacaagagccaatttggcttttggtcttgttacattccaaatgaagtaagtgaaataatatctaaaatgggtttaacatcgaatgtgcgtaatctagggaaggaaagatgtattacgtataaagcctctgattataatactgttttaaaaggtttacgctctgcactgaaggataaaaatgcagttgaacctattccgaactttgtgctaagggtattccccagttttataccattttcccgtgattttaaccttgaagagaagactaggcagatactgtccggacggcaggatgactacactagggagaatatggtgaatttgagcaagttgattggtgacgagttatggagtcagttaatgccttttcaacgccagggtgtatactttgggcttgccaagaacggcagagtcttgattggtgacgagatgggtctgggtaaaacccttcaagcacttgctattgcagccttttataacaatgattggccgcttctaatcatatgcccctcttcactcagattccagtggatggatcaatgcctcacatggctgccgcacctcgtggatgagtaccaaattctcatggttatgtcttccaagccctttacaactaccgagagtaagcgtaaaaagagcaaaaatctgtttgattttgatgatttcgatacttactatgcctacaataatagtaatactactgtaaaaactaaaactaagagtaagggcatggatcttgaattgttggacatgtataaagtagtaataatatcatatgacctgatggtgagaataaaggagttgaaggagtttaaggtcgtgatatgtgacgaatcgcattacttgaagaataaggcttctcagaggtcaaagagggttgttccagtgttgaaatccgcaaaacgtgttattttactcagtggaacaccagctttaaactttcctagtgaactttttgaacagatctcgtctataattccggggttttctagcagtcacctgttcattgacagatactgcaagaagaggacaaactggttcaccaaacgcattgaatacgttgattcaaaacataccaacgaattacacttgtttttaatcagcaccgtgatgataagaagacttaagaatgatgtgttaactcagctaccgcctaaaattaggtccaaaatacccattgaaattcctgaaaaacttgttaaaactactaaagtcatgcttgaaaagttctcctctcttaaaagtaacgcactttttaataatttagatagtgatagtggctcaactccggactctgaacttggtagtaaacgtccaaagataaagataggccctggtaaagataggatagagaattactacaatgtggtcatggagcatttgaatagttttggtgatggcgatgagatgggctataaagaaggcgatgttaagagggctcacatgtcactgatggcaaagctgtttcaacttacaggtgagagtaaaactaagggagtgtgtaagtatattgaagaaatactggaaaatcaaaacaagtttattatattcgcacatcacatgttcatgatggatgccattgaagatactttaaggagcaagaaagttggatatattcgcattgatggctctactaaaatgaacgatcgtgccaaacttgtaaacctctttcaaaatacgagtatctctactactcaattatattattattagtactaatacagcattatttatttttagtatatttttgaatataataatttagatgaatcaacgaaacacgaaggtaaggtggataaagtggaagatgaagattctccggactacactgtcagagtggctttgttaagtctgactagttgtggagttggtttgaatttgacgagttcatcaactgtcatattcgccgagctttactgggttccaggtgttcttttgcaggctgaggaccgggttcataggatcggtacaaaattcaacaagatcaacataaactacttgatagctcaaaactctgttgaagaagttatgtggaaagtcattaacaaaaagtataaaactgtaacctctacattggacggtgaaactggaacactgtctctgctcaccaataacaagaagaaaaactatgaacaaactactctggatctacaacctaagaaataaactctgcgtatcttatataatgtaacattttactgtttattatgtttatagctaacatatacatccaactttatacatatatgtagataatatagaatattgtattgattattggaagtgctagtgttgctactggttagagtccattgagcttttggaaggagttgagtcatttatacgtactcttttatcctttttaggacttctcttatcagactcaattcttctctttgtagacacaggaccctcaatgccatcaacgtcaacttgattctcctctaaatccaaccactccataggataattaggaaaataaaggtacattctatttatttctaggtcaaactgaatttcttttggacattcctctgagtcttcaagggaccaatacaacttgccgttaaaccagagcttactacaatcaaatccaaatataattctgagaattaattttttcagctctacttcacactgtaagtaactgtaaactctgttatcaatgtcttggaatagtagttttgcaatgtcatgtctgagatgattaataacttcccagtcctctaatacactgttttttctgatcacaaccggtttgacatcctttaaaatggcaatatattgaggatatttcgatttttccattttcacacaataatttttagaataacgtttctgattctgctctctatgattaggacacaccgttacagctagcgattttacttcaaaccttacaatacgaaactttattaaatcgttaaactttagtaaattgaacatttttaaacattaaattatttttaattgcgattcaaatattttaattactcctaggtctgattcatttgcgtatattttacacatttagtggaaaataacccataaaaaatgcagtttttataagattatatcataaaaatatgtatatattttagtagattatttttaaattatgttagttgagtagttggcgttaatcgctgaaagtggaactgctgaggtaataactcggtgatattgttaatacttaaagtgtttttatcaacgttcaaacgcttaagcatgtttatgaaacgtttgttcttcattagaattttaaatttgtagttcatttcatgcaccttccttgaattatctgcccttttctccaaattttgtaaattgtaaagatattggtcgtaaccctcttcataatatgtgtgattggacttttttcctttgttttctctgccgtaacagctcttaagctcgttcataatcctattctctgagtactcgttctcattcgttgtcaacctaaacaaattatccaatgaactctttacctttctatagtatgatagtctttaggtgttaactgggttttggcgaatttaatcaatagtttaagatcatttttattatcaaaaggctccaaatcgtcatccggtccagattcctctaataaattatccaaaccctcctgtttatccaacgttgaaactatataatcgttcacagtctcaaagttctcaacactctccgaagagttaccagtgttaggcacctggtcactagtgaaaacagagttatccgtcgtgccaatagtactattcgtgtcaatattattggttatattagtagtagtattggtaatgctgtgaactgtgtttttaatttcgttaataatttgaatcgctttgttttgatgctgttcaggggtgttttcggaaatttttgagagtaaagttgtcaaaggagaatcagtagttgacatttccttctcaagtttcttgttcttttttaacttattaattaagctcttaatatcaagtttttcatctttattcaccagtgactttctcaatttaagctcagttagggataatttagtggattttttggaaactacgggagcttcagaagattccataaaattgtctgattcatacctctttccagattctgagcattttggtgatttatcttggtgttcattcgagtcaaaatcaggaaacgtatcaagatcctctttatacatgtcataatcactcccattaccgtgcataccctgaataaaaggagttgtgaattcatcttcatcttcgtcaagggctttaagaactttggggtcaatattcctaaaaattattgtcaaatagttaaattactcgatttcttcttcttccagggaggaatccacgggttcagactcatccttagcagaattttcgtcattaatatctgactctggatcaggaatcaactctgggttttctgaaataaggttacaaaatctatcattccactgcagaacatcgtcttggaacaagtttctagctcctgttatcgctgattcctctgattctttaagcgttcgacagtgcttaaaagggtcaaaatttttcgtttcattgagcatttctcccacctctaccaggtcaggatcatcactactcaggaactctttaatcaacttctctctctttaaaacgttttcataccttttactgttctcgcttgaaaactccagtttgtccaccaaattaccaccatcatccatactattggtgttagtgttagtgttagtgtcagtgttgagtgtgctggtatcagctattgacggatgaatgtaacctcttttgtattcatatttatctgtttgtactgagagtttactgggcttttggtggaactgttcatacaagtaatcgatcattttgtaaggctcatcgtacctattgacagcttcgtacctttgtttcaagttaaaattttcgccctgaacatccttaagaccaccaactatttcatcgttgagtgttttaaagtactttatgttaacgttcgtattatcgttttgattagatttgatctgttccacaccgttctcagtttcattaccaacttctccaactactttgtcagaatcagttgatttattatttgagaaattgaagggcgtgtatatatttgaagtccaaactttattgtcgccatatctaacaatttatatcatgaatagtactaaaataattctataattaaccctattataagggtaaattaagggtaaaatacttgtagatggatttttcgtcatttgaaggttcatatgcacacttgtccaagtcacacaacttgtgtgttaacctaagaaataatttaattttgtacaaacttgttaaagtagtctttgtctcgatttattttttgtttggtgctcaagtccttaaacagtttcttctgctcttctttaatcttcctttgctcctattaatatttttaacacattactcttaagtacactgtacatagtatcgtgcaagtagttataaactaatagtatagtagtagttagtagcgtggcgatattaagtaatatagtaatatagaaatgttgtatgagaaacttgtagattttctaagtatagtaagtaatcaatcgatgcgtttctgtttgcattaagtccttttaagtagtcgtcgtatcctccaatcgccttcatattctcaatatctcttactctaagctccttcataaaatccaacttatagtctcctataatcagtatttgcaactggtaataatagtatataactaataagagtatataagtatgtgattagtaaatgaagtgaatactgagatatgaagattgctgctcatgagtttctttgccagttatcacatttctttctaattcttcaaaaaatgtattctcagataaaccaattctggaattaaaggttaaattttaataagcaattacctgttttttaaaatgtcaattgatttaatatacaaattctccagcttgctgccgatttgatacctatctttattaaagtaatttttacctattgggctctttctcattctttcagttattttatagtcacttctgtgcagaaaagcgtctacgttagcgccaatatcaacataacagccaagaggagacttgcgaacaaccacgccctccacaacatcttcaatctaacactattgtgtaaacagtaacttacttgataatgcgttaagagttttctgtccttaagtgattttctagtttctaagaatctgttaattactttttaaaatacctgagggcggaattaaggacagtttaattgttttatattcagggttaattgactttatatacacgtcaagatcttctttgggagttaaagtcaggtccactctgtctacccagcccaaactaatgtccctggcatgtaaaaccccgaattttgtgctcccgatgtcaaccagggcataggttgggaagacttcagaaactcttcctttaagtctttcgccgactttatagtgacaaacatcaaatctattcttgttactccttatcttccacttctacaataaacattaggtctcaacacataaatattagagtaacagtatttgtaatagtgtgtgtaatggtatgaagtagtataaagtactggtttgtgatggttttgtttcttgttaataacatccaaatcatgatctaatatgttttttaccaactttttactaataaacctacaataaattatttttatacttaaaaaatcgtgataaaatggttagtaattgtaatagcggtagtaataataatactgtatggattttggtaatttttcttttatcttttcagtggcttcgaaaccgatatggccttgaaattcagtatcacagttaattaaagttacaggctctttagttagatcaagtttagtggtaaattgttgaaggttgggaatgtgagtataattgcgatatgagtgtattgttacaaacgatgtgaaaatgagtatatacaatatcatctttgagacagttagatatcgaaaagaggtttatctatcaggtgaataactccattatgacatctcaggttccagcgaagtatctttgaaccgtttacaaagatttccttatcaccctttgacaagtctccagtgtgttcgaagaacaaagatttgttattaatggtttgaagtttttctggaaattttcgagttttattgtacaataaccagggctgggttggagaacctagtatgtcacgatatagccataagttatgtgtaaaatgggacctcacgaaatcaacgacagaatccttgtatgaagcctctagctttgataaagcctgagttaagccctcatttactggaataaagcctgtaaaaggccctggaagtgataactcgtgagataacctatagcctaaaacatggttaaaaaatgaaaaataccagattcctcctcaggatttattaaacttgaaaaagaacgcgtaaaggggttgttattacagaatgaaagaacagtacggcgaatatatttatgttcaaaacaccagtaaacctttgaatttatgacgttcgggtcctttgttactcttctcaactttttcaagcctccaaaattagatctccacaacagggcctgagagataaacattataaactaaaaagagcaagtttaaaacccagtgatagaatacaagaagaagcatggggaagtttctcataaaattacaaataaatataagaatgatttaagaattaagtttatgacagataaatgtaataaaattaagcacgaccagagggtttagaacaaaattttccaaattagtgtgtagatttgtgactaagaatggaatcaaagtcttctcattgaatgtgtaatttacaaaaaaacgaataatttttctaaggtttaaatttgttggattcttaatttaatcttcaaaaatattatttttaaccataaattactgttggtaaagtcccgacaatataataatagttttaaatagtttttctgaaaataattttaatgtttaacttttctttttaatttttattttaaatatgtttggtgattaaatttttaagttttgatatgtactatgattttcagtcaattgttataattattttccttattatctcctttttttactattttgactccatgttatgcttaataattaaaataatggcattaatggcatcagttagaactcctgaaaagctcaggtatttaatctacttacataaatttccattaaactgatctggcaattaattttaggactttaatgtttaatatttcgtgtattttgggcatccatttcatataaatattctaatttcactataatattggtaatatataagtatacatgtgtacgtatgtgtagtagtatagtagtggtatgagattaggttaagtattaatttgattgaaaaattaacaggatttgtatcacgattagggttaaattagtaagcgttctatgttatcttttgcgtcaacgatctgctgattcagaggtgatccgtccctactggtaatagcacaagaaatcacaggacgtgaaactccacaagccctgcctaaggctaccttactatgaacaaagatataagggacattctaaaacatttttaatgggtatatagaaacaatacgtctaatactatggtaataatataatgataataataaaagtatgttaatagtggaaaaaataccttatcttcacatagaagtggaagatgcaaaataatttcaagaggttcagcatcagctgcaagtaaaacaatctcagcatgtcctctattcaaagcctttgtagctaaattccggattaatcagtatataaatactaaattatacgtattaatggtatatagataataataatatggaattgtctagtaaatggtgtaaaatagtgggaagaaataccttcattggctccttttttgagctgtttgtagttccctgcctgttgtacaaggtccagaagtactccgttcatttcttcggtagcgagaggaaaagcctttgatgcgctgtcgtttgtggtactcatttttaaattattctaaattattctacaggtttggaagtaagtttttgtttaaggaatcttagacaaaaaataataatttacaggagatggttaaaaagactttcaaaccagacataatttaatataaaaaattatttatgttacaaaatctaacttaataaaggaaatttaacaagatttaaaattaaggaatgtacgctggggcctgatgtcgttttgtaatatagattttacaataaattagtgtaacacttattttaatgttgatgtttctatatttttgttattatactcataacactgcaaaaacatagggtaattgtatgttttgtatacagagtgtatgttctctcactcgaaaattgtcataaaattttgttttccctcctaagtatatttaataattttctactttaaaactattgtatttgtagaatttgtgtactgtttttatatatgattttaaaatgccgctcccaaaattcataaacaatacaaatggaagctttttattcacctccgaatccgtaaatgagggacatcctgataaattgtgcgatcaaatctcagactcaattttagacgcctgtttggaacaggtttttaaaattttttatcatttaactcttactttaggataaggatagtaaggtggcgtgtgaagtgtgcgcaacaaaagactttataatggtttttggtgaaatcagtacatttgctaatgttgactatgtagaagtggtaaaatctgttttaaagaacgtaggatacacttcaactgctttaggtattgattccgatacagttgaagttttagtcaaattaaaattgcaatcgcctgaaatcgccaatgctgtacatgttggtaaagctaaagagcatatcggtgcaggtaccttctgtaaacagtactaattacactttactaattataactatacttaactatacacaattacataagtaatattaatggataggtgaccaaggaataatgtttggatatgcaactgatgaaacacctgagtgcgttcctctttcgcactatttggccgtgaagctgggccaaagactatcgtacctgcgcaaaagtaattcactgtcatatttgagacctgacgctaaaacgcaagtcacagtcgagtaccagaaacatacaaacggacacattgaaccaaaaaggatagataccatagtaatcagcactcaacacgatccaggagtacgtttcacacatatatatcactatataccaataggataataaatagtacatttataattaggtggattttggggttatgaaagaggatataatgaagcatgtggtgatgcaggtggttccaaagaatttgttggacgagaggacaaagtatcttatcaaccctgcaggttcctttgtcttgggaggaccagcttcagatgcaggtttaacggggagaaaagtaatagttgatacttacggtggttggggagcccatggaggaggctgcttctcaggaaaagactcaactaaggtggatagatcaggagcctactatgcacgatttgttgcaaaatcgctggttttaaatggcttttgtaagagagtcttggtacaaatctcttattgcataggagcggtagatcccatttccctgtatattgatacatacggtactgtagcaaagggctatacggataatgacctgcagaaaatagtacttaaaaacttcgatttcagagtgggttatataatagaagaactgatgttaaaacgcccaatcttcaggaaaacgagcgtttacggccattttggtagagaagatcctgatttcctgtgggaacgaccgaaagatctttcacatgaaaaactatccaataaccataaccttatggttaacggacactaattaactcactttgtatcgttaatattcttacattatatattcattgttgataaatttttggtgtggtttacacatcttaggttgattaaaatttttggcctctaggaagtaaatattatacatattttaaatttttcgatattttaaaagttttagattttgaaggattattttagataaaaattttccaaaaaatggtaaatagggtggtcccatacagaatctataattagaaaatacgttgtatatttattaactaaatcatattttaaaaatatgggtctaaagtgtaatttaaagatctttaaggaatcaaggagttataccgagtctgaaataaatagttacattgaggagttttttcaggaatgttccagactatccggaaaaccaacacataattcatttgagaacacaaaagcctgggagtatattaaaaaatgtctggaatcactaaaaaatcaggaggaagttgacccagaaattctcgacaaaaatgaagcctattcatatgtgttgaataagtatcagatatttgatcaggtagtgaatttggtagaaagaattaaggccgaagaacgggataaaatacccttgttcggtcttccacttgcaataaaggataacgtggcagttaaggggataccactgaaaaatggtatgtgtaatatttataaaactgtctttaggagccacaactgggccttatgaacccagtttcacggcaactgcagtagagtcacttattaacgcagggatggtactggttggtaagaccaaacttaacggttttggccttggggcaaatactacaggagttaagagcatttacggcgaagagtatattgtcggaggctcatcaggtggttcaggagttgcagtaggaggaaactccgttaccgtcgcaattggcaccgacactggtggttcagtcaggtgcccagcagctttttgcaatgcagtcggctacagaccctcaaaaggtgttgttagcaggtttggaatgcacgaactttcggcgaattttgacactgttggatttattacaaatactgtctatgaagcagtttatctagcttattttacctctggttatgatatcaaagatatgctaagtgaatatgattcaaaccttattaaacaatcttttctcgctcttttacacaactttaacaacctaaaaagtttgttatgtactctaacatatgttaatttgtcaaattatagaattatttatttgtattaagggagttaataaattattagtaccgttggatatgtggaaggggttgaagaatgtaaaaatcggtatgtttgattccgaggagatttttaaattggggtttattgatgaggagaataaagttaatatggagaatgctgctagaataacctcagaattaggagcagaggttataaaattaaccattccacccctggataagttgactgcaatttattacttggaaactgcgaagcaaactaccactaacgttagaaggttcaatcaatatccttattcgtcaaacaaatcaaccaccgttactgatttagtactaagttttgaaaaaagaatacaagaacgatttttactaggtactcacccatccattaaccatactattattatagtattgttatagttatatataatgtgaaaataaccataaagtgttgatattataatgttattaggggaatatgtaaagctgagtgaatttaatattgaagggttgttaaaggaccagagagaagagatgatcaaatgggtggaagagaataaactgttcagcgaagtggaatttttcataacaccgtcaacatcagaagtgttgccaaaaaagaatatagaattacaatctaaaaacgtttacatggtaagaagtattaagtcaaaatgaaattttagttggacttatttctgactatttcaccaatactaggactatgttcactcagtttgcctcttaggaattcaaataggcccaattcactacatattactggaggatactttcaggatcacagattaatggaagtttcgcttatttttgaagcatatttaagaacccaaaccatttcaacataaattaaatccaatgatatttaattgttttaattttaaaatacattttaaataattgtgtttatgattttattttaccatagctagggttcacctcactctagaacttatgatcacagtagaatctaattcattgtatttaaacttattcttgaattaatttaaaataaataactgactaaattaaagtttcttatacctgcgattattttattttttagagttcttgtccgaagcataactggatccagaaaattgatccattgttaagatttcaaaatgataaagaaaatgtcatttaaaagataaatttaaacacaaaagttttattgaacctaatggaggaacgacaaactgaaaatgaacataaaaagcctgaagaatctcccaactcaaagtttgaatgtaacatatgttttgatgaagttaaagatcccgttgttacgaggtgtggccacctgttctgctggtcctgtttgctctcctggatgaaccgcaggaactatcagtgtccaatatgccaatcaggaatttcaagagaaaatgttatacccttatacggccatggccaaaatcaaactgatccaaggtaaaatattttttaatttattctaataaatattcagagataagccagaagaaccaagaccgaaagcacagagatcaacatctaaccaaagaccaaattcagtacttgctactcatttatctatcatatatacgactgtataatatataatatatctatgatatgatgagatgtgtatatttagttttttcgaggatatgagaacagaatatcagtttcatttggatcatttcctttttcatttatttttcctatcgcatttggaactaacaatacagggtccttttttgacctcttcagaaatgacgaatccacgccaaatatgacttcaggtaatggtagaaataattttgtaaattatttagagcgaagaagagcttacgcctataccgggtttctctcccttgtaggattactaatgatcgcatatctcgttctctgtgtttaaattcataatgtcgattttttaatttatttcccaatatattgatagttttatcgtgcacatcttaaccactttataatactatatagtgtttagaaagttcttaaattttgattttccaatttcttatatttattttgtaaaatattgttttaaatggcttcggaagctggtagtaacgtggaacttttgttctcgtcatactcggtatttttcatattattttacaaataagtaggacgaaagaggttacgttcccagtagtgttttaaacgaattggtgtgtgaattggtaagtatttttaattttgttttaaatatttttacattttctaagtggaatttgaataaattaattaaaccgtagggttatgcaccttcccttaaagaaatgtcagattttaagcagaagactggaggccagtgcgatttgacttcttttaaggcgtttttgaagaccatcgtccaccctgaagatacacacgcaaacctaactgaactgttcagattctatgatcccaatgtgaggatatataaattaaattcctgtagaacaccggcagaattagtaagaaacagctggagagactcttaacaaacgtaggagaatacttgtcagaaacggaaattgaaagattttttaggtatttaaaaaaatatattatatttttagtgttttatgcaacgagacggatgaagtggattatgaagatctagttaacaagtattataaactttaaacattacttttagactcctactaaagtgatttttatttatacactctacccaaaaaattcattctcagtttccataccacctccgtgaccatcctttcccttataattttctttttccctgtttaattcttcttgagttttttctccttttgggtctctcaccaaatctgtgtctctttccaatttcttttcgttttctttcaggtggtccgtttcaagtgcagggcctttctttctatcttcctctagagttttctcgtaatcaggcctaggtggaatctgctttatatctggttctggtttattcattactttatcaatacccaattctttcaaatcgtatatactaccgagaattgtaggagtgtctcgaatcgcctcaatgaattcgtcagtatcttttttgatcaattctgcctcttttacctttttgtcaggaccaaagtcgagatcgaatatgttaaccaatattgaggtttcaccctccagggatttgaaaaattctttagtgtcctctttgattagtctttgcttaattacagattcatctatacccagatcgctaagctcgtatatattaaccaggattgatgaagtatcatgaattgactttacaaacttttcaatttcatccttggacattggggttttacctttaacaatacccattctctcaatatcgtacagattagcaatgaccgaagtttgtctctcaatctttttcaagaagtcagcagtatctttttttatcagcttctgttcaatcaaagccttgtcaggaccaagctccttattgtcatacagattcacgaggaccgaggttttcccatcaagtggttcgaaaaatttatcagtatcctcttttattaacttagcctcccggacttttttatcaattccaagctctacaaggtcgtaaatgtttaggagtatagggtcggccttgatcttctttaagaactcctcagtgtccttctttatcagtttttgctcaagaatatctttatcaggcccaaagtttagctcaaacaaattagataaaactataggtctccctttgatcgattttatgaacgcttcggtgtcttttttgatcaattctgcctctttgacctttttgtcaggaccaaagtcgagatcgaatatgttaaccaatattgaggtttcaccctccagggatttgaaaaattctttagtgtcctctttgattagtctttgcttaatgatatctttgtcaagtccaatctcggttaaatcgtagatgttggccagtattctgggagtgcctctaatagattttagaaagttatcagtatcttctttaattagccttctctcgtctgactcagagagcttgttcttatcttgtaactcaactttgtgagatggctcattccttttatcatctaaacagtatttgttaaagagtgaattaaaagtaagttaataacaaaaatacctatacttgaaccgggatggtgtggttttagtggttcaataactaaataatttatattattcgtcgaaatcgtttactataactagactatcaaatttttgatttgtattaggttgacttccccactcatctaatactcataatataaaacaacttactttgaggatttattacgtaatataggtcgtatccagcccatatcgataatccaagagagaaaatggcatatattattaataatatattagatttcttcaaaatatccatttgaatttaactttggggttagattttgtttatggttttatgccaccagacataaaaaatgtttatattaaaataatgcaatcgatgtatgcgaattaaaatgattaaacatcgaacctactttaaattggtttatttaaaaatggtctaatcgagaaattctatgtattttaactaacacaagtcgaatgtgataaaaacgttcaataattgatataaatatttattaagtgatttaaatatttattaattgatactagtatattaaaaatcaatttattttaacgtttcgagtacaaaaatgtgtatttcagagattttgaggggatgagtactctgagtacacgaccaataattttgaggggataaacactcctcaggaagagaaaggcgcattcatcacttataaataataattaaataataaaaaggaacgaaaaataggattaaaaagagtagctatcccatgaataaataataagtatagtaaaagtcaaattttaaaatgtttgttaaaattccaaaagtgagaatgtgtaaaaatgtgtgaaaagtgagggtcaatacagtttgacaagatggaatttcgaattgaaaaattcaactttttgaaaaatttataatgtacagaatcagtgacgagctgagtctccaaacccaagctgtcaaccatgctcaatgtgtcgctgaccaatttcatttgtatctcatgcaatggttccgaagaattgtcatcgtccactttaaactcttttgaaccaccgctagaattattgttatcaggagagtctgaaattatcaattgcaaaatttttaaataaacataattttcaaacttaatgtactcctgaatcacccagcgaaaagagtccgttttccctaaatcataaaagaatcttaattggaattcgtcggaagaatgtaaagaaataccaaatagtttcctccgtgacaaagcgttacgaagtaactcatttgaatcgcaataagagtagtgtaacgtgaagggtggagtgatgaagagtaaaaggttcttcaaaatatttatcttttccttattggggttgttgtcatcaacattcctattaataattgggtataaactgtctgggatctgtggaataggcgttgaaagggaatatctggaaatcttcagatataaataggttagtaacgtcattgatgaagtctgtatcgattttttaaaaaggttgtttgtaccaaacttttttaaaatatccgaaactgagtccagctgatattttttagcattatatttatcaacttgcagtattttttcaaacataacaaccaagacgaataggtctaacagcttttcagagttccagagtgccaataagttagtgtaatctctagtgtttttgtagttcttgttgaaatttttaataatatttattttactgggtgatcgtggcgatatattatggtacaaattgatgcagtgtgtaagttcttttgggaattccgtggccatatttaaattttctaaagcgatctctctcaaacaaagctgatatattagggattttaagcgtatatagtacattagaaattcatcccttccagttaaatggggggtgatgaactcgttaaggaggttctggttagatatcgaactactggtgaattggtagggatttactcgtattgttcttcttgagtctgtatctgggcatcccaaggatttagacagaccaagctgcccatcatagcagtgatttcctttgtaaatcattggctttttagatgagtacattgggatatatgaactggctcttaagcagtcaactaaatcggaaacactggtgaaattactacattgtttggccctgaatcttagatgcttaattatcgaatatgccactgttatctttccaattctagaatttataaactcgttgctgccctcaaccaaactttcatacaaaacatccttcaagatagtatccaggtgttcaccctttacagaatttacatcgttcacatcattttgcctcaatctagatgtcgctgattcaatagttttcatgcaatttgtaaaggaattcataacaacactataacagattgaaagtgagcctgaagaagctcctgatagtggaactgtgcagtttatgatattataatcacacagatgactcagaatccccaaatggtagggcatcaaaaagccagaaggggaaaatgaaaaccctatgtcggactttgaggaccctgctctaaccaatttgctactgtccagtaaagaaactccttgaacattttcatggttcatttggtaatctcggcttaattctacagctccaatcctttggtaatgtttcaaaatgtcagaaatgtagttactagcttctcttgaaaacaagcaactatcgaaattgtcacatgagatttttagatcattcaaattagaatcactcggatccactaaaacagagttcacggaactaagtaatgataagaacaagtgatagtaactgggatcatttgaattttggaattctggactcgagtttgggttcaaataaaccaagttgaaatcagttccgaacaatttgtaagccttgaaattattatcttcgttgggattatgtctaaatgatcttatgtttaccccaactaaggtgtcgtatttcaatccctggttccttagcaagtgatttaatggtaatctgagtgaaaagtcattataaacagaatccagagatagatcaggctcattttcctcgtaattagataacttcttgtgatttttcaggttcaaatgccttaagagatcagatggaatttcagaaaatttaatttggtctgaaaatacctttatacctagtgaattattaaattttgccatcattcggtcgaagaatcacattaaatgggcttaaagataaaaattagattagtacatgatttatatttaatcatttggaaatgtagtaagaaaataaacatttatggtacaaaattaaaaatacacatttacgttggactagtttgaagcgacaccataaatcgaaaaatctaacatgatctacttagatataaaccccaagatctggttatttttagtttcacaaattttaaaatatgcgtgatcaagataaaaaatattttaatgaaaattacttgaaaattgtccactgttcggttaaaacaagaatgattccacaggataactgagggattccaatcattggtatcagatcatttaaaactaactaaatttagaatctaatactgctataattgtttccaaactaattaaattctttccaaaatcttccatatgctcagaatctttatatctgctcataatttctgtgaaagcttgtaaagccgcgtttctcgaaatttcagctatttttagaggtgttaaaagggacagatagtttttgatcttaatgtgttgaaccaacttgtccatttgatcatgaatatcgcacctcaaattcaaaaacaactcaaaacacttcctggccgtgttttcatccatctctggcttagataactccagcctttcagaaaatcgtccttcctaattatgaataattagatatgtatgtaatacctggagaagttcagcctgcaattcagagtagtcttgacatgtcgttacaaataaaactgaatagtccaacgcaaaagtggctcttagtttaaattcatccaactctctacaaatgcaagaaattagccttttaaggtatccttcttctcctttcagggcttctaacccctctaaaagtattacacacttcaccgagtcccttctagggcctaaattttgaaatttagaaacatttattaccctgtttagaggatgaaaactgagtccaaattttataaaggaaagaatgtataatcttctctgaaagtccaacttcaggtcttagaaagcttaaaacattaaatgaaaataatacactgttcatctcttgagctaaacattgagccagtgaagttttacccactccagagtctccctttataacaagtcctaccgagggccttttattgcgtatgtcaaaaaaatgacaaatctcttgagacaaaaacgaatggaggtcatttttagtcttttcagtaagaaccaaagattcaaccccagttctgggaaccactttgccgttgacctccttcaggggacaaaagttattagtgttagaaaactttgacaactcaggataaatgccaaaagtgcttgaaaaatcagtgatttgtctcaaacaggttgctttttctagatactttcgataaacatctccaaagtttccgcacttgtccctcaagctttcacaataggctaggcggtttagtaccttaatctcatccaacgtgtatcctctaacaatcttaatcatctctctgaatatttacattagtcataattaataccttgaaaattgattattcaaagccgcttttgagtcggacttagagtacttcttaactgagtcttgtaaataaatcaatttagaattctcatcaaacagcccatcggaaattgtgccaagatttttaaacctattcgtaagaagtactaacggagagtatgaaaacgtttgtaaagaagaagagtctcccctaaaatggatatcagaactgctgaaacctgatgaattgaattcaccaaaaccaggactgttgggttttagaaaagcaaatgaaaataatggaagtctcaatgttccccaaagctcagaatactcagaaagaagatccagagccatagatgcaaaatttacattgttattctcagtattcaaaccacagttgaatagagcctcgaaatttttaatcattacaaaactgaacgtaaataaggatcttaaagttgaattcttatcattcagtaggtgatgtagtttttctttaattttggcctttagaaccaaagaattagaagttatcttcaaaagttcatactctaaagttggggattttttattatgaatcaggaatttaatcaaacagttctgttcgttctttaatagttttaccaggttatcactagaaagaggatctttatgatttttatccagactgtcgatcactttacagcaacttctgcaacaacaaacacccaaataacaacgatttgtataacaaaagttcgacccgaaggttccgcagtattcagaaaagtcgagtgtataaatacaactcaactcatcagaacgaggtggctttctacagtttaatggtttacataaagtggttctgagtaatccataaacgtattcgtagaagttaaggtctaaaagtaaatgtaaagattcaatttacctttatttgaatatatggtaaaacaactatgtgggaataaatgtgaacaattttgaatattataaaaactcataaagattgaatcacgtattaaagttaaaattgagcccttcaaggttttaaattcatacgaaaaatcagtaaaggaatttgatagattaaaatcatccataaaactgatcaaacattctgcaatccgaattaaatcttcattcagtgattcagaaagtttatctatatcaattataaatgaaaagaagattaaatgtccttaccagtgaaattattacttttagatttgagtttggaattattccaattgtttacattccaataataatgaaaagaattttctaagcttgaaatacgttcatgggaatgtttatcctgagtttcgtttgtgtaattctcaagaatccagtgttcagttgataagttagaacaaatgtttaacccagagatagacatatttgagttaaattaatcaaagttctattttaaatgagacaataaattgatttaaattaattgtatgttcatataatcttaaataaatatcaagagtaaaattggattccatagggcagatacactttttataaatttttatttaagatttttacacattttatattaacatcaataattcatttttattcgatttttattatctatataaaaagtctttcttgataggttatttaaaaaactaatttctgaatgcaccataaacaataaattattaaatgaaaatgaaaattagcaattttaacctgtaaaatatttataaatcgtataaattaatcgtttgtaatttgtaaatataaattaagtgtgtaaaataaatgctaagttatcgtaatatttagtttaatgtaatcatccgcgatttcatgtagtagaaatgcgtatcaacaccaactgtcactttttatcgtattttaaaggtatttatcttgaaaatggagactaattctacacattcaattctttacggaaatatagaaattcctacttcccatgttaatctatacgcattggatgagtcggttttattatatgaacctacacctgatgatgtaataaatggtgaaaatcgtaacatctttaacaatgtgccaataactgatcacgaagaggccttagtggaagattttatgaagtttatcgctaacgatcatcttttgaaagatgattcaaataaagaaggtctagattggctttattcaatggaacctgaattactcaggtttctatattcgagcaaatttgatttcaagaagactttggaccatttgtttatgaattacaagtttagaaaatccaatatgttgccggccaccctaatggatatagaggatgagttgaatcaaggttgtttgtattggtttggaagagacaaaaagtgccgaccgactttggtggccgacgtattcaagttacaggatcttccaatggagaagttggtcaaattagtggttttctgctttgaatttttcctcaggtattattcacatgagtttaacagttagtggttatatattataatatactttcaatattgtaacgatgttttagatacctacacgttggtggtaaatgtgaaaattacaacgttctgatcgattgtgataacaaaggatttgttcagctcccagtccagatgataatacagttgactgaaataatgaactctaagtatagagggagattgaatagtattttcttgataaactcgcccaatctgatcaatatgataatgaagtccttaaaaggagtgttacccgatcgaattttgaaaaagattgttgttttgagggaaaactcgtcagagactttactggcactttataatcctaaccagctacaggaaaggtttggaggctcattaccaaatctcaccaaagattattatccatttcagttcttccccggtccaacaacaagtggaatcaataactgtgataaaagctccaagtataatctgttcaaaatgccaccaatgacactttatggctcctgtttgatactgaagaatagtttatcaggttaccttgatggaaataatgataaaaatgctggtgattatttgctcaagaacttcaaatatttcatattttccaaggatactgcagaacacttgatcagtaaagtcccgggactgaaagacgagattctcccaaacatcatccaaacccgtgaagatttaacaaattttgtgaataatttaatttacaattaatatacacgatatatattaggctatgtgtattagtatagtttaaaataaaagattaaagagtgttaatgaatatacttttgtatcagtgtgaggaacaagctttgcacaagatatgaggataaaacagaaaaggttttgcatttaaatgtatttctaggtgtgtcaagaggcccaagagaaatgtaaagagtggtagaagtggaaaaaaacaagtaaaagtatgtgaaaaccttgagggttaacaggacataatgaagaggatggaaaaacatgagaagactaattaaaatacataatttgcaaagaagagcaagcggaatctgtgtgtaaccacaaaccgagaggaaaccaacaaaaaccttcaaatttattttcctaacaaagtaataattacataaaaaaattgaagatgccatcaaaaaagtacaactaatagagaggaaaataagctcaaaaaaaggaacaagagttaacaaacttctggatgaagttaatctctcactaaaacaggtagaaaagaacaatgaagatgaggccataatgttaatccaaaatggaccataaaggtcagggtactgtgtcattgagcacaaagttttgtataatttggagttacattccaatttgatcccatctgtgatagaattagagtcctttgtaccctgtgaagactttgacaagtttaactcaatctcatcttcattggggagagtaacctgaatttggtcctcagaaggagaatttgaaaatactggaaatttctctatgtcaatacttattgacctattggggtcctttaaattattaagaagagttcggggagttatgtgtatacacatatatggataaagagcagctaaacatctttcaaagtattcagaagttgataagtcaaaatattcctttatcacttcgaaatatcctaaatgtgttaaaaaattaggtccggattcaatatcttcctttttaactaaatgggagccattatcatttacaccagttaagtcattagttgaagaatcagtaacacatttggattctttatcgtcatttaaaaccataatttaatttaaataaatgtatggttaaattttttaaaatttttgagaaataaatgataaaacactagagagggttattcacaacacatttattccaaaaagcatataatttattattttaattctatttttaaaatcggtgtattatatatttttaaagctgttttatataagaaataacttatcatatttaaaactttttcgtttgtaatatatcaattgtttcttgagattctttaaaaatacaatttaaatctgaaacaaaaataccctttttagaatctatattttaatttaaaatgaaccttataaatagtaggaataacagtaaacccccttcgaatcagaaaagaatgtctagagaaaatggactatgagggcattcttgataaaacaagagtattcagtgataaaaatcttttagaactgacaaaggaagatgtagaaacctatttatcatttttaggatacacaaaatcccctaagccatgtcaaaagagttctgagatagcagaaagtggtaacgaagttaaaaatatactattttttctcctttgtaaattgttacaagattactcaaactatttaagccctaaaaaagtcaataagaatggtaaagaagaactgaaaaaagagttgaaaagtcatcattatgacctattcagatgtttgatattgaacatagaaaaaagaacaaaactttcagtttataacccagtgtttttaaaactcattcactttaacatcaatgaaagagaggtgaatttaaaggaggatgatttagaaacatgtgaggagaaactgaggagcattttacacctaacttcagcgttatattttaattatggttcacaaatccataataaaaatgagataatagcgtttagcagtaatgaattgaatgaattgacagagttgctgttgactgatataaccatatttgaaaatctcttgaatcgttccggtaatttgagtgaaaatgatctgaagccgctggttaagacgctttctgtgatattgaagagaatagaggtccttttcagagtaataaaattcacaaacaagcctattaacactaagttcctgaatcaactcttcgtgttcatttatcatctggatcagtttaagaagattaactcaaaggttatgaatacttctgaaaagtgtatagagaatacaactaatggcttgggtgagattgaggaaaatatatttgaagtaatcaagggaaatgtagaagataatgttatacatttaatgaacaattttagtaatgaagacaatgttgagaaggaaaaggagaccgtaaaaaatgaaaaaacgtacgggttttttctgttattaccaaaaatagttgaaaatatacctgaaaatcaagaaactatcaaaactatctgcagtaaactgatgtcgtatgttactgaatttccccagaaagatgataagacaagtaacccccaagtaacacttattgcaataaaatcctattataacatattactggtagttaaggataagacttttctcttgagtgttgttacagaatcgatggagtttatattcggtcaactatttcgtttctacgagcaatttgcctcatcgaacagtaatcatagggaaaggaataataaacgacaaagtaaactgctgaaagaagaactggactactactggaaactactgacagtagttagtaacgtaaaattggaactagttgaccagaatatggagaagttgttcgaacttttaaaaaaagattttcaaatattttcaaccaatttattgggaaagaaaacgttgtcgttactcaatgatatatcctgcaactacaaaccaaagcaaaatgatgatagtgaagtggatagatttttaaaaaatttagtactgcagtataacagcataagccagttgagctcaattttcaagtacatacatttaaattcaaaaaatagacaaaatgaagatgtagaagatatggaaattggtggtgaaagagttcagaaacgtaagcttataatatacaaagatacagttaagactaattctggaaaaaagcttaaaacgtcagaaaatgatttgaatggtgtcaaacatgacgctaatgaaaaatcaggtgtccagaaaccatttgaaattaaccatttgaataattattcaattcttaaggctataaatgaacttgaggttaacagtattgaaataatggaaaacttaaagataatggaggagtttgatatggaactacataccattgtggtggtgtaccttagtagggtggagtttaacacgttgaatgtaagcaaattggcaaaacaattcgtgttgttttgttcaaaaatctcagtttctgacgatgtggtaggattgtcgctgcttttacagttgattcgggtctcaagaaaattgctttccctacttagtccacaagtggaccctacggaagtactcgaagatagtgaagacaaattcttggaaaatgaacaggatttgattaagagcttgttgatagtaatatacaacgtttatgtttatgtaaaggagaattttgacacttcgaagaatgaaatgataatgttgaatatactatacaacataatgctggtaaacaatgaacagtttaaagttgctgcagatttctatcataaaaatgataaaacacaagaaataacaccaaaagagagtggtttaagattatttaagatggaaattgaacagttgttaacgaaactgttgagtaattgtacaagtaaggaggtcgctggattcattttgactaggattaagttgtttgaatgcgaaaacttgaaggaaaagttgtgtaatttgtcctctccagaactaagcgagtactatccgaaccttaacaaggagacttcaatgtattgtttcaaaaaattaattacagataagaaaattaacaacgagaaacttaggaatatagggtcattgctggataatatagttgggcgtgataacgaggaagtagtagatatattgttaactaatataaacactaaatttagaaaattggcctcaccctcgtctgtttttgtggaaaggataaccatattgatggaattgttgttatttgtgttaaattacgaattcccactcaatgtctctaaaacctgtaaagcagtggtttgtaacgcaaagaacgtatttgatattatagtctggctcaaaacagttgtagactctggagaaaaaatgaaaatagttaaaatgttcagtaaatactattcaatattcacagagtatatatgtaaatacagtgggactgtaaatggagctgaaagctcagacaaagatgattgtgggttgaaaaatacctgtgttctagtgaataatttgttgttaaactacctaaaaaagcgggaaaatggttctaaaacaggtaatgaaacaagtgaatcaggtaatgaagatggtgagtattgggaggtgtattttctgtacgaatatataaagtgtttgaaaataaaaaatgttgatatttacaataaactatcactatcgactatattaagggaagctattatatcatattttaattctagaaacagtgatagtcatcctgataaagaattaggtaatttggtagtaaaacaagatgatattgaactagtgttcaagaatgtggacttaatagataataagtatatatctaaattgatcctctactacttaaattccagaaaattccaatttaaagcggattgtgatggagacaaattatataagttaattatgtgtgttataaaatcgctgaaaattaggtgctcatcaagtgtatcgaaggagatagatgaactgaacaggtaagtcattatgtagtattttaattttttagatttttaaaagataacacggaccttaacaatgaattgattttaataacattggatcacctgattgaaagggatgaaaatacgccaatttttcaaactatagactgtaggaatgagttgatattactgttgtcactgattaatgccagtaaagacgaaaacttatatttgtttgaaagaattattgaactattgaacaaacaccaagattatataaataagagtgccgaagataatttttctaagtcagtggaagataacttgatactaaactatgtaatagtgtataaactgaaccaacgtaccgtacctgacaaggttaaagataacatactaaagttagtacaaataatattgaagattataaataagataaagggagatagtgaaagaagggattactgtaatatgctgttgaaattgattaatgtgttagttgggagtgttagtaagaacattgacctcctaatttatttctattaccaatttaaccactacgtcgtaaacactagccataccggagatgattggaaatttttgattagatttaccacctcaataatcaactacaacactgttaaatacatcaaatcctatgtcccattgttattgaccgtggcagtcaacacactttatgaactagaaaaaagtagtgaaaagaggtttttgaacgcaagagaggttaagattctgagaaagtgtatagtaaaacatataaaaacaactgcaagtaaggctagaatatataaattactcaagaatgaaattaaaccatttttcaaagagatggtgtcgaggtgatttaataaacaatcgccacaataatatcgttactgtaaaatagttaataattaatgtaataactaatacacactttatgtaagtaaaaatctcattcagtaatagaatgtttaagttcctgtcaaagaatgccaactttccctcatattcaaatatctcacgccctattttacaaaccaatttgaccttaacgccactcatgcaaagatccctgactcgagagtaaactaagttattcctgctagtaagcccaatcagcctcaagttcagtaattcacttgaaatcaaacctaaccttttaaaagccttaatgtacttggccaattctaaaagttaataaataatcagtgtgagaaacattaatctaatgatcaaattgttacctttactcaagaggttcttctccttgttgggaacagctgaaccattttcaggatttttatcataaatattagaattaatggtagaagggaggaatttatgctgaattgaccaagggaaaagataaatcaagtgtgataaattctttaaagatgttttgctgtttctaacactgatgatcgaattgtaaagcttctataaagtctatgatagtttatagacgtaccacatcggttatatctttcaataaaagattgtagaaaaggtcacagtgtgagtcgagaggtttattgatgttgaaatcaagtagaatccttccatcgaatttctcactcaatatcgaataatacattcataattatttgtaaattagataacatataaaaataaaattttaaattttattaaaagtggaatctccaaataaatatagtgtgtaagcataactcacaataaagtaagtgttactttataattaacatttttacggtataaaaaattttaataaattagtttttatatatttaaataaattttagatgttatatgcaacaagatcaactaaataaatagatcagagatttatttgtatcataaagttttaatcagtatcctaaaacgagtatttaaacatttaaatgtatgtaatagttttatacaatttttggtgtaattttcctttcttatcaaactaagtggatcagtgattttgtaatttttcctctcatagaaatatatttcagatataacattaaattaatatacacatatattatttattgatatattatgttatataaataataaatttaccgagaaatgtggaattgaaatggaatctctgtacgaacatcatacaatgctcaaaccccaaaactcatttggaaagggagttaatgacctaccaaatatgaaatcatacatgaaacaaaggagtataaactttgacgagaacgtagcctacaaagaaatcggtgaactaggtggtggaagctctgctgatgaaactgaggctgacgaatgctacattgattcaataagaaaaggatatcaaactagactaaaatctgtacctttgttcagtaaatatacgtttaaagattcagttatcccagtgggcgatccgaaacatcatgccagaaaatctgctctatataacagaacggaatgtttggaagcccattatattgctcactttgatgttagaaataaggctacaagactaactgaggagttgaaaagttttaataaatctggaagtgaagattcagaagagagtgagaccaatgaagagttttatagttttgaaaaaattattgaggagcccagaagaagtgagaatagtaaaattgatagtaggagaagtgagactagtaaaattgatagtaggagaagtgagaatagtaaaattgatagtaggaaaagtctaagtgttaaatttagtgttagtgaagtggaaaataaacgtgaaagtgtaaatccgaaaaatgatgaatctcatgacagacttgacaagtttatagccgatttaggcgatttacaaaagattaatcaaaaaaatgaggaaccatcaaaacaggatgcaaataaggagcctataatagaacaaataaagatgaaggctaagcaagaagaatttgaagtttttggtgacagcgacaaatcattcgaccttgatggagatagttcgtatgataaccggtgttcaacacaggacgatgaagtaaatgtattctacgtatcaaaggataaaaacttcttaataacaggaacattagaaggatttgtaaacgtttgggcccttttaagcccgttcaccagagatgaattggaccatttgactgaagacgagacctataataccaaaaataagaaaatcctaaggtggagtagtttgggaattgaacctgatttgagttttaaagcccacgaagctggaattttgtccgtgcaaataatgccaaaatcatttgacaataacaagtcagaccacgtgctagtgacgacctcttatgataagaaattaaaggtgtggagactaagtaacttatgtaaaatttcaaataaaagaaacttcaatgtttatggcggctcacatgacaggaaagaggttagaaaaagaactaaaaagattaagattcagcttttgggtcagttggagatgattgaagatgagtttgtagaagcagtgtatattccaatactaaatgaaatcatagtaacaagcttctttggaaccattgaaaagtttaaattgctaggtgtggataatggaaataggcaaaaaagagccaaaaacagtctagtcagtgtgaccaaggtgaccaacgaagataaccacgtcacagtaggaagcttatccactgggcataattattatgcaataggtacacaaaatggagaagttaaagtttacgacgttaaggacctaagcctcgtagctacttttatgtgcaggaataacaagggattcaataaggaaggtaggacggtgagtggaattgagtggaataaaaaggaaaacttcatactagttactactatggattccagaataagactgctctcgttgaccaatagtgatagctcgagtggaatatccttgagattactgaagaaagagaaaaaattggagtttgttgaaaaattcaaaggtcatataaataagagaagaggatttaaagcaagattcttggggactaatgaggagtttgtaatttgtccctgtgaaactggtagaatccttatttggtgtatagtttcgccttcttattatccggaagaacctctgaaagaggaagttgaggaccgggaattgccagttaaaaataaatatcacataacattcaagataaaagataagtatttgctggaaaatatgaatatttacaacctatgtgagtgggaaaaattgtttaaaataatcaaggattacagaaaagagcttgatgaaaatatggaacaacaacaaggatgcttagttttcagaagacctaaggaaccagaaaataaatatattagtcccgtaaaagatattttactaatatcggccaccaaagataatgaattaaagttttctggacttgacataaattattttcaataatttttaacaaaacgcaaaaatataataagggaaacttggtttaacacccaaatttttttgtaaataaattaaatttttgatttcagcatttttttatgataaaaataaggttagataggtatatatatgataatactttgaatattatataattatggcagtgtgaagggaaatgtgcaagaatggaatagcccgatcaaatgaagaatatgagtgattaagcataccctcacagaataaatagcctcacaatttataatattcaatatcagtatagtctcattgtcaatttgaacactgtttaagtgatatctatacaaaactaacattgagctgtgtaattaagtaactacacttttcgttgattaactacatatactcactattaataaagctgccaattataataggaattaacaattataaactagaataaactagcatcacctacaataaactattattagaaagctttaagatatggaggatagaagtaataatactggaaatgaaaatacagatgatttcattgaaagctttgggtcactttttagaacgactaggataataggtctcgaagccatggaaaagaaggatgaaaaggtagaagaaatcaaaaaaattatggaagaaataatgtctggtaaaggaaagtggtatagaggtgttaaaatagaaggagcgattccgatcgcattgaatatcaaccaagatcaatcaggaactcacttcacactagaaaaaagagaatgccaaaaaacattcgaggccaatgaaggatacaagtttaaagaaatagttgagtctttcgatccttatgtgagtgtgcacagatttgaagataatgactgtgcaaaagtggtctcaatttacgaggaagatagaataggcctgatgacaattaccttggaaagtaatacacttatgtaccttaaaaaagtagaagttgctggcgattctgaagatgaaacagaatctgaacaagaatcttaaatatacataatattatacactatataatacctgaattaatatacttattaatgcaataataacagtgtaaatgtgataaatgggaaataataagatagtcaagatgaaggaaattttagtaaaaaatcaaaatttttagataaaaaattaataaaaaattaatttcaacaatttttcgttgatgtgtacatgtttttaggaggattccttatagagtcgcccaagaattataaaaatgtatgttggcatttttaaatgtgttcttattgattcaaggtgtatttttagtttattaaatgtgtttgccccaatttactttaacatttatctttgttcaaaatgaccattatcgcaaagaaattttcagtcggcagtttttgtccacttgatattccatcactaacaataaatcactccttcatgaatttaaagagatgtaaattatgggttttctgctgctttagacgaccacaattacttcaagttgcgaacatgattcggtgagttcctaaacccctatgaggtgtgaatattcgttttaattattacatttccctaagattatcctaataatcccccgagatgttttttaagaatcgaatttggtgcctaacgatatatccaggccacatgactatgggtatacttcgactcttggtttccgtggtacatggaacagtgccctttgtacgaacaatggagacctgttccagtactctagtcctttcttatcagtgttattccgatgcaaagttagtcttttagcctgtaattatcctaatattttaaatacggtatcagaacattctctattaattttggcattaattaaataaagtaggaggatataattttgaatcgcttgcaaacgtcgacaatgacattcaacttaataatgaacctgaagaatatcgaaatgaaccaaattttaacgaaaaagatttaaataattttttgtcatttttattcatcatgtaccatccgtaaattttaatttaggttgaactgacgttttataaattgtgatgaatcagattactgttaataaattttaatttggagttttgagtctcctctgacccacagataaaaatgagtcgaaatactaggggaacctttaaaactctaaattttacattatatcatatttataccaaaggtttggccaatcctattactgtttttgacaaacataggaggagtgtgtaatgacctttttgccgtctctgtaagatatttaaggtttagtccaaacttaacctcaggtttttggtaatatcgagtacgaaaagttctagatatggtaagattttagatagaacataattatgagtacctcgttcggataatagttggtgggtctggggtctctccacgtatctgttcacagaatatcttttagaaataagaacctgtataaaacacgtttatcattttataacattcttcgatagtaatatcttattatcgatttcaacactgtttaataaagcagaaattggatagagtaaaatcgtgtgttttgtagacacactgaaatttacttaaataacaaactattggtttgaattttataatattcaatatcagtatagtctcattgtcaatttgaacactgtttaagtgatatctatacaaaactaacattgagctgtgtaattaagtaactacacttttcgttgattaactacatatactcactattaataaagctgccaattatgataggaattaacaattataaactagaataaactagcatcacctacaataaactattattagaaagctttaagatatggaggatagtagtgttaggaaatcagtaaaacaaaaatatccttgttttattgaaagagttaggtcattttggggaatgattaggctatttgattatgaatttccaaccacttctagccaaagagatgataacaacactgttttggaagaattatcttggattaataatgaaattcaagagacctacgaggaagtggaagaaaaactaactactttagatactgtgtataacagatcaacaagaggattcacactagaaaaaggagaattctgtaagacattcgacgctaatgaaggctacctgttcaaagatgtggttaaatctggcgaaccatttataacgttgcatagttctgaagataataacttcgcaaaaaacgtttcaatttataataaagatgaaaagtttctagttatcattatttcagaaaataatgatcttaagttcaatgaaatagtagatgaagatgaagatagtagtgatgaagatagtagtgatgaagatgaggatgaggatgaaaatgaagaaatttttgaaatagtaagggtagtaaatagattcattgaagattatgatagttatcatcgtgatagtgaggattcaaccgtatgctcaactcccgaacctgaagttcatgaatatcttgaaatagcccgacttgtggttgtagaaacagaggttgaaagaaaggaaaagatcgctgtggatattacagatcaaatttttgatatgagggatttacagataataaaattagatgggcaaagtgcatctaaagatgaattaatagttcgttcggacggtccatatgtcatgatctactttctttttttaataaaagagctgatttataagtctcaaacgctttggaaatttgataaggaaaaatatttcagacacccattcttcctatcatttcatatattggagagaattttgtacatctccgaggttcaaaattgttgtaatcataaatatttccaaatgattagttcggaaagtggattgaggatatctgaaattaggaaattcacagaaaagggtgatgaaaaattcagtcgtaggttaaaaatagtcaaaaatattttgtttaagtatggagctgagggaaatttattcccaactaataaacctcggtgtcgtttttctattatcagaaggttcatcaactggttatccagaagtaaagaagttcgtacttcgaaagaattaacttgtgtcaggccccggaaagttgaacatgaaatgttgaaactttttaatatattcatagattatagtttaatcaaattggatataaattctaatgataagggagaaggatatgatattcatcttgctaaagactacaaaacgtacacagcccagccaggatacggattctcggtagtagagagaatggatgaagactttgaactcatatggtcaaccgcatatcctgataaaagtgtcacatatctttcaatctacgaaaccaaagaagaatcgcttgcaacaacgctacttaaagattcaactctaagatatctttacaaaccaagacaatacctgaaacccatatcgggaatggaaaaaatagtagacaacgatactagatggtttgacgttgcacatgaaacttttgatgtgaaaaggttaaaaggagtaaagtcggatgacaaaaagttgtcttatgatgaatttgaagtattcgctgtaaaatgttatacagtcatttttttgggatgtaacctaagggcgattttgtatgacgatgaatttctttggcaactagaggagaatccaaaatatggaaactctgtgtttttgatttataatcctatttacggtacatcagctgtttatcaccattacattaagttggattcttacaagtcgataaaatttagatcgccaacccagttgttcgaggaaaaagaaggaaatatgcagtatttaaggaaaaacatgattcgcaagtatttactcaaacatttcaatgaatataacaaccgtcgctgtggattgtgtaatcacgtgctcagttaaaactccctatctcaacacctcagacttctattcataagttcacttacttctcatcatcttactatttcatctatcaacacctcagacttctattcataagttcacttacttctcatcatcttactatttcatctagcttcttagcattgcttcacttttctatttacacttcactttcatctattttaccaaagattcgatctttaactcacactactatgctataatattataatattatggtgttatattgttaactatatagtattagggtgtattgataagttacatttatgagtagtaagagtaggaaaaatttagtagtacattagagcgttagttgagcttgattttcttcttaagcttcgagtaagtctcaaacagcctatgtttgtagtccctgtaacgcttcttgtacttgtttttagagtggcggtcagtgagaggtttaggaggctcagaaaggagcgagtcctgactagagttggtcctggaaaggaaaagcttacgatcatcaagaattaaagtggatttaagaagatcagagagaacaaaatcgttaacaaactcaacgaaagcgtagcccttggatttgccagcagaatccctgcaaatctttaagctcttaacaggaccaaacttggactccaagaactcccgcagccgggtttcatcagtgctgtagttcaaattgcataagtaaaactctcgatgaacagaaccagaaacctcagagtgagatgaagcagagccaggctggggctcaggaaaattggaaccaggcctgttaatcataggagttgaaggtaaaatttgaaactccagctggtcgtggtttatggtaataggccagccgtactcatcaatgaacttgtgaatcacacacttagaagcgttctcaaagccaaactcaacataaaatcccagtcgatgcagttcatcaggattgtcagtatggaaggggtgggtggtacgaatttctttgacgttgaagccgttaatgttgaagaaattggtcaaaacaagctttaacttggttaaattatacttagaattaagcatccgtacgaagatgaccttctcctcaaaaagaggctttgtaggttttgaaagctgagcagaaagagtggggaacttagttttgcaggattcaacagcagataaagcctcagaatttgttgaaaactcaacataacaggttctgttactctttgtaggtctaagttccacaaatccaggcatagctgagaaaaactcagtcagttgtggaagctggtcaggagaaaagccggaaataaaagcagttgaattctcagaatcaccctttaaccagtttataatacaattcttcctagtcaaaagatagtgaccaccagataaattaaattctgaaggaactggtaactcgcttgtagaactgaacaaggtattagaagtttgaagagatgggggatccttagaataagttgtaataggtgagttaactctgtcagtttgactgtcagcatcactactgacacgatccccaagtgactcagagtctgcggttgagaaattaagcttatactcgaggtttgaaattgactctgggaatttagccgatatatcaagtcctggaagcgtaggaccaaggtcacgcctgttaaaagtggattcacaagttaagaccagaggtgggggaagcgtaggttcctttgaggatcgaagttctggagtgacatcaggactgcatgaatcagaatttgagagtctggaagtaatcctagataatactggcgaggatggtgggggcattggagcattaggaggaactggaggcgcgattgaagggtctgcactttcagaaccgtaccaagtggccctggttaaaatttcaacatcctttaatgtgagcttattagtcctgtgctcaaagtctttactatagagtttgggggatttaagttcaaattctctgaaccccaatttgggagatctgtggaaacgctcaggctcattcaaagatatggtcggtgacctgatgccaggagggaaactatagtgtctcctaataatacttgaaaaactaccactgtctgaagaggtttcagaaaaggtttcaaccttacgcctacgtctatccctcttcagaatattactcagacttatagcgtctggcctagatgttggggtactctgactagcaacaaccttgtgggctcttttgatatcctctacaacgcctgaagtttgaacataatcaatatactcctcggcaacgtcacccacattgacaacagaaacagcaagttcataaagccaaatcacaagagtgtgaagggaagtcggctcaaagtctgacttgaagttgacaagtgagcagaagctcttataaattgtagtcacaatatttggcatgtttgggttctcaggctttaatcctttcacagtgtcaatcaaatatagccaacaaaatgagtcatttttaaatctttcaaggagtttcccaactgcttgctcatactcagaaggcacgttgaaggacaaaagcttaagttcatacttgctccagtaacttaaaagcctgtaaacagcacgtgatctgaacgcaggatcaagatcagaccagcacttgaagagaatgtaccgacagttcttcacgtcttttaggtcaattcgcctcacacaatctgcggcagttatgtgaagactgatcctgtgattaacatccttaacagcagtagttgacttctgcaaaaggtcaagtatgtcctgaacggtctcagacttcgaggaaacgagtagaaaatagttaatccaaatgttcaatgatctgggcatgtgtctgcaggcccgctcggagatgtacagagacttttggtaactggtttgaagggcgtagtttgcatagttaatccataaatcgtcacgctcaaagcccaaatcatccaaagcacggtgataagttatcataatcctaggcatgtcaccacatttaagctcaaaatcaatatattcgttccataaagagttcatgttatctcgactcatcatctcgtgaaagtccgactgaatcttcaactcaaagcatttccgctgctcccagccctcaaagccacgtttgtgcgctgcttcagccactgcagttggttttctgtagtcagagggtaattcgctctcccataccaagtattcatcaagcaagtctggtaaaccagccaagggtagttcaagttgtctgcaaaatagagatctaaccttatcaatctgagcaccgtactggtctctaggcaactttgaaatcaattcctgctcaaaatggcggtattcagaccataactgaggcccatcaagggcatggaggccaagaacctccaaacttgactcaaagagagcacgcaaatggttaaaatcagacaatgtgtgactgtttccagagacaaaccttaaatatgacagccaaatgtagactgaaggctcgttttttacagcaagttcatataacttgataagctccggtttaggggtggaaatccttttttcttccaaatacgacagccaaaatgtgtcatctgctatacaatacttaataaactctcgtctgaagtagtcaagagactcaaaatcgttttgtgtagaggcacatttcataccctgagtgtacagatcctgattccaaggatcctcctctaatttagcccttatactctcaagactttcgcctttgtaagggtttatattattttcctctatgtcattacggttatacatcgtttgtatttaattttatcgcattaaagttccggaggttgcactactaaacgacgtacataacatgacacgacatagcccagttcttaaattatcttaaacaaactcaggtcaaatatttttcaaatttaaattcccttaatataaataaattttatactacataacctcaacagatcgcttctgttaattatacactgttcaaattttccattttcataattatttgtacaattaatatttaaatttaaaattctaagatgttgaataaaataaaaaaataattaatctgaattttatggcttgcattccccctaattaagattctactctaagaaaaaacaaaaattctctgaatatttgatataattttaaaaataaaaatagattctatttttactcctcaagatcataatttcaatttttataaatatgaattttttgaactattatttattatagagaatttctcttaattagtactttccattgttccttgcttttcctagaaaaaaattcttaaattattacaattcgatgaagtagtttgtaatttgaatctcatttactgatgtgtctcgtgagataattaaatttcgtcccaaataacgacatttagtaagtttgttttcctgaagtaaacattaaattttaataatatcacttgagattctaaataatggagaaatttaacttaggtgtgtataaattttgaataaaataaaagattagaaatatgagctcatggattgtcgacaagatctactaaatttgtagtcaggtcagtaattacgtttctataagatcgccaaaacgtttctctcatccagtaaaatactggattttgaactatgatattaggaataaacctaggaggtatcaatcccatactaatccttgcgttgttgtacccgattgagaatcgtgagtataaataccggagtaatacagataagataaaatggatttccaatagttttgaagattcatccaacataagcaagttacccgccaaagcgacgaaactaacggcctccataatgctgttacaaataaccaaaactacaccaatcatgacaactgagtaggttgaatttcttatgaaggtgaagattgggattcttgtgtgaactgcaaataatgaccataaaaatattaaaaactgaggaataattagcaaccaatatgaattgtattgaatggtccagtttatagaatctgcgttgaagtaaattatactaaataatgctatggaacctgaaactttgaagggatttagaaagagattaaccctagcagatacatcagtttccagaagtgcataagggataaacctaggaaacaaaaactcaagaaagaatgaagttactacaaacatagttaccagattaaaaaatattgtcaaaagcaaaaagctccaattgtctttttcaacccctatggtaacacttggaaattctagtaaaggtaaactttgtaagttttttatcctagcctcgtttctttttgtaacaagtaagtttattttctttaataaaataccaacttcttttaaagtttccttaaccaaatcttctaaaacaggttcaaccccctcattctcagtctcaatagccttaacgatatctctaattaaggaacgaagtttatttttgtgttcatttagtgttattttatcagtatttttatcaagatttagctcttttaaagcctctattgttaccttgtaatcgtctatgaaccgctcaacacccacctgcttgctagaaataagagtagaacactcgtgtagactttctctcaatttttcaacggttttttcaaatttttcaattaattctgaaactttagtattttttaaacgtaaataaaagttgtgaaaatcttggatttggtagtatttggagtctgaatctaataaaacatgattagagttaggacccttgttccactgctcgaataagtatcgagaattaactggaagattaaacttgaatttttgaatctcttcaagtaaagataataattcgtcccggatatcctgaatctgaataattaaatcgtttaaattgacgagagctttgattactgattcaatttttaagtcgtataataaatctaaagtcagtagtatttctgatgcatctttcgttgatattggttttatttttgataaatagtcatcgaacatcgctttaagcccctcttctatttctacaatcgcttttttcatgtcattgtatgattgttcaaggaaacccgtctcatggacatcttcatccataacactttttaatatagaggatagaatacgcagagttttggttaatttaggggttcctgttttaagtaaatctttgtaatcgtgtactgaatccagtttggtttggaaacttgaaatttgttcccatagaatttttaattcatcctgaatgttgtagagatttccaattgttttcacaatatttaattcctctactactttacaaatattccaaccaacatttgcaccatgagttaaactgttaaaatggacatttacagcttcagaaactgtctgtacttcctcaaaaaatgattttcttaatcttaagccttttaatactgtgttttctgaattcagtctagcgtacaaattttctccatcagacaaaattttgagtattttagatttcccaagggaaactattttttcaattttactcactatttcatccaacaacaccaagtttttttctgtatttaatagataatttgatgttttcatatctttattggtactgtgctttgtttccgaaagctcggtaacaaattttttaacactatttaaaaatgaaactgctttttgtttagcattagaaatttgttttaaactttcaacctcattgttaatttgagttaaaaaaccatttatgaattgagacaaacctcccattcccagtaaaattttattgatttcaccggcacttttttcatgttttttatattgtggtgtgtatatatcatttagaaaatggtaccaaaggataaaccctgtaatacttaataataatgatgtccatgattgtattttaataatcagcagagggttattatctgaaaatatacttagggccagttgtaggaaaaaaacaagtgcacttgaaacgtctgtgcatattataatatataacgagaattgaaaaacattggtaaggagtgtgctataaaagaatccaagtaaaaaagcttcataaagcagcaaatagaatgcttttatgaatgcagcctctgtgaaatgaagtaaaattacaaaaactaatctacaaacgacaattaaaagtagtgaaattagtgaaaaaattgaattatttaccgggattttaaaaatagcaaatttaaacaatgatcctaaaatggttaagagggtacgaaatgtgtacagtttacttgtataaaactgtgaattaacctgtgaaatccgaaatacacctggaaaatgtcttgaataaacattcaattggttgttagttaaaaaaataactattacaataaaacaaacaatcagcctgattttagcaatatctgttctatattcatcctcttgttctgaactatgggtttcagaggattgttctccactcatgacttataatatttgtatagacaaaattagtggtgtgtagcattatttaattattaactcagtttatacggttacaaattcaattttaagagaataaatataaaatattatacatttaatgtaaaaacaagtatataattataaattataatacaatatatagtcaaattaataatcactcatgatctattaatagatcttgagtgggggaacaaatatttcaaggtaaaaatatgttaatagtcggattttcgtttatatttgcaattggttatcacttcattatattaattggtgttcatagtaaatcatcttatttattctgtattattaaacttcaaaatcaaatagttatatactgtatacacattgtatatattatataaatattattgtttatatgtttataaaatgaactgaaaataatatatttacaatacaagtaggtaataattaatacagacctaaatatttattgtgtatttaacaaaaatattgaataggtaaataaattataaatcttatcagagatactgtctgatattcattttgaaaaagaagaaaatatctttgaaagtgtattctaaggtccattttatcatgcaccaaaattcttcacaagaggtcatataataattagtggtataagttggtagacaatggcccaatcgaacccttgcatgattgtatcctgctgataactttgagaaaaaataagtacaaaacaactctaaaagttgatgtaataataaaaataagagatttgtgtgagaaaatccaaactggtaaaaaacgtaatgtgaaaggcatgcataacttacagactccattaaagtacaacaagaaatcaaaaacaaggacattactaacacccttcccgtggattccgttattaagtgaaaaaaacgtatttttgtgtgaattgccagaaatgtaaatatcaaaacaatgagtggaggaccagcaagtgtccaaacgtaaataaaatatttatcaatcaagagggtaaaaatgttgagaatatcatccaaaatgaatactggaaaacaaaataatagctctataataattcctagtaataatattatttgagattgagattcatctaaaagagcatgtggaataattgaaggataaagaaaatgtctaaaaaagcaggccactgtaatcataatataacaaaatattctataatcagattcatcaagtaagattttaataatttcattttcgaatttagttatattttcaatgtctgttttgatttcactaattttttgttcgtaaccatcaatagaattgctgaatgattttattttttcttggagtaaattgtcaattttatctatttctttagataaatcattaatgttaagtgtgttcgaagataaattatcaaaattaaatggcgtgttgtctgatttatcataaatttcacttaattttttttggagatttagaatttcagaagttaaaacaatcgagtttttagttacaccattattaaacaattttaaaacctctgttgtttctttttccagttctgataacttttctaataaatttaacaaattatcttttttagattcatcaaatatttgctttaattcgtaaacttttttaacaaatttattagcataatacctacttttctggctggtaaatttggttttgtcattttttacatgtgaacctgatttatcttcgtttacttcttcgtaaagtttttccaagtttttattatgttgatttacagattttttacaatcttttaataaagtaaaaaaatcattatttaaatttaaaatgtcagatataattgattgtgactcatctaattctttagttatatctgctaggaaatctttttctttaaatttggcagataattctccaaaaattggtttcactttttttggcagttttagtaattttacatagatagaaattgccttttccatattctcattttgtttgtataattcttctttataaaaaataggatctttaccatggtaataaaagagataaaatgcccataatccaaatgctataatggtaacaaccaaacacatgaaaaacagtatttttatcattattaaaggtttgatagatagaaaaggatcgtatacaaattgtattataaagaataaaaaggccaatacatggatagacaagaatgttataaataagtaatgtggaacaagtaaaataagaaacatttggaataagccagacgctatagactctatacataaaagcaaataaagtctatatgataagtcactctttagaaaactaaaaaataatataaaaaacctagaagacaccaagagatataaaaaaaacaaactaatagcttttcgagcaatatcaagaccaggcccccgagaaactaaattacaaataaagttaattaaataaccgaatgcaaacccaaacatcattaaaaaacttcgataactagttaatttagaaacaaatattcctacgttgtgtgatggaattcctaatcctgatccaaaataaccggaagcaaaatttatctggtaactcattaaaaatgccgtcatataaacaagaccaattattagcttaggaatataagggtctatttctgtcggaaatttgatgtccaaatcctttaaccgttcttttatttgttgaataatcccaacttcttctttctgtcgttctccactgcctgactcggcagacttggtttgatctccgctcatttttatgtgtttattgtaataaaatttgattgtaatgttattaaacacaaattatttggaaaatgaatgataatataattaatttttgatagaaatgagatcatattacaaccgagacaagtgatgtttcatacatttaatttataaacacctatattacacaaaaaccttgatcccttattgatcaaattaatgatcattcatattattacataattcatatcatggggaattaaacatttttggatcaaaaaaaggatttattagatctggatgatctggtgagtgtgttgtaaaactaaatgttgtacaatataattattttcaactatcccaattataaatttatgttatgaggttgtataacatgatgtcatatttttcattaaaattatcattattcgccgaggtcgataaccaaaactgcttgtctataggacaaatttaacaccattgtaacaataacataaaataaaaacacaacacaaaatagtgggaatgtccatatgattctgaattaaaaaataaaccactacgtcgtaattgttaaatatttgatgagaattaatgaattgtggtgttaatagactatgatattaatattaaatggttaaaaatgaaaccctccttcgggaacaaagttatttgtgttgaacttatcgttagtactagtaaattcttcctcattgaattcatagtcatcaggaaagaacctctgtagtatattcctcgactttttataaattgtagtcaatttgctttcttgtaatacatccaaggatcgaagcccatcacactatagcattattaaataatatataattagttacctcttcaattacagctgtgtatggatttgaagataagttattgatctccataatgtgctgacctactgtgagtatattttctagggctcttagggcaacgctaattaacttagtatctgtagaggtcagaatggagcagatgggtttgatacatcctcttgaggcgaggttttcggcttgtttaagatcaccccctgaggcggcgttgcaaatagcccaacttgcctcacgttgaatgtcaaagtcattacatgacattaattcaacgagtttttcaaccacgtctgattgtaagaatgactcgatctgtgacctcgttcctgctgaaatgttagaaagagtccaacaggcctccttttttatagttttcttttcagaaaataggagtttgtacagaaccgggatacatcctgaatcaactataacttgagtttgtcggtcatttccagtagcgatgtttcctattgtacgtaaagatggtgtctgaatcactggtaaaacatgatccataagttgtattagtcttggacatgctccagaatccaatactgcctgaatatggtcttctgatccatcagaaatatacgataaagcccaacaagcgtctgttaatacctacatactcattattccacaataaaaataatagtatggattatattatatatctgtgtataatatatatagtgttaataattgagtaagatacttctgaatctggatgctcgattaattttgccaagtagggaattgcaggtctaatatcatcgaagtagggtttgggtttacccctgcaaaggttggaaattgtccatgtagcgtttcttagaacactgtccttctgagaatttgccataagataaagcaaaggttttaaagctccaagactaagaacaagatcacgacattcagcagagtcacctgcgatattccctaaagcccaaatcgcctgctctctcacatcttccttgggggcttccaaaagggctattaacttaggaacagcactaaatcatattataaaaagattattaatcattttatagtatatactattactatactatataatatatattggtgtaggaatgactaacccattatcagtggcaactttggtttgctgttgattaccagaggcaatgttagtaatagcccatgcggcttcaaactggagttctggagcgtcgtatctggataaaaattcaacgaaaatgggaacgacgccggtattaactatgtgttctattggagggtcaagctcaagtgacaggagcttacgaaagtgtttagtacatgttaactgagtattgtaatctgatgatttaaggccatttacataaggagcaagagctgaaggtgaccaatatgcgttatttagtatagattccctatccaaatccttgatctcgtcattttgagattccaaggaagaatcttggagtgattggccaagtaaattttcatgatcagcgggtagcccctgtgatcttcttttttgtaaatttttatcacgtatttgcttccttatctgggattggatatcctccctctttcttcgagggtcctcaaaaatctttttgtattccttcttccgatcctcacttctaaacatggttcaaattgattttaacaaaaattaacattaaaaattttcaactattgaaaaagtttagcagccaaattatggtttatgaatattcatacgtttatgcattccctacataatttttcatatagggccgtgaaaattaaatttttaataaattttaatactttaaattagagaattatttttaaaatgtccatcatcatcataacaaatgtgaataattcagtacatattccaataactgtgtaataataattgtgtacacgtataatggcatagaaggcgttgtacaatattaggaaatcactaaaccattattatgtgaattgttaattcaataataagtggaaggggcacatattaattttttcctgatttgttagacgccttgcgttttgaggctggttcatcgtcagaatcctcttcatccacttcgtcttcgtcaagttcgtcttcctcttcttcctcactatctgaaaggaaggcgtcatcctcaggctcgaaataaccaatcacatgaacctcgtttggcccaccctttgtagttaacttcaagtcaccggtagtagagaaaaacaagtccaaagttgcctaatacacagtttataatactctcatgagtactactaccgataataacattgatatatgtaaatagtgtgcaattagttatagtggataaaaaacaaacatgttcattaacatctttttgtaaggagcagaggttatagactttattcccgtcaactaactggacatatgtcctctcatcacttttaggctcatttaagcatacttgagagagatgaacaatgttagccagttcgttcttgggagtaacagtggctcctggagctaaaacggcgcctaaaacaacaaattaaattttgtcaaatattttgaggatttattgaataaaatgtataaaaaatttttttaatatatggacgtatgaaagtaccgaataacatctttaagaaactggggagaatatggtatatctaatgaacaaaatttttatgacaaaaactaaaggacaatcctaaactaaagaagtaataatacaaaataaatatattatttatttgtcatctattgggtagaaaaatacagcgttgctatggggagttgaaatctggtataaatagattctacaagataatattaccgattttacttatttatataataaaaatcgtcccaaactcctgaacttattcaatctttaaccaaaatttatttggaatttataatactgttcaatttatattatactctaaaacgttccaagattccaccttaaaaactcttaaatattatgtaaaattacgtaatataacagatatagaaattatatgttaattttagtcaattaatccatattctatatataaatggtaagtgagaaaagtgtgtgttaatgaatgtgaaagtataatttaaaagattagacgagtttaactgcctccggcatatccaacatatctccgtaaaagtatattgcacatgaaattaatacaaatccaacagttctaaggcataatctgacattatcagataacaatggctccattggaggctccatcatccccgggaacatcatctttaatattttactaaatgaaatgaaaatcgtcaggttaaagttaaaattggtataaataaaaaattactaccatatatttaaatgataattaaataaaataaaaatacctgtgattgttaaaataattattatttaaaatttaattaatgatttattattattgtagtatgcttataatgaaaatagtaatgaacaattataaataaaacttgataaatcccccatggagattctataaaaaatacaaagaagtttatatttaataacacatttgcattttaatttaaaatatgttaaattgatgatattttaattagtttgatgagtttgtactatatttatgtgtaatctagacttatgttgtttttaagtaaaatatgtaaacattggcattataaaacatggcaaagatataccgccggttatttgagaacatgtaatattacatatatttcccatttctaattttcaaaatttttattaattaattttataactggatgtttagttataaagaatcgtttaccaaacaacgagcttataggatatgtgataaacgataaacatcctaagtccgtaagggtggcctgtgataggtatagttctctatatgtatttggttatagatatatgtatgtggtccggtataagaagacatttagaatgaccaaaaaggtctgggttcatgatgaatataaagaggcaagactgggagatatagtaaggatacagcctcttggatataggataggcccttggaaaacgtatgtattaactagaatactacacacccaaaatccacaccttgataacttttaactataatatattactatgccattggtgtactatacctaatatacatattatgccattggttgtgtgtggtaaatagtatattaatggttaggattatcagttgatgatcttttggcaaaaccagtttttaaaagatatgtgtgtaatttggtaagactgttcttgctgtgaacagcgtcatattcttcctttttcttctgttcttcctcgaaaagcttacgttcctccaacttcttcttataagcgcctgtaacaaatacctctccgatattagagtcagacttaagttcctctttaagaagctgtttctcaaatgcaatatcgcgttccatttgacgctttctagccacagtaaccatcttactcatgtaccgagactctttcttactttcaacttgctcttcaggttccttatcatcagattttcccgttcttccttgtgagtcattattcaaatctaaactcgatatgttcttggattcgtctacaaatccaagatacttaaatttagccgattcttcggtgtttctatcaggtacaagttcgtcatacaaatataattgagggtcaaggtcaagatcagaattagccttatcagaatagtctagagcctttgcaaattttctagctttaagagagtcaaaagtaggttttgaattttcaggcttatttctagataaaaaatgtttgccgtcaatttcatggtcattatcgagtgtattatcaccctttaacccaaaagcgaggtttaaaatactattttgtggctttttaaactcatttttagttaattcatttttatcatctgatttatcaagattcttctctcctccattattcgtttttaaaacaattttcattataatacatattaaaaatgagaataaagtatatttaaatctataatacaaataaaagttaaaaataaaataaaataacgaataattatacaacaaagtaataaattaccgatttatcatcccgatatgaataatgatctaaataaattattaaatctgtttttgttttgttttctgttttaataaatactgttttttatattgtttaaattttttgtaacaacataaaaatggatgacgaggaagggaggttattcagatgtagaaggacctgctgtgaaatgctagaagaccgtggttacttcattcctgtccaagaaaagttggaaacattcgcagaatttaaagctagatatgagatgcatgagaaagtgttggtttactcacatggttaaataattttttaggcgttctaaaatgttactagttgcatcccagaggacagcttcagaaaataaattactggtttacttcgctgatgagaagaagaaaacaggtgtaaagcccatcagagagttggtttatattaaataaataatttattccagacttactgagcgtatggaagaccacgatatacacagagccattttagtaactcaaaatgttctaactcctttcgctaaagatgtaaacaattatacaattcataccacttatttctttatataactaattttaatagtatacaaccttttactctataaacactgttttaggcgataatggaggcatatcccaagaatataatagagaattttatggaaactgagcttttagtaaatataactaagcatgagctggtaccaaaacatattcctctaacgatggaagagaaacaaaatctactccagaaatacaaggtaatattaattttatttaattgttttaggttaaggagagtcagattcctaggattcagtctgcagatccagtagcaaggtactttggtctatcaaagggacaggtaataatactatactaaagttatatatttttaggttgttaagatcattcgaccaagtgaaacagctggaagatacgtcacattcagactagtcgtataacgatttactgaaaatataactaaaatttcaaataaaattgtaaaattaataatataataatagtataacggagtatatggtacattaaattgttttgtttaatcttgattaaaaattagaagaggttccaaatgttggcattcccattactagaagctgtagaaaactgatttgaagttttactaaatgaaacatcaacaatagaagaggaatgggagtcaagaatacatttgagatccaaagttttcgtttcgaaaactctcacacatctgtcccagcatccagccaccaaaacagcaccatcaatccgagtagaaagacaattaataccgggtggttttaaagagtctggagaaatgtttttcgttttcagtaaaacaattcccttgtcctttgatgcgtaaaacatagaaatattacccacagtgtctcctatcaggaaaacattgttccatacagataaagagggtataggttccaaagaatcagtaatgtaaacgggaacaaagggttcatttggttttcttatatcatatagaacaattgaaccagattcgtaagtggatataatacaagaatcgccaatagaataaaaaggttgacagttgtgaatcatgcccaattcactctttcgagaatgatttatcttaattggacctatctccagtacttcaccaaattttacagtacctaaaacattgttttctgaacttttcattacgtaaccaactctaaatgtattaaaataattttgagtataaaagtacctgaattaactcttaaatcaaaaactttaatcaaatttaaaccggaaggtgagattataaggggttgacttgaagaacaagaatgtagtaaactaaaccttgcaaagcattttgtattaatatgagctgtagcactaatattcttggcatttaaatcaaataaagaaatatcatcgttggtttgtaaaaccaacatgtcaaatctatcagaaatatctaaaatgaaatgttactgagagtataaaactgtacctcgggagtaaggagtacaaaatttagtctttatattagtttgaaattcggaaatctgatttccagttatcaaatcccactggcaaattttaccagtaattgaagatgtcagtaaacaatcagtaaaataagtggaggatgtgaacccatccttgtatctaatacatgtaacgggttcatatttcatgaattataataaaatcaattttttattggtaatataaactaataataataattttggtgagatcctaaaaaagtaaaagttttaacaaaaagtgtgataaattggaatttaatgttttttaactatattaacaattttaaattaattaataatggaaaatatatgtttaatagtgtaaaggtgtaagtgatgttgattttaataaataaataaataagataatattaaaataaaagatttttaaaaaattgggaaataaaattatataaataaagaatctttaaaacggaataaattaaagagttttacacaccatagagtcaacattactattacataccccagagtgaaagacaattatatataaatatatttatctttcattgataaacaatatttattaattatttttaatgggattatagtgactgatattgagttcatttatgtaatgtacacattttagaatacattatttgttataccactgatataccaatattatacaagattctaacatgagtagaattaattacttattaaattttaaaaggtattttggaggaaccttgcagcttgaaatgagaaaatcaatggtaatgccagctgcaagcgagatgcccttatatagaaatgtttttgacagagcagataatccgagattgtggtcgatggacaacacaaaatatgaaaaatcaggccctgtaacagaacttagtgatttggttacgcctcatggccatgggcacttgtttggaaacactggtgtaactcgttacgcccattatgtaaacgtatgggaaccggttttcccaagaacaccagatatatcaaagggcgagttgatttcaggagctaatttcactaggacaagtggatggtactctcctaacgaaccaacaatagtatcagtgggtaaattgtcccctgctaaccagaggccgatagggtatgctgaaaactgtgtaattccagaatcaacatacccagaatcatttcctgattttagagaatatagactaccacgtggcactgatagaaaggctacaatttatctcatgactgcaactttcttcttcttctttttcgcctttctaaggtcattaatttgtaaagttgttcattacttttggctcacaagggtttgttttttttgatttaataattacctcaggacgttgtagccgcaggctcagttgaagttaatgtcggacaaatgttacctggagatcaaattactgttaaatggagaaataaaccagttttcatcagacgaagaacaccagaagagattgcaagagctaagtacttctttatctactctactcttaactatataccctagggctacaccttatttacctaaccactacactattactaatatataatattgtataaatatgaatataggaaagatgatgcattatttgatacaatgagggatccagcaatagatagtgagagaaatgtgaacccagagtggctggtaaatatcggagtgtgtacacatttgggctgtattcctacaagaggtggaaattacggaggtttctattgcccatgtcacggatctcactacgattcctcaggtaaaataataatagcaataataataattttaggaagaattagacttggtccagcaccagcaaacctagaagttcctccatacaaatttattgatgataacactattaaacttggataaacccataaaatgataataaaggttatcatctcattgttttattagacctaagtatatcataaacctggagagtgatgattatttcgttcataatcaaatggagtttcgattggacattcgctcaattatttgttccttaaactccttaaccgatttcaaaatattttcaacactgttgatgataatattatggacaaataatcgtcctcatcttggtaataatcgtctaattcatcagattctaatggggaattgcagaatatgttttttatttatttaagcacttaatcacataatttcattgtttaacttataatatgtgtttgtaaaaattttttctcttattttaatgttaataagcacaatgatttggcagtaaagccaaaattaaaatgtgtatgcgtttaaacgctatcgataatgtttaatgtttaataatctaaaatagcctgtaattttaaataaacccgtaatatatctaaagagatattattttcccgtattaatatagattatctactctttttgttgattcataaatcattgtattgtatttatggaggagaatgggaaaacctcaagaacaatcactcctaagtcatgtaaaatacaaatatgaaaaggaggaagtaactgaggattgcaatttctgggaaagtgaaataaatcttataaaaaaatgtagtaaagtagaaggaaaagatgtttcatactatggaagaagaaatgtatttggttttctgttcttccattggattaccaaatggattagtattctctcaaacaagtatttggaaccgtacaagttacacccgctgcctattgcagaccaaatactctactggcaaccaatcttctcaaaacatgtaagtgattcattgattgaattggaaatggaggaatatgaatacaatcaactggggaaaaataagaaaaaacaaaagcccaagaaactaattctcttcagagctatagtgttcacattctggagaaggatattactagcaatgataggcatgatatcgatgaatattctgagtatgagtatcgcaattttgttaagtaaattgtttaaattgatgatatctgaaaatttcaattatggccctatatttggactcattctggtgataatagtgcttgaattatccaaaggcatatgtatagaccatgtaacgttttatattcagaggttaatagtcatggtagactattcactgggaataacaatattccaccatggtttgtgcctaagaagaaactactctaaccttgattcaacaaaatataactgcaatagtgttttacatagttgttctcctggttcaaactgttttaaaaatccatttttatgttcagcaaggcgccataagaatttcgatatcacacctaaaatgtactcttataaatttgtagactgctattatgtaactttaatatttgacaacctgacagatatagtcaacttcctaacgaatttcatatacggaattatactaattcatgtccaaatgaagattaaaatattcacagtttcaataatctcggtatcacttgttgtatttatgatatttgtggaaatattcaacagcttcctgctcaaattctattacgcactgagggaccatagaattagtaaatcatatgaaatcataacaaactttaaaataatcaagactctagtcatggaagatatcgcagaaaacatgatcacagatgtcagaaatgacgagctggtcatgatagcgtacagatttttcctttccctagtaaataaagtcctgtatttaataattgtaacatgcgctcttgtaattataattaaagactttgttgagcagcttaaaaatacatcagatctaaaggagattgattcttcgtcaataataacactcttgttcatattacttaagattatagacccaatgtttttgttaccactaacactaaggatgttgattcttgttattaattcatacaatcgcatagaattctttataagaacttgttcaccaaactattatcaatcagataagttcctagttgacccaaatctcaagaataagctcttttcaaatcgcagtatttatttaaaacaacatcggtgcctagtagattactcaaatttaaaaatcccagagcagagaaaagactcacttgttgatggctctgtgataaagtttgataacgcttcatttacatggatttttagcagagaggatttagttaagaataatgagattcatttgaagaatataaactttcaacttaatgggggtgaaattgcaataattacaggcccgcagggttgtggtaagtcaaactttatcaagtcaattcttggtgagatgactttggttggtggttcaatgtatgtaaaaccattaagtaaatcaatgccgatattttatgcatcacaggatgtatggttgaaaagaggaactatcagggcaaacataacatttggacatagatttgatgaggatatatataactcagtaattaaagctgttgagcttgagactgatatattcagctggcaagaagaagatttgcgtactatcgttgatggtggatttgaacttagtggtggtcagagagttagagttgaactggcaagagcagtatatgcctacatgatttatagtaagatggcgaaagaacagtcgagacgtctttcgttcttaatgtgtcttgattctgtgtttttgggcttagatccattcgtaggaggtaacatattcaacaatttgttcaattctaaaaatggtttattgcataagcaagacctgtcgattgtactaacagcaaccaagagattattggagacttgtttgtcaacatcaagcccaaataactttggagatattaagatttataccattttcagtaaaaaactaattctcaagactaatttaagagactttatacttaaatttaacccagcttactctactacactagatactggtaataccacaactggtggaacgataaaggaggaaagtgatgttgatggaaatgttatggaaagtggtgttatagagttgtatagaaagtgtaaatcaactgaatttcaaagagtgccacgtagaactgtagttagagaccaatatgatgacaaaagtggatatggatcccacaaatttgatagtaacataagtatcaaaagtattgtactaaaacctctcctgatctatataagctctgcaggctatccatttttcgcttttttattctttttgatatcgtgcacaattctagacaacgttagatacatttttgcctcaaagctgtcaaactttgttaatgaacatctaaagaacttagaaaactttttagacgataaagagaagtgtaattctgtccactcacttatcaaggaatacagtactaaatccttgacacgaataacatacgtttctatttttgtaatcatcgcctcagtttcagtagttgttgcaatgaccctggtctcattgaaagcatcactaaacatccacgaatattcacttgattcagcactttataaatcttcagcgaaaattaaaataaagagatacatatcggatgtattcacatttttgtcctgtgatacactttacattgacctcacaattggttattacctgttcgaatcgttcataatagtagttgaaaccataattcacatgatcatgttggtgtatttgttacccacatccgtattttttgtactaatagcgatggttttgataattaaatttccagtgttctcgtttttaaagggtctttcgaacatcagatttgcatatatggcctcaacaaatagacttaattgtgttttaaacgactctatttcaggctcaattgtataccgcagctatagaaaggaaacagagctggtgactgagtttgtggaacatgcagattacaatgctaggtcacggttcatggaaagatcagtttttacctggacatccattatgtgtaggtgtatcttctcagtgatgattttcttgatcattctaacgccaataacaatttctaaatttgtagattatgatatcaaaattggttactatggtttggcgttctcactctcactcaatgtgacaaacaggttttcaaaattattaaggttgttcaccaaattacagttatatctatgctcagtgattaggtttacgaatttcatacctgaagatgaaaagctaaactttaatcctccgaaaaacatatacgtagagggaataacaatcaataatatccccagtcaaaatgggaatagtttaccagaagaccagaccaagtctggaaaacttcaagacgtggtttctaattcttataacactgatactaccaatacgactgataatagtatggataactctgttattacaagtttccagttaactaatactgatgccgctattaatacagacaacgaattttttgaatgtaaagatcctaataaattgaggattaaatatttatacagaagaagaaaagagttttattcagtgaggagtataatgtcagttagaagtgtctttttcagaccaaaaattaacatttacgatatttctgattatatggatccagttcacaggttcataagattagaaaatgtatatgtattatccaagccacatgttagtttatcacataaaaatccagaagtaaataataaaccagatagtgaattagatcaccatgaacctaaatctgagattggatccgcaaatgataccatggatggtatgaacgagttagaaaccattgaaataactaacacagtggacgacattgataaatgtgaaaaaagtgaactgattaaaagatttttgttatttaatataaatgccactgcgtctaaatctgacattattggtgtgattggtagaactggtgctggtaagacaaccctgttgtcacttttagtcaacttttcacacataagaaagggttcagttttactggatggagttgatgttgatcacttaccaagagatattatgagattaattgttggcgttcttcctcaactaccctttgttttcaagggttggaccatcagaaggttcctggaccccaggaaactattcactgatgaacagattaatgaagcattgagtaaatgtggtctcttggattttgtaaacaccctatccgattgtccattggatcttgttattatgcctgactactatcataaggatatcccaaaatatctcaagaaagtatattatccaaatctattcacccatagaaaaccctcgagaatatttagaaccacctttaggttatcaaagagaataaatgaaactatggactttgacatggtgctgtcaaacacacaaatgaggacgctcatgttttccagattaatgctttatagaaaattctatagaatgatagtaattgatgagccgccatctgataattgttccgatgaactaatgacacctattacaggagtgaccccaaaagtctcattctcttttgaaccccaacaagaaactactaatcaaattggagtcccaatttacaaactcctcagcctttatttcaaacactgtacaagtttcatagccgcacatgatgtaaacgcactcaagtcttgtaccaaattgtggatactaaataacgggaaactagtaatgacatgtgacaaggaacaaatgctacaagatgaatccttatccaaaatgatccaagattctatggagaattgatttttatcaactatttaagttctctcagtttattttgttttatgtttaactttattttgatgttgtcatcaactaattgtatttttttaatctaaattaaaagggaaatgtgaaactaataataaacaaatcagaataaactaaatcagtgggattcttaatagataaatgagatttaaaagttgtaaaatctgaaaaatagaatattattgtgaaattgtttataaaatctgtaaattaataaaaacatttttttaaccaataaaaatattataaatgtgtatacgttaaattaaatatgaatttataataagtgagttgtatcataagtggaagattaataattgaaggtgatattttagttaagaatagaaattaaaataatgaattttatagattttatataaatgaatttttaaaaaagaaattctggactaatagaagtatttaaggacgaacattaataagaatacacattggcataaagaatgtgtcaattttaaaaattaagctagcactagaaaagtcaatttttaatattgataaaattgaaacaataaatgatttggaattataaatttttgtgaaatatttaataacagagcaaatttgagaatttgatgtagggcttaataaaatgaatttcgacggtgctataaaatatgatagggaaaaaaacagatatatatgtatattataatttaaatatgaataaaaaatgcgagtttaatattttaaatgtcactactacgtcaaatggttaggtttacaagtgtgtatttaatgttttgattatgatgaagaatacttacacatttttgttatatttgggttttggcttatttaccataagttcaaattgttttgaactagatattggaaaaacatttagttacaacaagggaaaagtggagatcaaagtttataaagatgactctaattatttttacaaacataaacctgtaaagcctttcttgttgaaggaactgtactattttgataatttggtgtattttgatcctttgctaactagcgatcaacttttaatgtctgcttctgttctttgggtgtcaaataatccaactgtaatatatttaaatctggaaaagtcatcagttatactattaaatgaaaataattcatcgctatccgttgaggcaatattctcggggaaaactatttcaaatataaattacaaatcacatccagactctgataacacggttgatgttgacatacaacaaactcgagattacattagtaattcattgaatgtttctgttaagcaacttcatttatcagggaatggtctagaaaaattcgtattaagatactacgatcttagttcatatagattaaataatcttaaatacggaaatgatggtgtttatgggtatgggagacttacaacccacgtaatagaggatgctgtcccgggaaattatggagataaaaaaaacaatttccccttaaatattcctaacaaggaactgatttatggagtatacctatacagttataatgactttccattagtggtggaattagtttatacttataataaaagagtttatattgcttttacatttcaaaagaggtatcacagagtacttatgccaccaataaatgatccatcttatgaaaaacaattatttgaaagattaaattattatacctgtaagaatggatttaaatcttcaatagatatttctaagattaccgataaatcagttgactactataacgttaaaaattattgcatcggagtcaatggtgtggaatcattcactaaaaggtttcatttaggtttttacacccacagtaacaaaaaatacagatgttttgaacattggcctgcagataaaagtaagttttatatggatcaagtttactacggtcaatctatcctaaaatttcccccgcttccccaacatgtaaagttttttagagtttatcatcaaattaataaacgaccttttttggtagtttttatttcaattactgataaattaactttttacggttataaaaatggttcttggtatgaagataaaggaagtgaattatcaagaataagtgttagtgataaatttaataattctattgtaaaattacttgatgagtaggtttatatatacaattatactaattatatactattcattaattattctttaggcttagtgggaactagtacataaataacaagatacattgaaatgatatgataatatatccatcataattaaattcaaatgataattattaatattgtaaaaggatttaatactgtaaaataatatctgtaatttaaataattattaagtgaatctagtttatttaacatgtttgtgttaattgtttgtcttaatttattaataagtgggctgaaattaataattctattataatcctgtgctaatctaaatagtaatagaatttcgtcatttatttaatttatcataaatgtttatatattattcatacataatcatattgttttattaattatggaataatagtatacaaaaaacaaattcattaaattcaaagtattttacgcttgtattattattttataatcattcaaatgtggattgatttattattgaaaattatttggtttaaaagaccctactttaaacttttattaatatagttcgtacacatatcaaagttgacatttgtaactagtgtgtaatattaaatttcgataaattttatatagttttaactatcatattttaaaatttatataagtaatttcaaatatgtgttttgaatttactgaatgaattttgagatcccccattaatagaataagctgtgtagttaataaattatgcattttatcgcatccttttttatattgattttaatacttgtaaaatgtttagattgtgctgataaacagagtagcaaacaaggagatgaatctaaggaaacagatttgccctcactagaagggttatcattagttccatatagtgacagtgaagaagaggataattttgatgtaaatgaaactactgaaacaaaatctcaaacagaactgaaatcaaatcaacaagaagaaacacaacaaactcaacaacaatcagctcagtctcaaccaagtcaattattaccacaaccaactcaaatagaacaatctggtacttatcaacattatggacctccagtttttcctccacaacccgaaccaatgctttattttgtaccaatacctacatcagagcctctacctctaccaatacaaacggttcaaccacagccaccacagtattatggaccacaacaatatcatccaggaattcaatacgtcccatatcagacgttacaaatacctcaaccacaggttggaccacctctgccatatcaacctataccttatcaattaccgccacaacctataccttatcagccacagccacaacatataccttaccaaccacagccacaaattgtactagctccaccatctcagcccatggtacaaccacaagatgtaactagtcaaggacaaattcaagatcaggcacaggaaactactgataaacctgaagaaaagggggctgttggtgaaagtgaatctgtaagaaatctaagaccaattacatatttacctaaaagtacaccacctagatttaaagatttacgacaaaaaaatttgccacccagacatgttaaaaaacaggaaagtaaaagctcatttgtaaaattacatggagataaacctacacagcccattgaacataagggtacgactcaaacaccagataaggttcaagatcaacaaactggtgacgctgctggatcaggagatggtcaaccaccatcagaccaacctgaacaacctagtgaatccggtggtgctgaaggcggtgatgagccagaaaaccctgaggataaagaagaaggagcagttggaggagcaaaagcaagtttgtgtgaaaaaattactctgatgaaaaagaattctgaaggggcgttgattgaaatgactgagaaagagtacaaaattatagttgatagtcgattcaaaataaaatttagaccttttagaaaccttgaacaagtattgtgtgacggtgaaattgtttattggcatagatctgacaaaccatattgcagcatcttgtcattcaacaaaaaaaataatgcttttattatttatcgtccaggaggattccttctaataaaacagaaattaggaaagtggaaaccaataacagcacctaatattccaaattacgtgaaattttacagacaaggttcaacgggaaatgaagttgaaattgttccattaaattatcaccttgaatttacgtcacaggcatcgtttaagtatacattcaaaacagatgtgcattgtagcaaaatggtggttagaaatcaagtagtttggataaaaacggctagcgaaggatttccatcatctatgagtttaactaatttagaaaatgtcgttattttattcaaaggttatgttcgagtatttaaaaaaacgcctgaaggttatagacatctattcattaaatcagatgctgggtaccatgaagattaacccatttacacatctaatttaatctctatatctttatttatattggtaatcttataagaacactcaactaaaatattgttaatcatttaacacacagataaaattgatgtatgcaacttaattagtaattttaaaattagattatttttttttaatattttaatataatgtatgtgtaaataatgaaagataatttaaaatattcaaataaattataaaatctgaaaatatataaatcccccatggaacaatctatattcatcaaaataatgaatttatgtgcagtatacatatatggaataatattcatattagttggatatgtgtattccgcggataataataatgatcaaactagtgaatctggaataaaatatatagatgatggaagtgatgagcaaggcgaaaattttcaggtaactgaaagatctatgaaacctgaaggatctgaagatgttgaggaagtaaaatcagctactcctcaaccaactataaagatactacgtagaccaccccaacaaataactcaaccgactaaggataaaaaaacagaacctgaacctatattatattacgtgcctcaatctttacaatcacctcaaacttatcagttagtatcaattccacctattcaacctccaccagcgccagttccaggaaaaccttcaaaatattatgtactatcagaaaaaacaaatatgtatggagaacatataccaattcctgttagttatttggagtatataccagtaaaacaacctgtaatctattttataccagttggtgtagcccctccgtactctccacatcaatcacctttcgttacttatccagttttaacaacacaaccaagttctcgacgtggtgaatctcaacatccaaacctcgaacctccaactcttaagccaaatgtagcacccgggaaatacaaacatcaagttgatgaacctagggttcccagaaaaactatacaaatattgcgcaggccgtctcgacctcatgaacagactaaagattctacaactccagaaccgcctaaaacagatcaagtatctggagaacaaccttcacaacctagtgatcaaaagcctcaaccttcaggtgaaccaagtgaaccattacaacctgaacgtattccagtcgaactaggatctgatgaggaggagtctgaagatgaaggagataaagaaggagcagctggtggagatggtggtgaaggagatgaggaagaggagatatcatctaaaacagaagaaatatgtaaagaaattgtattatttaaaaaagattctgatggtaacataataccaatgacagaaaatgattacaaaaaaataataagtactgaatatgaaaacaattatgaatttctggcaaatcttgaggaagtaaagtgtgatggcgaaagtgtttatagtcacattgatggtaaattttatccattatctttaacatataaaaaacctaataattcatttatcattgcttttgaagattcatttctccgtatcaagaggcgtaaaggtgagtggatgacaaaatcaaagaaatttaagaaacatcttaaaatatacataaaagatgaaaagggaaatgaagttgaaggtggtgaagaagatgatttttatagaataacttttaataaagctattaagtataagttcaagccaggtaaaaaatgtaataaaattgtgtttggagataaattaatttgggaaaaaacacctagtgatgattatcccattggattttctatcaacgatagattgaatgttgtagtttttttcgaaaaatactttaaaacatttgcaaaacgtagtcaaggatatagactaaaatatacccaaggcaaataaagtatatgcattgacataatacattcaatttaatgtgcatacaatttatatgtattaaaatcttagtatttcataatattttgatgtaaacctaattgtttaagatagagataacacatttattggaaactacaaaataaatcacgtatatagatgtgttgattttacttataattgagttatcatattaatcagtgattaattgatgaatatatcataaaatgtgcgttataattttcaagatcccccatgaattagcaataaattccaatcaaataatgaataaatgtttaatatatttatatctactaacattcataataattgtatatgtacaatgttctgataagcctaatgataaatcaactaacaaaggtattagtttagtatcatatactgatagtgaagaggaaggggaaggcgaaaattttgaggtggcagaaggaacaatagaaagtaccaaaactactgaaagggatcaacaaattattcaacctgaacaaacagacttgtcaactcatccccaacaaaaaattccttacaatatccctcaaccatattatcctggatatatacctccaccttatccaccatatcaacctcagcaatatgcaccaccccctataagaccaattcaaccatatcaaccaataacccaaccagggcagtattatccgccgccccctataagaccagttcaaccttatcaacctcagcaatatgcaccaccccctataagaccaattcaaccatatcaaccatatcaaccatatcaacctcaacccactcaaccttatccaactcatcaaccttatcaaccatattatcctggatatatacctccgccttatcaacctccaactccagaatctactgatgaaattgacgaatcaagcgaatctagagtgcattataaaattgataaggggtccgaaatgactgtagaaaaaatcagaagatgtgaatcaattaaattttataagagagatgaaaatggtgaagtagttaggatgtctgataaagattacaaaaaattatttgaggaccataatttatgcaaatatgagttttatgaagatcttgaggaagttaagtttgataatgaaactgtttattgtcacatgttaggaaaggcttattgcaattcactaacttataataaactcaagaataagtttattgttaggaataaagatggattcattgaatgcaaatttgacaagggccaatggaaaacaggtttcaagggtattccagattacgttaagttttatagaaatgttcaaggtaatcttgttgcaatgactaatcaacattattgtattgaatttaattcaattggatcaattatgtatcaatttaggccaggtataaagtgctgtaaagttgttgttagaggacaagtggcatgggaaaagtatgattcggaaagataccctaccgcagcctcccttactagaagtaatgatgtcataatgtacttcggtaacacatgtaaagtatatgtgaaaaggtctagtaccaatcaatatgtgtttaagtgtaaaaaaagaaattcgagaagtaaacgcagttaaattttttaagatttattgatttttttattaatctaatatcctattctatactcatataagtcactaattgtattgtttttattaaaaatcactgcttaaaaataattataatagattattataaaataacccattaagcatgagatatgtaacgtagtttgttatttttctataaataaaaattctaaattgagattaattattaaacaatttctaagatatttacaattctcaatttccagatcccccatcaaaaaaatatagttataacttataatgaatttgtgtatagcatacgtatatctactaatactaataatagtcggatgtgttaaatgtgctgataaacctaatcagctgtcaaacgacaaacaaagctcaaaaaaagaccgagatactaataataaagataataaacctttgagattagtagaatatggtgataatgaagatagtgatcctttgaaattagtagaatatagtgacagtgatgaagaagaagattttgaaaatttcgaagtgacagaaactagagatgaacatgaaggtattgatacagcagaaagtcaagctactgaaagacctgaactacagaagcaagaacctaaatcacctgagacaactgaacagttacaacctaaagatgataaaactgttgataaaagtgatcaagatctattaaaacaaaagggttttagtcaacctacacaaccagaaccagaaaacatggttccaggagaaacacctaaatattatcttttttctgccatacctgatcaaaacggccaacacaaactcattccaattacttatttggaatacatacctcctgttcaacaacctgtacagtactatttacctcaacaaacaatgcctatggttggaccatatttaacagtaccaggagctcaatatgaattttatggtccagaacaacctataatttattatgcaccaacatatcaggatcaacaattttatggacctcctttagcaggaaacgaatttcaacatcaattttatggacctcctaactactgtcctgaacaaccagttccagatcaatcaaagggagataaacaagaccaacctcctgctcaacaacctagtgaatgtgacaaaccagaagaacagaatggtgagcctggagaagaaggagcagttggaggagctgaagatgacgaagacaacgggtctgaaggtggagatgaagaagataattttgatgtaactgaaactattgggcaaactcaggatcctgaaggtgataaaaaggaagcttattgtaaggaaatcaagttttttaaaataaatgataaaggaaaattggatctaatgaatgaagaagagttcaaaattgaatattcaagtacaaatttggtaagatatttattaaaagggaatctagaagtattaatgtgtaacgatgaagtcgtttatactcatgtatatttaactgaatattccattacaattacttatgataaaatccccaatacatttataattgagtttccggatttttttcttgtagtttttttggttagaggcagttggagattacaaaaacgaagacgccctgatctcaaactttttaaagaggatgtcaccggtaaagagattgaaatgacctctgaagattacaaaattcggttgagttcaaggaggtcgtttaaaatcataataatgaaaaatgtccattgcactaaagttattgtcaacaatctagttgcatggaaaaaaacggatgatgatactgatctttgtggatttggtctaacttctggaaattatatagtcttttttttcagagggtatataagagtattagttgtaaagaatgggcgttataaattatgttataccaaaccaaatagaaaatatttataaaataaatcaacctaacataccaaaaataatgcaattatacgcaattattcatattcaatctgtaaaacataagttatattattaagaatttaaatctcaaacttagttgatcatcaatatatgtaaactgtaattaatgaaactgtatgaaagtgtgtgattttagttaatgttacacaatttaatttttacttagatgttaataaatcagatagatcttaaatataagaatgataaaattaaatttattggttattttaattttatgtgtatacattatgattaaaatattagtaacatgaagtagaaatattaaatattaaacttaatcattaataaagtgataaatcgattaaatatataagaatttaggttttaaaatcccccataggataaattttatttgaattatataattatgaggtgtgtaatatgcacatatataataacattggtagtaatagcatatgtgaaatgttcagataaatcacctaatttacaaggagaaggtaatggtggaagtttagtgcctgattataatgacagtgaagaagatgatgataattataacgtaactgaaacaagtggagaaactgaacctactcaagatccgcagacacaagtacaaactcaagatgtaaattattatgtaacaggaccgtcagatccttattcatctcaacctcaaattatagatgtttatctgctccctggtacccaatcaccaccacctcaaccgccacaaccaactcaaccattacaacaatatcaaccacctcaaccacaacctgtagcagtgcaattttatcctcaagtaatacctcatcctcaaccaacacagcaaccgtatggaccataccagccacaacctcaatattaccctgggtatcaacaatacgtacctcctccacagccaccacagtattacggaccacaacaatatcatccaggaattcaatacgtcccatatcagacgttccaaatacctcaaccacaggttggaccacctctgccatatcaacctataccttatcaattaccgccacaacctatatcttatcagccacagccacaacatataccttaccaaccacagccacaaattgtactagctccaccacctcagcccatggtacaacccatggtacaagctcatcctataacacaaccaataccttatcagccatctcagccaattgtacaaccacaagatgtaactagtcaaggaccaattcaagatcaggcacaggaaactactgataaacctgaagaaaagggggctgttggtgaaactggaaaattgtcattagtgtttttgaaaaaaaataatcaaggggatttggttgagatgacaaaggaagattacaatgaaaaatcttctggtgtaaatgtagacaaatattcgtttaaagcaaaccttgaagaaatgatatataatggtgaaagtatttataaacataaaagtgaaaaacattataacaaaagtttaactcataacaaaaagtttaatgtatttatttttcgttttttaaatggatttgtttgcgtcgaaaatattaaagggacgtgggtacaaacaggacgcactgttcccacttttattaaatttttttcacgagataaaaatggtaaagactttttacttaatgaaggacattacgatctttcacttacttgttctaaatcttttagatatagatttttatcagatgttacgtgtactaaaattattgttaaagatctgattgcttgggaacaaagtactgaaggttatccctcaacagtaacttttactattaaaggaaatgtaatgcttctttttgaagattttactattgtttttggaaagagtggtggaaagtatagatatttgtattctgtaaaaaataaaaaagattgtgaggatgattaagatatcataatttcgtaatatattttaatattttaaatatatcaagtataaatcttattaattcgaatttatatatgtataaataccagatacagaaattaatacatgtgttaatattattttatgaggtgggataacactaatgattaaatcccaaagtcatacattgcttagtattaagaaaataagattagtataactttccgagttaatatattaattaacagtgaattggtaagatgttattactatgtgtgttcaatattgaacttgtaaataacgattaataatataataaaaaataaggaaacaaaatattatcagaataaaaactttaggtctttattcttaactaatatgtttaaataatattataatatatattatgttgaactgttcaaatatgtgtttacaaaaaacatgaactatacatgttatttattacaaagtaacaagaatagataaataatattattaaaattaatcagattgtgttggaaactttttaaagttttacttatttagtaaatttatttacgcatatataacataccgatcttataatttgcaaaaaacaccctacttttattatttaaatattttcaagtttggattctaaattttaactaattatatttgatatatccattggatagtttttataatttgtttgtagatcctctcttagtaaaatttatacaaagcatattaattatgagatgttcgacttacacatctttactaataatcatagtaattggatatacagaatgtggtgacaatccaaatgatgatttagctaacacagaagatactatagaaaatgtcagtggtgatgaatttgttaattttctggtatctgaagcaactgaatcatcaaaagatgaccaaaaacaggattctattccacaaacttctggtgaagtgggtattgaggaagaaactcaagaagaagctaaagtgtatgcagaacttcagccacaaaaactttatcaagaaccaataaaacaagaattccaaatcagtcctcaacctgtagagtaccacgatgatgatctttatggacctcattctattacagctcaaactcaatcatactatctgccacctacagtacagcctcaacagcaacaacctacagcagaacaacaatatttctatgaaccggagcaaccaccacaaacatatgaaccaccttccacgtatccagttcaacaatatcaaccttaccaacctcaagggcccattccaccgcctcctatgggaccacctctgccatatcaacaaatacctcatcaaccaccgcctcaacctcaacaacaaataacccaaccagcgcagtattatgtaccacctcctataagaccagttcaaccttatcaacctcagcaatatgcaccaccccctataagaccaattcaaccatatcaaccatatcaaccatatcaacctcagcaaccatatcaaccttaccaaccctaccaaccctaccaaccctatcaacctgagcaacaatttggtcattaccaaccaccgccacaacaaatttcacaacaagaactgatttcacaacaagaaccgattccacaacaagaaccgattccagaatatcaaccccaacaacccattatatctcaacaaccggatgataaaataattgaggaagaagatgaaagtgataagtcaattgaaaaaccaagtaagaaacctaaaaagaaaggacctaagagaatttataaaaagtgtcaaaacataagtttaataaaaaggactgatgatggaaacttggaagtaatgacaaatacagactataaatcgatatataaagatggttcaagagaaagattgagactttatgcaaatcttgaacaaatattttgtgatggtgaaaaagcttatcaacatgaaaagataaccccttatccaaaatcactaattgtcagtagaagaactatgggatttgttactattagtgacaatgtacatatattagttaggaatttaacgggaaactggataaaaatactacgcatagttcccgattatgttgagttttacggagaagacgtacatggaaaagtgtttttattaactgacgagcaatattatatggatctcaattcttctgatacttttaaatacacatttatatcaggaataaaatgtatcagagttgaagttgaaggccttttggtttgggaaaaaactcctgaagataaatatccaacatctatatctataattagtaaaacacatgttttgatccattatagacaacattattgtgtatatgttaaaaaagataatggatataaactcacaaaaatcaacccaagagcaagaactgataaaagttgattattcaacaaataaaattttataatatatcatactaattttatacatattatactataaaattataggttataaatattaatattcttaatttactgtgtaaattttcgataatgagatcaagtaatttgaaattaatttagatctcaaatatatacgataaatgattgtaaaatttttattttcaaaacaccattcattaaaattgtgaaattttcataatgaatctatgcgacacctacaaaattatactgctattcatattaattggatatgtgaaatgtgcagataaacctggagatcaatcaaataacgagaataatagttcagaatcatatagtgatactgaaagtgatgaagaagataattttgatgtaactgaaactactgggcaaactcaggcacatccaccggaagaaaaaaaagaaactaaacctgttaaaccagaaagtatatgtaattcactaatttttatgaagaaaaatgaagaaggtattattgtccccatggatgaaggagagtataaacaaatatttgaggatccatataaaaaaaaatatttatttcaaaaaaatcttgaaatgatactttgtgattataaagttatttatgaacaaataccgggaaaaccttatacctcatctttaacacattttaaaaatgaaaacacgtttataattcgacgtgagggtgaatttatatttattatctgccaaagaaaaaaatgggtaatattctcacgcaaacgttccgggtttatcaaactttacagccaaaattctaaaggtaattacgatgagctgggcgatgattcctatcaagttaggcttagtagaaatggaacattaaggtatgaatttaacgagaatgttaagtgtacaaaaattatggctaaacaaacagtagtttgggagaaaaaagctgatgacccctgtccattgcaggttaacattaatttaaaaggtgatattgttctttattatagtaaatattatattatatttactaaaaacaataaaaatcctaagtatttatacaaaaaaccaagaaaaaaaaggcgtaaaattagacgacataacaaataaacatccataatatattattctcatttacatactatatttttatatatattatactatatattatattgatgtgtttgataatttaaatatttatataaatggttcatttcaaattgaaactgacttcttttattattaatcaataatagattagtaaatataattagtaaatgtacattattaatttccagatcccccatggattaggggaaaatatactatagaatgaataaatttacaacatacttatatatattcataataattggatgtataaaatgctctgataagcctggtgataagtcaggtgacaagagtagtggcttagtaccatatagtgatagtgaagaagataattttgatgtaactgaatcatcagtgaaaacaactgaacctgctgaagaggaaccactcgaagaggaacctgacagagataaaccaggacatgtcgaagaaggaagagaaaaatatgtaaaacaggtgagtgaaccatataaaaaggatggaaaatgtgaaataataaggttctttaaaaagaataatgaaggtgttttggttgaaatgactggtagagattatactgtatcattttctgataaaaaaatagttaaatatggattcaaagaagatcttgaacttgtactttgtaatggtgaaacggcttataaacatgtacctggaaaggtttattattcatcattgacttattatagaaataccaacactttaattattgttggtggtggtgaatttctccgtatcatttataataaagggaagtggagagcaagttcacgcagaagtccaacaattccagaattttacaccaaaaattcgaagggaacttatctgttactatctagtgagtattacacttttgacattaccccaactggttcatttaaatacatatttatatcaggtgtaaagtgtagtaaaattattctcaataaattattagtctggaaaaaaactgatgaaccagaatatccaacatcaatcatcatcaccttaagattgaatgtttttatctttttcagaggatacagagttttatttggaaaaactgcgggaaaatatagacgaattggtaaataataaatgtatatgggtatgatactcttaactatcgagtataccgcaacagtactaatctaaatcacaggatttgttaatatctattataaagttccatgtggaaacccccaaatgctatgtaatgaatcgtattttaaaaaattggattttactggaatgaacgttagcacatatatcctgtgacaaagtgaaaacttaagaaatagatggatgattaggtctggcatatcatcaattgaatgttctgaaaattataagtatttattgttggccaaagctgagaaaataaaatgattttaaaagatgaaatttggagagattcacttgtgaaatatgttgaaagtatattatatgaaggtaatttgtcgactaaaattagaaatatttaaattatccataaaataatgttaaaaacattgtataaaagtacttggattgtttaaataacggttataaatgtaagatattgtgacttgataaattggtagaaatttatctccaagctgttaataacttgaacaaaaatataaatcctaaaaaatcagcagaatcaagtgtagatacatttaacgaagatttaattagaataacaagtgataaggaagactagatgagactgtaagaaaattaaaacaattaatttaataaatttatatatgttatattaaattagaaagtaatttattttagtccatccccatcgataaagatcaaaaggatggattaaaattttaggtgataataggatgtaaaattactgattaaaaattttaagaactttgttcttgtatttgttactctgctatggccgaaaactggccggcgcaaagggtaaagattcagagggaaaggcctccggatccgctattgtaatattaactgtagatgaacaacatcgcaataaattcacagaaaatgatttaactaaatataaaatagaagaaaatgattgtgagaagaagtataaatttaatccaggagtaaagtgcgtaggaataaagtataaaaacgttacggtttggaaaatccaggggaataaatatccaaaatcattcacttataaaaaatatgataatatatttaaaattgagtttgaaaacggatctgttacatacatttttgaagataatatctggaaaccttccaccactcaagatataattccattttctacacatgaattttgttccaaactgaaactatgtaagtgtgatccagttgatagtagtaaaaccgttgcgcttgagtttgaggtgcttgagtatccaaatcgtgattcattactgtatttgttaggtggtgagtgtactgagttaatgcttggtggtaaggttctgtggaaacgtattcatgaaccctatcctacatctttatactttaaatcatctggtttgttatatttaaactttgatccatactattatgtatatgcttatgatggtaacagctgggttctaagaaaagatctctcgcatcgttccgccgttaagttagatccatctatgtatcccaaagatatcaccattgtgactgaaaaaacagttggtgagtccttgaagctggttgagaatgatacagacctgtacagggtctatgatcatggtaatggaatattcttatacgtcttcgatacaaactctagatgtgtcgaggtaaagtatcgtggtcatactgttaccaagaggcagtcccgtggtccatatccaagaagaattgttttttattcagaatctttaacatttgaatttgatttcgaaagtcggtcaaccgtttatagagtatatgacgctggctggtacatatctgatgattccaataagttggaacacattgagtatcaaccccctgactggattctaaaacattcatattacaaatttggatccaaactatccctatctaagctcacaataatgacctctgataacaaagatggttccggtgccaaacccatatatatcaagagttccatgtttcattgtaataaatggatttcagggtacttctatccagtcaacggactttatctcgaactcggctacaaaggtctcgtctttttcaagtcgacagattatccttatagaggaaacccaagagtagtcctattcgaccttgataatcataacatatgtgttttcttcgataccggattcaaagtatcttttaatcacatagatgattccgataaggaaacagttcttcaagctgaacgtatgcctaggactgtgactaaacctgaaactgatagtgatagtgaaactgagactacaccagtacaaaaaactgttattactccagcaaaggcaacccctgcaagtgggactaagtcattcactcggagtgtggttagaacccctaaggaaccagttaaaactaagtctcccgaatctaagttagtatcagctccagtcgccaaggaactctctaaaacacctgagactaaacctcctgtcataacaatcctgcccaaacccattcgtcccaaatctttcactaatgtcaccgttgatatcgagaagaaacagagcaccaatgcgtttaactactataagaatgacaattttagaacatatgtcccaaagcctggttatctattcagtaaggttaccgagcgagccgtagttatctggaaatctagagatgtgtttgcaacctttgttacaactaaaagaaaaaattttctagtcatcctccttcaaagtggtagcattgtactatttcacaagactaatgctgatcaaccatgggaagacataactaataagagatatgatgtaactaaattcaaattccttggtgagaatgatgctgaaatatctacgtctgattataaggttactctagttaagaccgtagtagaattcacattaaatgatggagttgactgtaataagattaagtatgaaaatcaagttatttgggaatataccgatagtttatttaagcagtttgaacttggcctcgtttcaaacgaattccatccactttatagcagtgcttatcggagaaaagttgattataaagtaccaaagctttctcctgaaaccgaaccaactaagactactgaacccaagccagcttcagctcccgtatcgtctgttactacaactgaaacaaaggcaactccgactacgtcacctccactaactgcacctcctgaggctaaacctataatacctactacacctgaagtaagtggagaggtagttactccagccaaggccgctactgtaacaacacctgctaaagctcctagtcctaaagttccaactcctccaacagctgatgaatctgccactccttctacaacacctgatgaatctgctactcctgttgtaacaacacctgctaaagctcctgatgctaaagttacaactcctccaacacctgatgaatctgctactcctgttgtaacaacacctgctaaagctcctagtcctaaagttccaactcctccaacagctgatgaatctgccactccttctacaacacctgatgaatctgctactcctgttgtaacaacacctgctaaagctcctgatgctaaagttacaactcctccaacacctgatgaatctgctactcctgttgtaacaacacctgctaaagctcctgatgctaaagttacaactcctccaacacctgatgaatctgctactccttctacaacagctgatgaatctgctactccagctaaggcaactccatctgctactccttctacaacagctgatgaatctgctactcctgttgtaacaacacctaaggcagctcccaagactgaagttgtaaagtcgactgaccctgtaccagcaaaagttagtgtatcggttgaggctccaactggcagacctagacccaagagggcacctgaagctgccactggtcccaggacagcagttccagttaacatcactgttaaagaaagtagtagtacggttgatttcagtgaggattatctgaaaaatgttaagatatacagtgctaagctgaaatacgcattcaaccaaattgttattagttgttgctctggttgctgtaagtgtgagaaagtcatatgggaaaccacagatccaaaacaatattttgataaagtcttcgttgatggtttaggcacatgtgcaactactagaaattttagtattcacttgtgtaacgggtcttttaagcactttggtaaaaaaagctgtggaggtggctggagtgagtatcccagtatcattgatctcgatttaaaaacaaaggatagtaacatccaacttgacttaattgagaaggataactgtaggacatatgtagctaagcctggttatacaatcagaagaattaggaagaacaagaagtgtggttcaggctgttgtggagaaagagttatttgggagtccataaaagataacgcccttaaggttgtactcgtgggtatcaaaaaggaagagaaacatctttcaatactactggagactggagagcctgtcttcctatacaaggaaggtaagggtaagccctggcagaatgtcacagccagcaagaataagttaactgacctgaggatgtatgccttggctgaggggaataaacaaatggagcttcacagaggtcactactcagtaaccttatttggtacattctatgggtgtctgttctatgacgacgtttgctgtgtgaaggttagccataaggataagactatttgggacaagaaggaggaaaaagagtttggcaatctgaagggagtattccttgatgttactttgaataagttcagtgtaatgaatgatgatgatagatactggttatgtgaagaggtaaagaagattaatcccgtgaggcttgacatcaatgagaaggccagtactgaagactacgattacactgtagatcataacagaaatattaacatatacacagccaagggtaattcaatgtttaaccaggtggccaagggtcaagcagttgcttggacgaccaatgatcccaccaagtatgcatccaaggtctttactagtatgggtttaactatcgtgaccatatacttgttgaatggtgatattttacactatcgtaagcctgaaggaggttcatggaatccgattcctaataagatatgccttgaactcaacaggacctcaagcagaattttctatgactttcatcatgatggtgagaaaaggactttcactgcaaaacctggattcctattcaactccgtcatcctcaaaagttcttggacctggctagtgtgtggctctagttgttgtaagtctggatgtctttcagataaagttttcttggactctcaaaaggatgatcaatgttcaaccaaggttgtagtctatggtacagaatcaagtatcaagaacattaacatattcctcaaaaatggttcggttgttcactttcataaggttggcaagaagtggttctcagaaacaccaattgttgttgacattgatattaataaagataatgatcttttcgactataggcccacaagaacatttggtcacttcaatcctaaagccaatttgactatcgagaagatagtgaagaaaaacagggatatatggaaggcacaaaaagatcatggtctcaaagtggttctcatgggttctggtaaagaagagaaacatctgtcaatacttttgcagagtggcaactttgtacttcttcagaagagtggtaagggagagtcatggaaagatattaccaagaataaacataacttccaaggggtaaagttgtactctctggatgagggtacctcaaagtaccgtgagttgactagggaagattatgatcctacagtattcgagtctaggtatggctatgagtttaaagatggtgtcaagtgttccaagattaccgacaacgataagattgtgtggacccacactgatgacatggagtttggatatcctaagggtttatatctcgatcttcgtcaaaacacgttcagtatcacgaacctaaaagatcgcacaaaagaacttcacaaaggcgaggtaaggaaggtaagcaggttcactaaggttactctcgatattgagaagactcatttgggtgataagatagattacagtcagattgaaactgtatacacattcgttcctaacaccgggcatgcgttcagtaagatatctctgggaaacacttccatttggcagtgtaaagatgtttgtggtattttggttaagactaagactaaggagaataagaaatatgtagccattttacttgaagactattccttctcactgtttgaacagtatgatggtaagacatggaacgatgtcactgataagagatatgacgtgactgcacttaggttctacggggataacgacaaacttctcaacgattctgactttaaggctaccatagttaactattcatatgagttcaaattcaatgatggagttacctgtaagaagatcaagtatggagatgatgttgtttggagacatacagatgatcctgactattcaacaattaagatgtttcatttgggccttatttccaacaagttcttagtacttaaaagccaaactgaagttaagaaattagaatataaaggaccaattaaagctaaaacagtccctgtgcaaactcctgtaataaaaacaactaccaaacctgaacctgctgctaaacctgaaataatatcaccacaagtttcaaaggtcactagggtcatttctgtcagtgatactgaaagaccatcgtttgttgatcctaaatataatctattacaaacttctggtgacctagcacctgataaggttaagttgtattcaagtaaatcaggaggaaacttttgtaaagttgagaaatattttgatgatcttgactataatctagaaggtcttcaatgtgaatttattacccatgatgggaattgtgtctggagacgtgaggatggtaaggaatatcccgattcgatgacgcttaaggatgacgatactataattgtcactttccataaagtttactatatctgctacatggaaaataatgagtggaaatcagaaatacgctccagagacggcaagggtgcaattataagtggtccatcgtataaacttggcaaggctccagagactcctgttaccaaagatccagataaagttaaggaacctgagccaaccaaggctgaggaaccaactaaagaggctcctgaacctgccaaaactacacccattgccacagcggaaccagttcctaaaccaaaaactgccactaagcccgttacacttgatatagagaataaacaatccacaacagagtttgattacaaaaaggatggtagtgattttcatttgtataccccgaagcccgggcattctttcaccaaggtaaccgagaaagagaatgttatctgggagtctaaagatggcatacctggaacattggttagaaaaaataaggatgaattcgttgccatactacttggtaattgtgattttgtactatttaacaaggataagaataccaaaacctggaaagacatcactagtcagagacataacgtttccgaactgaaatttttaactgataatgataaagagattgctagttccgactttactcgatccattgtccatgagtattcttatgaatttaaattcaacactggagttaaatgcctcagtatcaagtatggcaacaatgtaatttggaaacacacggatgataacaagtataaggacataacgaagtttcaacttggtcttgtttctaacaattttttcgtcttcaaaaatgaaaatacatttaagaaagtagagtacaaaggagcaatcattcctcgtaaagctcaaccaactgcaactactcaaccaaaggaagctccagctacgactcctgcaacaacaactcaaccaagttccgcacaacctaaggctcctgaaacgtcttctactacaactcctactcaggttcaacctgcggtcactcctgctgcaacacctaaggtagctccttcggacacactcgttacccttgacattagtaagacccagtccacagccgacttcgagtactccaagaagagtaattatcatacatacacccctaagtctggaagtgtaattggtaatgttactcatggaactacggacatctgggagtctaaagatggtgtgtttggaacccttgttagaaagaagaaggatgaactttttgttatcctactcaagaacaacgattttgtactatttcaaaagaccaagaaacagccatgggctgacataaccaaggagaggcacaatgttactgaactgaaattctatggagataatgatactgagttgaagtccactgcctatttagttaccgtgtttgaattctcatacagagtcacatttaaagatcaaaacagctgcaagaaaattaagtacggagataatgagatttggaaatataccaatgatccatgtaagcactttgaactaggtcttgtttctaacaatttcttcgtctgcaagaatgaaagctcacaaaagaatctaaatttcaaagggggtatcattcctcgtgatgctcaaccaacggcggctcctacaactactccgactatatcaactgtaacaactgctcctgagtcacagacggctacagctaagggtcaacaagagcctaaagctcaggatactgaccaagaagaggctaaatctgcaactcctgcaacagctgcgcctacggcaactgctactcctacagctaaagtaagtgaaggagaaggtcctgattcaaaggaaacagctgccgaaacacctcttgatgtatcttcatatactcgtttgaagacgtctggtgagacgccaccggatactgtcaagttatactctaaaaagaaaggggaacttgtgtgtgcagttacaaaggatgatgatgactatgaatatagcctagagaatcttgaatgtgaagccattactcatgatgacaaatgtgtttggaaacgtaaagatggtcagggtcatcctctgaaaatgatctataacggtgacgacataatcactatcaatttcgatggaagttatgttctctgtaccatgtttaacaatgagtggcatttagaggaacgtaaatctgcttcgactggtagtgcaccagctcctgcaacaacacctgctaaagctcaagaggctacaactccacctcaaccgaaagcagttcctgcaacagctgcgactacatcatcttcaccagctaaagttacaacaactcctcccgaaactaaggcacctacggcaactactcctgcacctcaagtaagtggaactgaagttactccatccaaggcagctcctgcaacgactcaaccaaaggctgttcctgtaactacacctgctacaccatctgcgacaactcaaccaagttctacagaagctaaagctccaactgctactacacctcaagtaagtggaggagcagttactccttcaactgcaacacctgctaaagctgctccagcggctacagctcaacctcaaccgaaggcagttcctacaacagctccgacggtatcaactgcaccacccaaagctacagtgactaaacctattgaatctaagcaacctgaagttaaactacctttaacaccacttaaccctgtaactcttgatatggataagactcaggccacacccgatttcgactacgccaaggatattaaaattaaaacttatacccctgcgtctggttttggattcaacgaaattgtactggataagactgtcatatggaagtcgagagataaaatttgcgccaccttggtcgtattgaggacatctgttgctgggaaacacctagccatcctactgaataataatttgttcgagcttttgcaacaatcagacaaagataaaccatgggaagatatcacatctaccagggctgatgtcactaaactcaaattctatgatgatggtgacgctgaaatcactccatctaattacaaggttacaatacttcactactcttatagatacacttacgaatttaatgatggagtcaactgcatgaaagttaaatatgctggccgtgatatttggaactgtagcgatgatcaaaagtttggtggaccaatcaagattttcgatcttggacttattacaaacaatttcttcgtgaaaaatttatctcagtataagaagtctgaatgcgattcaacaaatcaaattcctttgacagagtcaatcgttccgttaaactcagcgtccggaaaaaaaactgtttcttgcgtaccaaaagtggccgtaacagtgcaggttcctgttggtagacccagacccaagagagtggctggggttggggttaagtgtactgggacagcagtcccagtcaacatcggtgtcaaatcaagtactgatacagttgactataatggtgatagtctcaaaaatgttaaaatttacactcctaaggtcaattacgtattcaaccaagttgtcatgggaacgagtgggtctaactgctgtggttctggttccgagaaggacatatggactgctagggacgaaagtgagtatttttatagggtgtatgtcgatggtttaggcgcatgtacaaatactagcaattttagtattcacctttgtaacggaacctttaggcactttaacaatccaggacatggtaattggagagaggtgttcagtgtcattgactttgatatgagtacttctagcagtaatattgaagttgacttcattaagaaggataattataggacctatgtacctaagcccggttataaaatcagaacgattgtgaagggagatatacgtatatgggaatgtcaaaataatgattatgccattaaggcagtgttgatgggttccgaggacaagcccaaacgccttctcgttcttttacagagtggaaacgctgctttattatacaagagcaagaagggcgaaaagtggcgagatatcacctcaaccaagaattctattgctaatctcaagatgtacaccatagttgacaatgaacacaaagaattgaatccaaagcaatactcagtaaccttgtttgattcattacacggttatgtcttctatgaaggcgttaactgtgtgaagattgtgcttaaggataagactctttgggaacacaatgataaaaatacatctggtaacttgaaaggaatatttctaaatttgatttctgatgaattcagtgtcatgaatgatgatgatagtttcaagccatgttaggatctataggagattaactcaataacccttgatatcgataagaccaaggatatcctcagttatactacttcaaggatggcgagttttataattatgtaattaactctgaccatctgttggacaaaattgcactttcctgatatttggctgtcaaagatgatgtgcgtggaacttaattagcgtttttgatgtgtaagataccgacaattcaaactcagtaacaatttatcataaaccctggtacaattggaagataactttaactccgtttaccaaaccaatcaccgaacagtgattcagtacagccaaactgaatcactatcaacctgtaacacatcccgtagaatattgctttatcattacacctaagcattttgtatattatacacgactcaatctgtaatacattgtctgtgatcctgcttataatcatcgaaattatataacaggatttgaatctgtaaattttagtcttcaaactcgagttttatgaagactacaactgtttcaatagagagaaatgtttcaaaaataattgttgacattgtaaaataacaatgtttgtaaaagtaatacactatctgtttaactgtcatgacactgttcatagcaactcgctgtaatcttttatttgtatttatatttggtagttattagagtttattattttgagtgtttttaaacattggtttatcttatacatgttttgtatccagtatgaattatctcccaagtatttagtttgagtttaatattttatattccagcatttattattgatttcaaaattattaattttgtttctttctaatcattttgttcactcactccactttcatttcatcaactaacacaatatcatatttaaccactcatttacactttccaatctcatctaactttattacaacttatcttttgtcagttattcactttagatctgagttttatttttagtggattagttaccaataccgctataccatatatactcccatgtatatacactctgtatatcatacccggtatgaataacatacttagtgataataacattccagtgtatattgcctatttaaggacttgtttaaacatcagaaagattagcactagttagttactgggacttgggatatcagtttcagggattagaatcagtagttttgtcaatgttagtactattgatgggactggtgtttattaagttactacttctggcatttaatttagaccctgtaattgagtctagttaagtatctaactagtatttcaagtttgatttttaactttgttctagagttctcgaagtattatttacttactgtaattgagttttagctattgtttctaggataagtatatagaagtaccaatagtgctaatgttagaggttcagttttaatactctggttgagtgttttcaacttgttttagaccctagatttaagtgttttacagttagattagagtgttttagattgttgttttacagttagattagacagtttcagtcaagtttccagtagtcagtatttactaagtcaatcttttagatattagatttcagtgttttcaggtgttataagttctttttagtagtttaagtgtgtttaaagtattgttttacttgagttgagtgtttttaaaagtcagtatttgattttgtgtttttagattaacttgtttttagagtgttatagattagagttttgctttgtttgagttgagtgttttcagttgtttttagtagtttttagtagtaagtttttgtaaatcagtattttgccttttcgatttgagtgttttaagtgttttagattaagtagttttcagtgtttagagacagtttttgagtgatttcagtagtttttagagtagattttacagtaaatttcagtgttctttactattcttttactatgtttgagtacttttcaatgttatttcactatgttagagtagatttatgtgtttaacattgtgtttgagtgttctttactattatttcagtaggttagagtatttttaagtattttaaaagtcagttttatagcctttttgagttttttagattatgtttgagtattattttacagtagttttgaatgtttaaagtgtttttaagttgtttttatagtagaatgagtgttatagactctagagttgagtactttggaggtctttaaattgagttttttgaaattctatctgtttgtttcatattaagacattaaatttccccacacttgtgtaattgatcctagagttgagggttttcaaattggtattactttagactttagaccccacagtagattagtctttttgaccctcaagttaagggtttagtattatccccacaagtattttagattctttaggacattaggttttagggtttagggtttagggtttagggtttagggtttagggttttagggttttagggttttagggtttagggttttagggttttagggtttagggtttagggtttagggtttagggttttagggttttagggttttagggttttaggttttagggtttagggtttagggtttagggtttagggtttagggttttagggttttagggttttagggtttagggtttagggtttagggtttagggttttagggttttagggttttagggtttagggttttaggttttagggtttagggtttagggttttagggttttagggttttagggttttagggtttagggttttagggtttagggtttagggtttagggttttagggttttagggttttagggttttagggttttagggtttaggtttagggtttagggtttaggttttaggttttagggttttagg

SEQ ID NO: 73 - DNA, 1317241 bp, Theileria parva
accctaaatcctaaaaccctaaaaccctaaaaccctaaaacctaaaccctaaaaccctaaaacctaaaacctaaaccctaaaactaaaccctaaaaccctaaaaccctaaaaaccctaaaaccctaaaccctaaaccctaaaaccctaaaccctaaaccctaaaccctaaaaccctaaaccctaaaccctaaaccctaaaccctaaaccctaaaaccctaaaaccctaaaacctaaaccctaaaccctaaaccctaaaaccctaaaccctaaaaccctaaaaccctaaaaccctaaaaccctaaaacctaaaaccctaaaccctaaaccctaaaccctaaaccctaaaccctaaaaccctaagaccctagaaccctaaaaccctaaaaccctaaaaccctaaaaccctaaaccctaaaccctaaaccctaaaccctaaaaccctaaaaccctaaaaccctaaaacctaatgtcctaaagaatctaaaatacttgtggggataatactaaacccttaacttgatggtcaaaaagactaatctactgtggggtctaaacacttaagtagaaatactctaaaaaccaccgaagtctagggtctaaaacaactgaaaatactgtaaaaacacagaaaacaacttaatctaaaacactcaaatcgaaaaggcaaaatactgatttacaaaaacttactactgaaaaatactccaacctagttaaacaataatctaaaccatcaactctagggtctaaataagcttaaaacattataaaaacactcaaaaactgaaaactaacatctgaaatactaacttattaaatagtaactttctaaaaaacacacttcaaaccctcaactttatgatcaaaaatgtaacaattataacactcaaatttaaaacactcaaacctatgatcaaaatgtaacaataacaaatctaaaacacataaatctactccaaaacaaaagtactaaaaacaacgtaaaacactcaactcaaacaaagtaaaactctaatctataacactctaaaacaatcaaaactaagatctaaaatactaacttattgaatagtaactttctaaaaaacactcaaaatactctaaaactactcaactctagtttccaaaaacaactgaaaagactcaacttactactaaaaactactcaactctagggtctaaaaacaggttaaaacagtcaaacatagtaaaataacaatcaaatctaacatcggaaacagtaactttctaaaacacaaaatcaaatacttaaagtactgtaaaatacttaatctaacttgaaaaccactaaataatgatctaacagaatacttttaaaccctcaaccctggtgttaattctaaaaacatggtaaaatacttatcttaatctaaaacagtaaactcaagactaataactaactgttaatagactcataacaatgttaaacttactaaattctaacattaataacattatctagttaatactcatctataaaactatctaaataattaatctaaaaacttactttgatactctctaaactcaagtctaaaacaataccttgaaacagttaactcgttataatggataaggtgataaaataatgacagtgagaattaagaggtagtaaagtacagtaatggaatgaaattataataaaccccaaatctgagagtcaaagaattaggtattaggacttaggtaattaggtgattaggtagataggacattacgtcagttaggtcatttggtagttggtttggtttgacctattaccttagttaggtggtttcgttggtaggtattggtcattacttgtatgtgttctagattagtgcccttaggagtctgtcaattatggttcttaactacttacttgaacctctaaatcaacaactgacttatgattcgaattaaaaataccaaattgagttgagttattcctcaaacaattactcattggtaccaatagatggatgaagtaactgatggacaaaggaataacattagttaacatcagtacatgacctaagtagtatcctgacaacatgttaattctgttttatatgattttggaatgtttcgatgttttattcatgtgtgtgacgatttgaatgtgttaaattgtgaaatattagtcttaaatttaagtaaaaacactattatatagtttaaagttaatatataaacatattacaaatgtgtgtgaaagaaattaaatgatgtgtgtaactaagttttcaaatggggaatggaatccaaattaacgttaatgtgtctaaaattgactaaaaatccatatacccaattggccagtcgaggctcaaaagttggtaggaccaggtcgacacagtccctgaaactgatattccaagtcccagtaactaactatgctaatctttctgatgtataaacaaatccttaaataggcaatatacactggaatgtcattatcactggctatgttatacataccggctataatatacagagtgtatatacatggaagtatatatggcatagcagaatttgtaactaatccactaagagtaaaactcagatctaaagtaaaaaactggtgaataacaagttgtaataaagtttaaagagattagaaagtgtaaatgagtggttaaataatattgtttagttgatgaaatgaaagtggaatgagtgaacaaaatatgaaggaaaagaggttcacaatcagtggttgagtttctgatttaaaacttttatagtatactatttataatatatagttattaataataaaatattggtacaattgtatgtttgttattaaaatatattataaatgttatattatttatttttattaaaagtgtaatattactcatatttagagtttcttcttggtttgctgtataacaatttataacaatctattaattttgtatatacagcaattcttttttcgaaaaatattacaaattttgatttagtggtaatagcaaatccaactggataaccttcatcttcacctttttcccaaaccaatttattttcaacgaatatcttatgacatttagtaccttccataaataaaaatttaatagatcgatagtaaccgaaatcaatttctaaagtgtcctcaggtattataacgtcgtttccttctccatctttagtaaaaagttcaaaataaagtgtaatattatattcaaatcttttccatatcctatcataatgcttaactttaattaatttatcgccagatctaacgataaattccatcaatcgaatattttgggttactgttgaggcgtaaggttctccatacttatgttcataagccagctcaccgtcacagagtatctgctcaagatttgcaaatagtttaaattttgcttttgctgaatccttatatattcttatgtagtcttttcttgtcattggaatcaatttacctccagaatccttcttcataaaattaattattttacactttttaactattctttttgtggttaccttttcttgagtatcagtaggttgactaggagccgccggtgctggttgcattggtggaggtacataatatgttggtggaggtatatattctgtaggtggaggtatataatattgtactggttgttgaaattgaggtgctggttgtcttggagatatataatgtgttggttctgcaggtgttggttgtactggctgagttcgaggtatataatgtgttggcggtccgtaatactgaaactgtggttgtgacacttgaggctgaggctgagttggaggtacataatgagttggcggtggaggtattggttgtactggtgatggcggccttgcatagggatgatatggtgaatatccagaaacttgtggatatcgtggtattggtcgagcagggtgaccaggtcgtaatggtagtggtggttgaattggttgtgttggttgtattggttgtgttggtggccttggataaagtgctattggtcgaattggataaccaggttgtatttgttgaggaaattgtggttgtaatggtaatggtggctgtatttgttgaggaggatgtgcaggttgtgttggttgcggataaatttgttgtggctgtattggttgtactggttgtggctgtattggttgtactggttgtattgataaatcgagaggttctgcttgttcttcttctatagtaaaaggctgatgtatgggttgtggtggtcctaaaggatatggttgttcttcaggttctgataattgtaattgaatttcttcttcttcacttacttcactagaaggttgtggaataacatcgttagatggttcagttacatcaaagttatcatcttcttcatcactatcattttctatagtaccatgtgtgttattcggattatcaccacatttaacatattctgctactgcgaatatgaatataatccatatttgtaacacatgcatctgataattaatatcctttgtacaattttattaaatatcatttagaaacaaattataaaagatatccaatggatatttcaaattaaattagctcaaatcttatatgtgtatatagatctataaaatattaaaagtagggtattaaatctaatattaagatcgtttaattacattaagctactaaaatatattttatttatattaattctataaagtttattaatttattctgattaattttcaatgtattattcatttatatattagaaaataatgaattatcctgtgtatatataaatttgaatacttaatatatcttttattattaaaaaattcataatataacgtattaagaataaaaatcaaatgaatttataattcagatattaaaacgtaatatattctctgaatgtaaactatcttatgggtaaaaacagtaactgaagttaacattcaccacacttgtaatataatactaaaaatatatatgtattaattattagtacagtgtgatttatgtatattaaatagattacaaatgttatattacttttttttactgggtcttttatgtttggtttctatcttttcaaaacagtcagttttttcaataaatataacaatttgttcttcgaaggacaatgaaactcttcctttctttgttactaccattgactcgggatattcattttcatcttcctttttttcccaaactaatttatccttgactacaaccttatgacacctaacacctgtattgaacatgtatttaaaacattcaaatgagcttaattcgacatcaatactctcttcggttattaaaacttcttttccctccgaatctttggtgaaaagttcaaagcaaaacggaattttatggtcacttattttccatttgttgttaatgtgtctaactatagttaatatatctttaattcgaatgaaaaattccttaaattgtctattttgaattaatgatgatgcgtaaggctttccaggtgtatgttcataagccaactcaccgtcacaaattagttgctcaagatttgcaaagagttcaaatttcactttggttatatgataacttacttttttgaagtctttttttgtcattggaatcaattttcctcgttcattcctcttcattaatttaattatcttacactttacccgagttttcttttcaataacattttcttgagtctcactaggttcaataatatctaccggcataggttgatcaattggctcaggttgttctattggttgttcaattggctcaggttcttctattggttgttcaattggctcaggttcttctattggttgttcaattggttcaggttcttctgctggctgttcaattggttcagtttcttctgctggttgatcaatcggctgagtttcttctattggttgatcaataggctgagtttcttctattggttgttcaattggctgttgtggaggtggtacataatgtgtaggccttggtggtattggttgtgttggtggtacatatggtgaataaggaggataaggataaggtgaataaggaggataaggataaggtggataaggtggatatggataaggtgggtaaggaggatatccaggataataatatccaggatatggctgatatccaggtggataacgtggtattggtcgaactggataaccaggttgaactgggaaaccaggttgactagcttgaggatgtattggcaatggatattgtattggctgtattggcagtctaggttgtggatgtacaggttgtggttgagcaggtttcattgataaatcgagaggttctgtttgttccggttctaaaacaaagggttgttcttcaggttcttgagtgggttgctcactagtctgttctgttacctcaaagttatcatcttctccatgactatcaatttctatagtaccatttgtgttattcggtttgtcaccacaatgaacatattctgttactgtcaatatgaatataatccatatttgtaagatatgcatctcttaagtgatatcctttgtataattttttcaacgatcatttataaacagattataaaagatatccaatcgatatatcaagtttaactagctcaaatctgacgtgtgtatatagatctataaaatattataaaagtagggtattgtcatctgaataataagatcgtttaattatattaagctactaaaatttattatatttatattaattctataaagtttattagtttattctgattaattttcaatgtattgtttatctacatatattgacaaattataaattatcctgtgtgtgcaagatattagaatatttatatgtgtgttattaaaaaattcataatataacgtattaagaataaaaatcaaatggatttataattcagatagtcaaacgtaatatattctctgaatgtaaactatcttatgggtaaaaacagtaactgaagttaacattcaccacactcgtaatataatactgggaatatatacgaatgaatatataaaaaattttggtacagtgtgatttatgtatattaaatatattacaaatgttatattattattttttactgcgtcttcctttagttctggcttgtatctgttcataacagtcatatttttctataaatgtaacaatttgtcctttgaagaacaataaaacttttcctactttggtcaataccattgccgtaggataactatcttcatcttcctttttttcccaaacaaatttatttttgactataaccttatgacatctaatacctgaaataaatgtatatttaaaacattcggtataactaaaatcaacttcatattgatctttggttattataacatcgtttccttctccatctttagtgaaaagttgaaagcaatatggaatattatgatcacttactttccatttgttattaacgtgcttaactataactagttcatcaccacgtttaacgaaaaattctttatttcgtttattttgaattattattgaggcgtaagggttccaaaaaaaatgttcataaactaaatcaccgtcacaatacagttgctcaagatttgcaaggagttcatatttcactttgtttctatcataacttacttttttgacgtcttttcttatcattggaatcaattcacctcgtccattcctcttcattaatacaattgatttgcatcttcccggagtcttcttttcaaaaccacttttttgagtctcactaggtatagtaggagccacaggcgttggtccttcaatcggctgaggctgaggtacataatgtgtaggtggtgtttgatgtcttggtggtaaatctatatatggtatacttggtctttgaattggttcttgaggtggtggtacataatgtgtaggtggtgttggtggtatgtatctttgataagttggatatggtgaataacgaggataataatgtccctgataaggaacttgtggataacgtggtataggtcttaaaacaggcattggcggccttggataaattggctgagtcggggtaggttgttgttgtacttgaaattgaggacctggataaggcagttgttgtggttgtattggtggcctcggataagttgttactggtcggaccaagtaaccaggttgtataggttgaggaggatgtacaggttgactaaattgtggataaatttgttgtgtctgtataggttgtccttgttgtggttgagtaggtttcatcgataaatcgagaggttctgtttgttcttcttctatagtaaaaggctgatgtgtgggttgtggtggtcctaaaggatatggttgttcttcaggttctgataattctacatcaatttcttcttcctcacttgcttcagtagaaggttgtacaccatcatcctgtttttgctcatcaatggctgtctcagttacatagaagttatcatcttcaccaccagaattttctatactaccatttgtgttattcggattatcaccacattttacatattctggtactgtgaatatgaatataatccatatttgtaaaatatacatctcataattaatatcctttgtataaatttactcaaagaggatttacaaacaaatgataaaagtatacaatcgatatatcaagtataattagctcaaatctgatgtgtgtatatagatctataaaatattataaaagtagggtattacatctgactaataagatcactaaattatattaagctactaaaatatattatatttatattaattctataaagtttattaatttattctcattaattttcaatgtattaatcatttatatattagaaaataataaattatcatttctgtacacatcatatcagaatgcatgatatatctattattattgcaaatatttacaatgtagaacattaataacattaaatatcatgttaatgtacaattgagttaatctatattaatttaatttgtttaacatagtttattgtcgtagttaaatattgaagttgacattagtaccctcataatatgatattcaaatatataaatatggatatttataaaatattagtatacttgtatttatgcattaaaaatataatatattgtttatttatgtttacgatgttttttattgatttatgtgggcttggtaagtattatccaaatttaattatcttcagttattctaaaaatagtttttcttaatgaataatagtatccactatcattaatttcatataaagcaaaatattccttaaaatgaagtataatattttttttaaaagtaaaacaaagtgccaagagataatcatctttagaactctttttccaactaaacatatcataatattcaactctagtacaatgtacatttggtaaaaagacatatttcaaggttccatcacctgttagatcaacactgtagttttcaggagtaattaaaatctctttaccttcatcattttgtgagaagaaattaaagtgatacatagttatgttttcatattcaacccatttatttaaactgtttttgataaaaataaattcagtttcaagtctaataacaaaagtaaaaaataacttataaaatgttacacttttggaacgagcatcttcgtctgaatatatgtatacaaggtcaccgtcacaaagtatttgctcaagctcagatttcagttcataatttaccttttctaaattatcaaaagtttttttgtagtcttcttctgtcatttttactaattcgccgacactattctttttcataagcgttatttcatcacatgttactccctttttaaaatttctaattataacttcttcatcacctacagtttcttctggttgatctgctcccgctttttggcttttatcactgggtttctctggtttcgcattttgtttatcatcatcaatgagaaaaatttccaactgtgacactatggtttggaatccttcttcatcgatattatcatcagagacctcaagttgttcaattatctcctttgtatcaaaattatcttcttcatcatcagcatagtaacccgattccccacctgtatcgtcacttaatttatcagcagattgtatgtatccaactactacaaatattattatatacggataagtcttatatctcatagtaataaggttaaataaaattttatagaatggggaatctaaaactaaggatttaaagatttatttgaataattttgaattgtttgtcatcatatacatgtatataatattaataaattaacaatatataatataatttacttaaaaaattacaagtcaaattaaataaatcaatttgttatccgtttattaaagaaatgtaatgagttgaaatgttatagtggaaatattaggtttattccagaaatgattatagtaatttatgttgatgaaaacaaaaatgatgataaatttatttatatttatcatcttctaaaatttttgttgtgaagctttgaaagtactttccatccaattttttgaattttgttttatatttattgaaatcaatcagaatatttctattaggagttaaatacactgctttgggataaaaatcttcgggtgtctttacccaaatcgtttcttctttaactataattttagtacaaattctattcttaccgaacttatatttcaatgatacgtcaccagtaagaccaatatcataatgctcttcagttattaaaacatccctaccatcatcatcttgtgtgtaaaatttaatatattctgggattctcctggaaattgttgtccatttaccatcaactaatttgattaatagaaatacatttttacgaataatggtaaaactgttccttcctttaaaatacgttaataatgacgagtatgttctttttggcctatgaatgtctctgcatcgttccctgcctctctaaagtcatcaccagtcatttcaattaactttccctcatcatttctcttcaaaaatttgatcttcactaatcctctaataggttcaaaatgttcttcataatcagatcccaattgaactggaacactttctggttgtaattgtttaattggtaaaggatccacatgctgaggttgtggtagatacgattgtggacttggaaattgatgggagtattgaatttctgtttgtaggggttccactggtatagtttgtggttgttcatattgttggtattgttggtatgattgtatatctgattgataatgtgtaggtggatattcaggataatattgttgatatggaccatactgtaaagtttgagtcgggtatggttggtaaggtgataattgataatattggggttgggatacaacaataggaatttgttgtatgagtactggttgaataggttctactggtgtgtaatggggagtatatccatagtactgtgtcggtacatgttgttctataggtggcccatagtactgtactggagctatcggttgaagtccgtaatgtgtaggttgttgttctggtgtttgattttgattttgttaactggcttcagttacttcaaaattagcttcttcttcatctgaaatttcatctccaacattttcatgtgtgttgattagattatcaccacactcgacatatcctaaaatgatgaatactagtatataattatatgttggacatttgttcattatttatttataaagtcttatcccatgggggatctaaaaattattcaaatatataacacacagttacataaaatatgttataaattaacaatatatgtaaattttaaaaattaataaattaatgtataattcaaaattgcttttacaataacatattgtatttgttaaaattaatttaggaatatttagatcttcctgaaaattttctcctaaaatacagtatatatttatcatttttgattcctaacactttactatatccctcaaagttaactataacacgcatttttggtgtaacataaatctctaaaggataaccatcattatcggttttttcccatgcaatcatatcattaactacaattttagtacatttaacgcccggaaaaaattcgtatctaaaggatcccattgatgtaaaatcaatattgtaatctttattggtcattaaaacataatcgccttccttattttgtgtgtatagttttatatgatttgggatcggagcatcagttcttctccattcccctttagttttcttaactaacgtaaatccatcactgttggtcattatacaaatatcagttcttaaactatggcttaataataaacaatagggtgttccatctgtatgctcataaattatttgattctcacattctatttgttcgagatctgcattgaatttatatatttttttatttccatcgctaactataataaggtagtcttcatttgtcatttctaaaatatttcccaaataacttcttttataaaatttgattaaattatattttcttcgtggtttgggctcttttcgtttaactggttcttcttcttcatctccagactcgcttggtttatctgatggaactggacttggagatggacttttttttctttttattggtttttgagtctgttgatcataatccatcttactttttattttatctaacgactgagttctctgttgtctctctttctctgtttcctcatcatcaatatgttgaacttgtataacttcaggttctaatggtcctgttggctgttgagtttcaactaattctggtacatagtgtgatagttgttgaaattgaggctgaggttgtggttgagattcttgaatactttgagtttgcgtcggttcatataattgataacctgcttgagtttgttgaaaagttggtgttaatacataatgttgataatatggataacttggttgagtcaatggtattgatggttgagttaccggtatataatgctgataagctggctgaatctgaggttgagtttcagttattggttgatgaccaatatcacaaagagtctgtgttccatatggctgttgatatacataaggatcttgggtttcagttccataatactgatattgagattcctgggttagttgaggtacctgaggagttggttgagtaggtggcggctgataatattgctgttgttgagtttgtgtctgaagttcatatgactggtacggagcatattgttgaggatggtatcctgatgtttctggttgatattgaaatgattcagtttgatatcctggatattgttgaggttgatatcctaataattctggttgatgctgatcataagattgatcaagatcatattgttggggttgaatttgaggttgggttggatattgagattcttgtaattgttgatattgtggtaggtattgaggatcatcaaatcgatcgagtcgttgttgaatgatttgttctagatctaaaacttcaaagttatcatcctcatcttcatcatcagctggctgatcaggatcattgtcttgtgattcaacatattttattattataaatattaatatacatttgtatgtcacacatctcatgttattagagctttataaaatttaatccatgggggatcttaaaaatattcaaatgcataatacaatgtaatataaaattattttatattaaaaatataataaattttaataaattaataaaacattcatttaaatgtttaatatatcctgataacttaaaaatatttaacaagtttcaacacattaaaaatactttatacaataacatattgtatatgtcaaaaataatttaggtatatttacgctttccgatgctaggtttattaagtaccaagttatatcttttaagcctttttctatacattttactatatccctcaaagttaactataacatccaatgctgatgtaacataaatcgctaaaggataatctgcatcattatcagtttttttccatgcaatcataccagtaactacaattttatgacatttaacgcccggaaaaaattcgtatctaaaggatcgatctgatgtaaaatcaatattatattgatcactggttattaaaacataattgcctccaagatcccgtgtgtagaatttgacataatctgggataacatgatcagttcttgtccatatccctttacttttcttaactaacgtaaatccatcactgttggtcatgacaataatatcatttggtttactgtatcttaataatgaacaatagggaactctttgtgaatggacataaataatctcattgccacgttctatttgctcaagacatgcattaaatatatattttgctttatttgaattactaaatataacaccatagtctcgaccagtcatttctaccagatttccctcacaatccttcttataaaatttgagttttttaatttttctttgtggtttgggatcttttcgtttaacaggttcttgtccatcatcatcttctccttgatttccacttgtagttcgagttctttttctttttcctggttgtgttttatctgtttgtcctaccttttcttttaatttatctaacagacgatccatctcttgtgtaacgagtttttcttcaaaagattcttcaatcgattgcacttctataacttcaggttctaattgttcggctgtctgttgtgtttgaattatagtcgctggtgaataatatgttggcagttgtagttgtactttagatagaaccatgtatattacaggcggttttccagttggttgttgagcttgacttacaagtgttggtacataatgtatagattgttcttgagttggttgtgttagtaattgactgggttgagactgagttgattgttgttgagatccataaggatctgtatattcgggcacataatagtgatattgaggttcttgatggagttgttctagttgctgctgagttattgtttgaatttgtggaggttcatagtaccaatatgtatcagtttgttgttgttgagtttgagtctgagcttggtatggttgataagttccataatgttggggttggggttgagattgttgttctaattgtgattcagtctgtaaatataataattctgatatttgttgataaggtgctggatgttcaggattttcagtaggattagtttgttgtccagtttccgatagatctaaaacttcaaagttgtcttcttcttcatcctcaggagctggttgattaggattattatctgccgattcaacatattttattactataagtatcaatataaaattatgggaaatattcttgttcattatactattaatatagctatactccatgggggatctggaaatattcaaggtatataatacaccaataaataaaatatattatcagctaacaatatatgtaaattttaaaaattaataaattaatgtataattcaaaacttgcacgtaatataaatctatcatcattgaagcatttaaaataatattttttaaatcaaaattaaacggatttttggtaaaaaaccaaacttatcaactttaaaactattttaaaactgttaattaacaaaacaaaaatgtttgatggaaaaatattaaactttcacatgactaatagttgccttggtttcagttagtttttatactctgtaaaaagatatttgacaaaatattgaattattttccagttagatataatttttgatatttcctttttgtttaaaaatttctcattatctagaaccaatgtttttgataatttttaggaaaataaattccaaacatctaattaatttttagtttaatcttgttttcacgtttttgttgatatttttaaaatttttattatgaatcaactaaaaacatttgtgtaacttattatatatttttatttttttcatattcccaaattacacaatttcctaatttaaccattgtacactttgatccttttttaaaactgtatacctcgacatcttctccattaaattcaacatcatacatatcagtaggcatcaaaacattttttccttcattatctttggtgtatagcttaatacatgaatccacatcagtattagaactaatctcatcatcaaatgtctttagatcagagtgggttttaatatctgtaatcatttcgaagatatcattttttccagccttaaacactttaaattttttgtttgtgaaaaaaatcgtcatataatcttcattattataacttttaatcattactttgtatccaaattcattgttttgagattcccaaataacttttttaccctttaaaactttgttgaatatataaccagacctggatatatattcaaaagcagcatttttaggaatacagtgatatccatcagttgatttttgactatcaatatttagttttattagttttgatccttttttattttttattttcaatttagtgttatttgaggttgtaattgaagtttcaacagatttcctacttttaacaattttttgtgtagacatttttattttagtttttattttattgtagatatagatctacctaataaatgtcgtaacaaaaaatctcataatccatcaacaaaatttagatccacaaaaaataaatatttacatgatttatgttactagaatgaagtaagttttgtaaaattataaatattttttatttaaaaattcaaaatattatctaaaatatgatttaatcaatattatttgtttaatatattggttattgaatgttggttatgaaatgtatataaaattttttaaattaatttaatttgtcgtattataaaatataattgcaaaaaattatacagagtatcaaaatattatttaccgaactaaaaattaaatcttgaacaaaggttcgaaaaatcaaaatgaaataacatagaggaagattaaaaaatatggtgaaaatagaaaaaacatttatattttaaattagtccataataatattaaacaaaaaatatgaattgcatttaacgaatataacaaatcctggatggggagaacataattatatttatcttctaccaattattgtagaaattccttaagtttatgacaaattaaagataaacataattataaataaagacatttaacttcaaaaaaatccaaatattactttttgttcaatatttcacaatagacttcatcctaccttctcactgatataaaacatttcactattttcattcctagaaccatcaggaataatatcaaaattctaacagatttgcatcactattttaccacattcaactcaaatgattatttcaggttatttaaacatttaccgactaatcatgactgtttgattttcaccaatatctcatctataccatatctcacatcgcattacatcgcatctctaaatatcccattttatagcatgtctccgattaaatcttatttgaatgggtaaacatcgaaatatttcagaactatttaataacacgttagaagattcggttgagaaacttggttccgagcatcactactgggaaagtcaaccatactccaaaacctattttaataacaaatctcgttttttaaaatttaaatattacgactccagtagtatttttaaattctttttctttcactgggtaactaagtgggcctctcttctttctaagaaatatgtagaaccatataagttacatccacttcccattgcagaccaaattcttcgttggcaaccaattttctccaagaaccttagtgatggattagttagattagagtcatttgaaacaaaacaaaataataaacccaatataaaaccctttaaatctgttttgttaagagctttattcttaacattctggaaaagagtatcatttggtctccttgggattgtagtcactaatctgtttagtctgagcattaccattttgattaaacacctcttgggcattttgaacacgaagtcatttactctactgaaaatatttttgtttttatttgctgtgataggtctacagattattgatggattattgattgaaaattttacttactatctgaatcgattaaaaactgttttggaatattctatttcaattacagtgtttcaacatggcatgtgctatagaagaaaacatttcaataatatcaatggatccaactccttgagtgtttgtaacaatgttttacacacctgtcttcctgactcagaatgttcccaaaaccctatgttttgtccagcacggcgtttccaaaacaaagatattactccaaacatgttcacctttgagtattatgattgcttctacatctctctattcgttgaatcattaataccaattgttaactttttgtcgaactttatctatggaataatattaatttccatgcagattaagattaatttgtgggcgttgtactttgttggagcatttttcatttttcttatgattgtcgttgagatcataaacactttaatttttcatttcatttgccatgtcaaggattataggatctcagaatgcattgaaattatatctgagttgcctctgatcaacaaattactctacgatgatattgccgtcaacatcattactcaaaccaggaatactgaactggtattagttttaattaggatttttttgacattactcaacaaatcgttatatgtaatatttagcaatatatccttctatgtcctgatgaggtattttgtaaaaacaataaaagctgcagaggttattaaggacattgatactgccgccttcttatcaacgttctacatctttttcaggattatcaactcaatgttcttgtttccttatgcacttggaagattaactatgtcatatgtatcatacaacagggttaacaaatatgttaccagttgttcacctaacttttacatcagtgataacaagtttggtggatcaacagtaatgtcatctgacctgcctgacgttaccaatgagattcccaaggatgttcttgtactatacaaggatgcttcatttgcgtgggtccacactaggaaggattttgttaatgacaacaatgaagtccatttgaaaaatattaacttccaacttaagaggggagagatagcaattattacaggatcccaaggttctggtaaatctaacttcatcaaatcaatacttggtgagatgacactggttggtggttcaatgtctgttattccacttcacacatcaatgccaatattttattcatctgagaatatatggctacaacagggcactattagatcaaacatcacctttggacacagatttgatgaggacatttatgaatcagttatcaaagcacttgaacttgaaactgatatattatcatgggagaaaggtgactttagagttgtctcagataatgctcactcactaagttgtggtcagagagttagaatggagatggctagggccatatatgcatatcttatatttagtaaagtgaacaaggattacaatagaaaccagtgttcattcctgatgtgtctggattcacaatttcatggattagatccatacgtatccagaactgtattcttcaatctgttcaattccaagactggcctacttgttaaggacgatcttgctgttatactttcatcatcaatgacattgctggataaatgtgtcagagcttcagacttggttaagtttcccagaattcccgtatacgaaattgataacaaatatttgattttcagctgttatttatcagacattttttctgacaagaagacaccaaatgggtttgaatatatcacacctccttcaggtccatataaattgaatttcttcaccaaggatatgatgaaactatgttatttcggttcttctaaatcagtaagacgctttgtcacaaagtcaaactatagacgttcaataacttcaattattgaagaaactcattctgaagataaatttaatccatatttcatgtatttcaaggcagctggatttacttttgttctgttcataatctttgcggttgcatcaagtgtcatggataactccaagtttgtccttgcaacaaatctcacagattatatttttaaaaaaactaacgaattcaatgatgacatttctgttgatttattagatgtaaaatcacacagcaactctgccctcaacgtaattctgatctttgtattagttgttatgtgttgttctctaatgtcaaccgtattatttactatatcctgtttaatggcctcaagaagaattcacgagtattgtctcaactcagtcttcaagaacagctcatcagtcattaagatcaagaaacagattaaccaaatcatcacttacttttcttcagatattgtttttattgatgaatgtattggaaacatgatatgtaccactttcctgtcattcattcaaacagtcatctccattggaactctattctacactattcctctgtccattccatttatttccatatctttgataattggctttgaatttgtagtatcaaaatttgttatatcatccagaaacattactctaggatcactagagagtatgtcacatattaacacaacgtgcgagaatgccatcatgggatcagcaatctacagaagttttaaaaaggaatgggagttggttaatgatattattgaaagaaatgattataaaactagatgttggtatttagttcattcatttttgagttggacttcagttatgttcaattggttattttcacttgctactgttctattcctctgttcaatgataatatttgacaagtttacaaattacaagatgaatgttgggtattttggattagctctatcactcagtatgagtgctattaaatcttttagcaatttctcattttcctttgcctggttgcaagtatttatgtgttctaatcgaagatttcaatgctttattcctcctggaaccaagtgtgttttcgacaaattccgcaatgttcatgaagaggatgtagttattgattctaccaatcccgaagagcaattcgaagaattgaacctgcttaagagaagggtaattgaattcaaaaaaactaaccccaatattcttagaaggcttgtgtatagaccaaagattaatattgttgatatttgcaaatatatttcccctgaacacactggagtagtattgaaggacgtctgtgtgtatactaactcacagatgaacaaggaaggcattatccttggcaacataaacgcatcaacttctaattctgatatcattggtatcattggtagaacaggtgctggtaagacaactctgctatctgtgctagaaaacaatgttaggaatagaacgggtcaagtcctgttagatggcacagatttaaaagaaattcccaaaagtgtcattagaaatattattggtgttcttcctcaattaccctttgtctttaagggctggaccattagaaggttcttggatccaaggagactattcagtgatgaacaaattaatgaagccctggacaattgtggcctcttggattttgtaaataaccttcatggtggaaagagactcgatacaataattatcccaaaaccacttaacatggccaaaaacttttttgaacaatcgccaaaagagtcgtttaacaaaggtaaggaatcttaccacgaagatagggcaatgaccatggatgactttaaaacagatgatatcatgttatctgtgactcagctcagaacattatggttcgccaaactcgtactatacagacatcagtacagaatgttaatcattgatgaaccaccgtcggataacatttctgaggatggttctgaagttcaagatattggtatcccaatctatgaactattggataaatatttcaaacactgtacatgttttgttactgcgcacttctctaacgttctaaaatcttgcacatccatatgggtgatgcatcacggcagactcatcaagacctgcagtgcttcagaagtatccaaaaacgaatcaatctcaaatgtaattgaagagatggttaccaaatactcaaactaattttaatgcagtaatatttaacaattctcattttttaattatacctctaatttttcagtctatacatacataaatatataagttcttttttaccattaaatggtttgttttcttagacttttagacatgagatgtatattttaacatcaataaaaaatatcacttcagtgttacaaatgaatcatttatgatcaaacactttcaatttcaattcaatttccattttgttaaagtccgaattatttagttttattacttgtactagggtttggcaaaaggctacttggtcatttatttaaaaaggaataataccaaattaaattgaactattctgttattgaatttaaggattgaaatgactaagttataattaattagatgtactttagtgacgcattagattaattgagttagaaacttggtgtctaactctacttcattttacacttgatttatgaaattttaataaagaatactttataaaatcttaaatgacaaatgattctggataaatgaaaattaaatgaagtatcaatttcatgaggactttttggcaagttttgatacatcatctgtatgtttgttaatatcatatccacggaatctttcccatctatggttttcttttaatttaaagtagacagttgtaccatcattggaagttaatgttaaaaacacaggggttttataattgttactctcaccatagagataaaccagcgcactggtaaactgatatcctgcctggggtttcactgataaagtgctttcatcttttaaccttatttcggagcattttggcagggtgtgagaatatctcgcaatttcgttagtaagattacctacttcttgaacctttacttcaactttctcaagtttattttcggaatcaacatagactaattcgtattcatttgtatgtgtcatttctagataaagaacttgataaactttaaataacacagttctaagtcttgttactacattgtatgcacctaagtttttgtctaaaacatattgtcgcccagtccagctataggaccagattttatcatctgcacggaaaacaaccataacaacatgaccggcatttgttaatgaataaaatgcttccacacttttaaacttttcatccggcaaatcggccaagaatccatttgtttcaaaaacgttaaacgaaaggcttttaccaggttgtttttctaatgtgtgctctaccttcattacatgcttcagtggagagtgctctgtagcttttacaactacggttctttctacagggaatttcggtttagttaaggttccatcataatagtaagatgactggttataattagtaaaattaagacttatgtagttgtgttcggtatatgcagcaaatctcaatacactggacaactcagtttcttcaaactcttttttctcataacttccattatgtagtacaaaagtatcagtacgatgatctcctacgagtctaagtacaagagcagctccttccttgcgaaggtgaaatgcttcaacttttcttacttcggtttccggcaaattcagagaaaagtttctaacagaccctacataaaaaggcacatggccacgtttgaatagtaatttgtgaacacattttgtgtaataacgagatggatcatgttcatggcattttacttcaacttgattgaaagaagttttctttgtaaagcgagtttctggtctatatgtttcaaacttcgttgggtcgacatgcgcgacacgattaaacctagaatccagcagttccagtccatctgaaacattttcttctcgagtttccaagaaatatgtcctatctgataaatacataaagtcaagtacggcacgtccaaccataacttttaccaggagtggtctggcgaagttttcatcaaacctggagaaataaaccacgacatgactaacttcaggtttaagtggtaatccttccaaatctgcagctccagatttatatttgtaaaccctagaactgacatttgagctactttgtccaacgggatggaatcggtgggtaaatgatacgaaaccttcatacctcttctcaacatatgtcgttcctgcaacagtaatcgaaagggatccaccatcatatgttcctgaacttactgaaagatccaaaagaactgagcggtctaaaaatgctgcagtatgttcgagtaagtcctcagttaaatgttttgcagtcaattcccattgattttcacctttatgtacataagaaaatctctttgcagaatcgtcttcgaaggttacgaggactggaacattagacctatctaaaaatgctctaagggctttcacagtagcttctgaaagattggcatttgttccaccatatgataggactggtttgaatgaatttccatctttacgttcgtatgtgaaagacggaaattcaccaactcttttgtttacagttactttaacttcattttccccaacggaatatgtgtacggtttactctcagtagcgaaaaagctaaggcccaaatcaactagaacttccactggttctcgaggtcggggtgtaacaggactataatcatcttcatcttcatcacgtttcggtgtcacgggaacaggttccttgggagttgttggtgcaggttctttatctcccttaggttttaatggacttggaccaggtgttggctccgaagctggtgtgggttcaggtgcaggtgtgggttctacatctttacctttgggtaaatcaagttcttcgggagttttctttttatcctcttttgcgaaggggaataaatctgtggacaatagttctgccttggtggagtagtggtgaaattttccatcatgatataaagtaacgaaatcaggtttcttttccttatcaaagacagtgaaacctgagcaaacgagtaccttttgtaatcgaacttctttaccttcacttgagaaccttttaactctcatttcgggttccactgtgaaggcaaatccactcagcgtagtttcatcgaaggtatggctgacggcttttggagtcaatgtatatttcccaacagtttgtttagtttttgaattgagatcaaattcgagaacggattctgttgatttcaaaccagactcaggttcttccaaatagaatttccaaaccactttcttcttttcatcttcttcctcctttttcttttccttgtacacaaatgtcagtgtcaaagcaactgctaatgctactgcaaatacaagtacaagaatcaaggcaacccaaactttattcatttgcggatgcgaccaagctgattggtaataacaaaggataaatgtgttaatatatgctcagataaggatgtctacaggtgaaattaacttgcttccaattcagaaactgttcttctatccctattcttcctcaaacatttcttgttgtggggattattatcatcaattttatcttcttgtgtcaatttatcctattcgtttaattatttccatcatttcatcaatttcaagggcacagatttaatagtaattatttgatttacattccagtttgaaattattttaatttcaccttttctttgattatttttttcaattcccgttttatacattcttcctgatttttattatttttatcccaaacactttttttatttatattgtcccgactttatattttttcattattttctttaatcttgcattattttattttactcttttttttcatttattctacttatttttgaccgaatttcaccttagtttttaatttatttaatttaatatttcatttaatctcaacttcttattttatttttctctaatgtgttattaaatttgtgtaaataatgcgtaaatacatcaaattatacaatcccaaatcatacaaatattaatatataaaataataaataaaataataaataaaataataaataaaataataaataaaacatataaaatgataaataaaatgataaatttgtgtaggaaatttaaattaaatttacgagggtattagatttaaaaaatccaattataaaaaatcttaaccctttacaactcattgagcaataaattgagttaatttaatgttattttgatatctcggccgtctaaagtcatgagtgttattaccctggattcaccgtttgcgattggtacaataactttatttaggagatctgggaacttatttcctttatataattccttcccatgatgactgaccgattcaaaatacttcccaggtttaggcgtatattcctcctggttactgagtacagtatattcaatgttgctgttattatctttaatgtcaatatcaagatctaggaggatttccccagtggtgtcggaagtccattgattatttttatacttgtaaattaacatattactcttgccaaagccgacgattatagtattatccagggtgtagaacattattgtcttggggtacggaccctctctaccctcctttagcttccatacactctcatttttatagttaaatgcaacacatttagcatcttcaaacacatattcatacattagaattttgttagaatggtatttctttactttgtatttacttgtgtcatttaccttaaggcctgaaccgtccctggtgattatatcaatgaacgtcggatactctcgctcaggaattacaattctatcatcaaagggcctgtatcttcgtctaatgtacgtgaactttaatacaaacagcaccgatgccaccattgctattaaaactccagacaaaatcgttaacttacggttatccattttactctacgataaaatcgaaatttcaaattataatatccagttataatattatattataatattatattaagttgatttaaatattaaaaatacattaaatattaaaaattagaaagattaaaaattagaaagattaaaaataataaaattatgaattataaaattaaaaattgaaattattgaatataaaattcatggaaagtcaataattgagggatattgaaatttgttaatgggggcgtctcgatagtatttaactgggattaattccatcttccatacgaatttcatatttttttcaattattcattaaattttcattatttccgattacgaattttttaaatattctcagattctcaacttcacgaacataaatttcaacacacttcaaaatttcttgtatttagtaataaatatttagtataaatgtgataaaattgaaaaattgttaagttgagtgttattagacgattgtgtcggatttatatatcaaccagtgcaaatgctttgcattttataattttagaatcatttaactctgttaaaaattcattatttgggtccatatctttgaattcgtagactcgatcttcagtccataatttaaagctcagatgatgcatagttattgcctttatttcagttccacacttatgcttatttttgttataataatctcccaacactattactcttataacatattcattctccacattatcatcaatttctttcccgttgattatatctccgttcccattgattatatctttgttcccattgattatatctttgttcccgttgattatatctccgttctcgatgattttactcttgatatcatcgattagaacatatttggcaatgaaatattcactgctgtataaatataagcattcgtctagaaagtgatataaaagtttaattaatccttttccggtaatttctaaagttttcagatgtttgggttcgacgtatgataaatctgaaatgtaattaaacaaagaaatggaaatggattctaacgcttccttaattgattttccctgtcccaagagtataacatccgctggatgatccaaatattcataatcatacgatacatcctttaacataattaataatttatttaaatcaatctctccattaatttttttattaaagttttcatcaaattttgcgcattcaggttctaaattatttttaacaattaaagcctttgaatattcattggaatttgtatgattggaattatgtggaattggtatgctaaacggcgtattatatacttcaatattacattgaagttcgggaaatttagtatccgaaaccattataaaaattctgtcaccccaaaaattattaaaaatatataaaaaattaatttattaatcattaaggaaatgtttactttggaatcttagatggggatactatttaatattttttaaattcacgtttaaccacatttatctcatgtgtataaaaattattatcaacttaaatatttcattaatttatacataaattcatttttttctactattcaatcctggattccaacatctaaaccaccttgttttccactaaatttactacttttaattaatttactacataaacataaaaatacattatttctaaatcctgtaaacctgtgtaatccttctgtaaaccctgtataccatgtgtaaacctgtgtaaaccgttgttattctgttaaaaatgcattcagctccgatggtataggttaggctgtaatttcttgtttgagggacttgataatttctcttcttttcctttcatgtctggagattttcccggcgaagatgtatctcttggcccttgggactctcgggtcatattcctcctgcacaatgtcatgtgtcctcggtctcaacagtaaacatcgccctcccgcatccattatcgcctttgccgctgatctcgtaaatccgtgagcctatccctcaatataataattaattagtataataataattaaataattaaataattaaatgattaaataagtaaagagaatattgtgtgtactttgacgataagatttttggctgtgagttgtgtttgtttttctccgtgtgctcttttatcgccaacgacctgaaccagatacaatggctaaattatactttgatgggatggtttagttggtatctcccgagtttggctccaattcgttctagaaatgcccagtcaacggtggcgccatctggcgctctatttaattcacttagtggaataagttcataattacatcttttataacgtacaccgtgacctaaaggtctcccaacgaatttcggtattcttctatacaacggagtctggcctccctcaaacactataaataataatttattatattgtttactcgggttaatgtatttccctgatctgtgtttttggcctttacaaccacgtcctgaactcccaccttttcctgacccatgtcctcgtcctagtcttttcttctttttttctcccaacgagggtagtttatggagtttcagaacttcttctccttcttcaagaccgccaccgtgcacagtactctgtaaaccaatagttaattatgcacttacctcccacttgtgagtgtatggtatttcacaaccctctggtaacttaaatatcgcatgccgagggtcacgctgacttaaatcccacacatatctcggaattccagacaaatctacaccatatccaatattacgtcaatagtgtgtaagaatgtgtaaaatgtgtaactagtgtaaaaatgtgtaagaatgtgtaaaatgtgtaactggagtaggtacaattctgagcggctttgagtgctccggtttcttcaaattgtttctcataggtatcgaaaatgtcattttgtagtgattggatttgttctcttacatttgccccaagtctgtacttatcttcaatttctaaatctccgtttgattctatcagtttcagctcctcctccaacggctttgccacttccacaaatctaattcacaaattaattatgttgatgggaacttggttaacagttcgtgccacagcgattgttgttctttggtgaaaattggttcatctgttccgtcctgaacatggaaatagaataattaatttacttttacagattgaaagaagtcgcgccattcttgtttacggagttcagcatttctgtttttatggaaacgttctaattttatcacctgcttcctctcaaactttaaaaatttatacaacggatgcgctctaggcaccttgtccctccctaatcccatcatccaatacattattcacataattataacaatttattatttacatacatttatttatttatatataattaattatatgattagtttgtgtattggattacttctgccgaatgagttgatttggaaaaagtttttaatttcttcctcttccttatttaagtcttctggcgtgtattcgactccgctatactgcggaattatcttagaaacagttgattcaggaattatctcagaatctccggtggaatctgatgaataaatctggttaatgcgattagaattaaaaaaattagagttaaaaaggtttgaattaaaaaggtttgaattaaaaaggtttgaatttttgaaaataaaacagaatccgcaagttaacttacataaacataagattatataatacatatcaactgtaaatattataaactcagcatttgtgtgtggtaatttatgatattattttaattttattttaatgtatgtaagttttttatttttaaaattaattatttttttattttttttcagcaagtttagtttttgttttataaatttgagttatttaagtaaatcaggccccttcaccttatatggtaatttacgcacttgtaaaaaacttaagcgtacacattctggtagaaaagcgctgttacgtgctttaaccactgcggtacttcgtcatggcaggatcataaccactttcaacaaggctcggcaggctaaacctaaggttgaacggattataaaatactccaaaaaagagaataaacgccatgctcgcgttttaattaatagttacttgtatgatagggaattaacggagaatattttaaaacttgctccggaacggtttaaggaacggcatggcggttactgcagaatcaaacgacttaacacctttaacatcggcgataactcaactcgcgtaatcttagaattattagaatactaagccaacacataaataatgcacaataaccacagtaatgtgtacaataaccacagtaatgtgtacaacatatttgcagaatactatagtgtagctacattaattagtattagaattaacatttggataagtaatcttgtgttgacatgtggaaaagtcttgaaagcgttctcgaacactgaaactcttcctcatccgcttcctcatcattactacaacaatatcaacaatatgaacacaatattcacaatatcaaaacgatattcacagagttaacagagttaacagtattcacagagttaacgggttaattgtttaattgagatacgtatcgaatttgtatagtatgaattgttttggttgtgatccgttgatcagctgttcgtgagtattaataatacttgataatctttgggtagttaataccctttcattcggtaatagcatagcctcaaataacttcaccgaatcactaaacatattagcagtgcatgtgttaccttttagtagtgtcaagtttgtttaactctatgaaatcatcaacattaaactgttgtttatctagtttggttgacttgactttgtggtaaaactggtcaaacaactgaaagattatgcaccgggtataagatgtaactgtaaaaattaccttgatgatcccgtatgacccgaaaatgtaaattaacggcttactcgtagataaaaccaatttcaagtttctaatacaatcaactcattaatatattttatactattatactattatactattatactatatattttatactatatattttatactatatattttatactatatattttatactatatattttatactatatattttatactatatattttatactatatattttatagttttatattttatagttttatattttatactattatattttatactattatatttattgtgtataactacgttaatattacttttcgtatagaatgtcgatgaattgtatgaagattttaagtttattgttgtagcgtaggttagcgttgaattctggtatctcggtcatgacgaaggtgttaaactcttcactgagtttaatcagtgcatcaattccgataaatgaattattgggaaacaggtcagaaaaggtcaagaacgctactttcccatgtgttagtgggatcctaacccttctcaacggtgttacctggatccacctttcccttacatccgatttgtctatttttacaccatttgcatatttagtaataaaatattccatgtccttgttcatacagaatatatcattgtaaacagaattgtcctcattgtcaccgtcagtaagactggttacccctgagttattctgtttttgccggaaattctcagtatccaggtgatacacatcgcagtattggtatagaattggtatgaatggcaggaatcgatcgcggttaagtccgttcttatacaactcctcaggcgctctgttactcgtacacaccaacaccaaacccttctacataatcatacaacaataatattgtgaatattgtgaatattgtgaataatgtgaataatgtgaataatgtgaatattgtgaatattgtgaatattgtgaataatgggaatacgttgaaaagtgtggtgaatagttccttgaggatcatggcgtctgagatatgcgtgacgtggaactcatccagacaaagtaacttgtaattcttcactatctcgtcacacaccaattccatcacatttttcacaccactacccacaccattggttgtgttattggtaatgtgactggatttcacagtagaattagtgttgctcgtgtgatgagttttgatgtggtgtaatttctgttgaatttgtatcatgaattcgtggaagtggattctgtttttaggaattttcagcgtatcgtagaatgaatccattagcatagttttcccctgacctacacctccgtagatatacacacctctgggcactaaatccctagccttatgaaaggaaaaaattgatctatccctcgatttatgaaggggaaaaattgatttatccctcgaattgttgaggacattacttaacttgtccagcttattctttaaggtaagctgtgactcggttaactttatttccctagaaaatagaactaatccgattctaatcattttaactcgaatttccttagcccagaaaaggagtggtcaaattgtgtttattaaacgattaataacatttgtttctacgttatattgctcaattgttaatttagtgttaatttttgaactatgagaattagagctgggacatggaaagttgggacataaaaagtttggttgaaaattccagctgaatgtgcagcgagcgtgtactgaggggcttaaacttcctaaaattgatgaaactaaggcatcaatgtgcactggattcagcactgtgatgttgtagttgtactgctcaaatacgtaatggcgtatagccttcctgtgcttaaatctcgattttaaatatgttacacgccaacgttttctgggaatataagcatactccaccagtcccacgtctctttcctgaaccacaaattaatataattttcataaagagataaatcttttatgagaggaacctgttgtttagtaatttcaaacgcctttttaatttcagaaagtgttcttttcaagtcatatttcagaggcgtagataaggtaaccgaaaggcttcttaacgaataagaatttaacattaggtaattatcatcctgttaaaccaacaaactcactaaattataataaatactactcttaactttaattaatttacatacatttattgttacatttacggaattttagtaaagtatttatagaagatttggtaaagtatttataaaagatttagtaaaatatttatggaagatttcgtggaagatttcgtggaagatttagcacgatattttaacatacacattcggtaacaaattatcaaatttactcaaataccataaatattgtgaaaatagtataaaaattataaataatatgaaaataaaataaaaattataaatatttgaaaattgtgagaaaaattataagtaatatgaaaattgtgagaaaatgtgaaaaaagttgagaagtgagttttgggtgagattaggaagttttgagtctgagtcttgaaagaaggaaatcaagtaactgctgaggccatctctgtctcacctcctgtaacggaaataacgttctcttctcactatccctacaacacattacatatacacttatataatatagtatataatatatgtatatatggtaatagtgtggtggattacctggtgacttcgacaacgacggcggaaagagtggcgttaccgcagattctgattgattgtatgacgacaaagacgtcattttccatttcggagttaccgtaaactctcaggtaactcatcttaaggtcgttcattttatttgtgagctcgccgaggattagtaaattctccctcggctcccacgaatcctcccagtctcccttccatctcaccaaatagtaatcctacaccaatttacacacttttatacgtaatctaagcctattttatagctaatttagaggtaatctaagcctaaataacactaatttagaggcaaaataaagctaatttaggggtaaaataagcctaaattaagcctaaataaggggtaattaggaggatagaggggattacgcgtttgaatttgggtttgtagtcgagtagatcttcgacttcgacggcttcgtcggggaagttggaatgaacgtcattgctcttttttgaatctttactgtttgtgtttaaatcagtgaatttaaggtcttttatctccttgctcgggtgtgtcacagtcttactccttgtctccttcagcttatttttttcctgagtttttttcggtgattccttttcatcttgctttacctttttttgaggtttcgactttaaatttctctccttgtcactgagttcgctggccttgtcctcagttctctttctctttttctccggagactcctcaaacttatcaaccctcggagaggaaacgtcagaattctgactcctcgatttcgtctgacttctaacacacaatttaattaaagtttaagtgacagtgacagtgtgagtaactgagtaaaaagtactttgactttagttcatcgtatttttgcctgagagttttcattttatttgcgaaatccggcaaatgcgtcatgttctcctacacaatcataaattccatcgtaatatgtaaataaggttaaaattgtgctatagtatgtaaataaggttaaaattgtgctatagtatgtagttaggggtaaattaggagttaaaatagtatagttaaggggcaaatgagggagaaacttcgggttcccaggtgttatcttctggtggatatcctttccattttatcaaatatttcggctaaaacatgttgtcaaatgttattttgtacctttcccttgacgtatttgaagtctagaacatcttcaacttcaaattcgtcatcgtcattttcagtttctgacatctgattagtttcctcgttagactcctggttacttttagtggactggttagtttcctggttaggctcagtggactgattggtttcagtggtatggttggtatcttggttaggtccagtggtttggttagttccagtggtatggttaggtccagtggattggttagattgtgtcattgtgagactgggtggttgaaaaaatcatttgactggaggaataaatttaaattaaaatttgaaaaataaataactatagaatccagtaaaaaataaaagagaaataaaaaaagaaaaattttgacaacctcacacactatttggtctaacaactttaaatccagccacaactcacacctctcattttatctcaattattactcaataaactactcatcccacactggaagatacacgaatcagtaataattttacaccattcacacattaaatattttacaaaattactctcattctcaattaaatattcattaaatcccatttaatcccttaaaaatgttaaattcttcgaattttaagtgtaaatcaacttgttattgtgtgtgtgtttggttctgtgtggatttatctgcgatgaggttgttgaggtagtcgattttagttttaaggacgtctacgktgactaataagcgttgatctgtgtctgtagtattacaggcccagactttagtctctgcgtctgcgtggaattctaaccccgcaaacgccgttaactcgtaaataagattcggctccttctcaaaatcaacgttttctatcatctgtgatatcttttcactgaattttagcctggaattgatcttctccacgtcctccaaattaccctccagtctcctaaaacatttggacgcgtaaattttacctatattccgattccagtagattacagcgatcatagagtttctctatgattctcgaattctcctgcgccatccccggattcctcaccatccccaaatccctcaacaaacttacttcaccctaatcatcattatgtcatataattaatgtgtaaatgtgataatgtgtagataatgtgtaaatgtgtaaatgtgtaaatgtgatggtgttgtacgttgatgacggcgtctgagatggcgatgacgtttccgattttgaacctttccagggccctaactgttatgactcccgtcttatccaaattcgttatatccacaaactaatcccataattaatcaaataaagtataaatagtataatagtataatagtataatagtataatagtataatagtataatagtataatagtataatagtataatagtataatagtataatagtataatagtataatagtataatagtataatagtataatagtataatagtataatagtataatagtataatagtataatagtataatagtataatagtataatagtataatagtataatagtataaatagtatgttacttcgcatagagtggcgttgggtagaatttctggtttttgtgtttgttgatcgactttggagacgaatgcgataaaaatgccgaagatgttactctctcgtatttcgttcaccaggaactccttgtgctcatcatccaacaccatcgatgactcctgacccggcatctaaatcatcatcacacatttacagttaatatcatataataaagtagctccctctcccctagatagtaaggtagctccctctaggggtatatagtaaagtagctccctctcggggtataaaataagttagctccctctaggggtatagttagatatagtcaggataatgtgtaataaaatactagtggtgatttggaggataaaaatgttggaaataggttaacgcatttatgtgttcctggtgtttcaaacactttactaatgttcttcgcctgcaccaatgttcttattttattactttgtgactcagatccggagaatctatccgatccctcgggtttatcagtttgtgtgagcgtattttcactgagtgatctgttattttcttcaagtatgtagtaaattttctgtaggtatttggtgtctggtttcgtggttttcccaacgattgggaatttaattctatttatatttctctgtattaactttgatctttctcttgctctttccacctcttccgccactttattcattaaatcctcagcctcaaacgcttgagaacgggccgctctctgcgtcgtagaatttgacggaaatgttaacttgtccttgtaaatcgcacactcaaacatcatttcgtcaatgtgcttcacatacattggatccgcagtatggaatttagtacctggaaactcggtactatggtcaatactggcgaatttggtacctgtaaaattaacactatttagccctggaatagggtttaaaatcctgtagccatgtaaaaaacgatgtatcccgatgaatgtgagcgttgtttgaattagaagataaaatttacacatgttccaatggggaatatattaactgatttattattattattgtaccatatccggctaaaaaaattttattatggattcttcttttcatgataatgatgacctaaccgaacccatcacttatatctgcggaggtaatcaataaattcattaattttacaacatcttaccatttcccaccggattcctcattattcttcactattaattattaattattattaattatttttatttaaaaatttgaataatattgaaattagaatgtggccatgatgtatctttgcagccgagttctgttgttagatgtagaaattgcggatccagaatactatacaaaaaaagatcttacagaggtattaccaataattatgcctaaattattcgtaaattatgcctaaataagctctaaaatacatctaaattatgccaaaataacccctaaaatacctctaaaatatacctaaattacctctaaaatatgcctaaaatacctctaaaataagcctaaattacctctaaaataagcctaaattacctctaaaataagcctaaattacctctaaattatagctaaattacctctaaattatagctaaaatacctctaaattatacctaaataacctctaaaataaccctaaataacctctaaaataaccctaaaatacctctaaaataagcctaaattacctttaaattactttgaaaataccttaaaattccttaaaataccttgaaaataccttgaaattacctctaaaataaccctaaaatacctctaaattatacctaaattacctctaaataacctctaaataccgtaaatttacctctaaattatacctaaataacctctaaattacgtataattatgcttaaaattgtgtaaattatgtgtaatttgtgtattagttgtgcaatacgaggctcgttgatgacaaagttacaggacactcagaggactattggcggtaacaacactttaatttatctattttagagttaaaagagctttgtgagcttttatactctgcgccagagtctgatttactggaactttaccccaaattcgagctctttaaaactaagttaaacgctttattatcaactgtcacgcggtatagaatacagttacacagttccgacagtgtttacgggcccaaaacgctgaaaactgtcgaggtacaataaaattgtattatttggtttaggaagtggtctcagactatgataagctctatgaaatttaccaagagaatttacacgacgttttctcccctctgacacatgttcacagggtaattacacgtgaattatttcactgtaggagcagaactcaccggataatgaagaggaactggtgaaaaaaattaatgaggagactatgaagagaattgatgaggagactatgaagagaattgatgaggagacaaaattgcagttggaccaaattgagtataaaagaaaattaaagcacgatacaaatcagcagataaactttgagacgattcgggatgaggagtttgttaatactttgaataattgtgtagaactccgttgaaggatgtgttgaacgcagtgttacgagtgtatagagaggacgcgtgtgataatttggagcaggtcctgtgtgatatttactctgcgcacactggcgaatttgtgaaaattgtcgaaaacattacaaatttaatgaaagaaattagtaaaagaccggacgaacttagtctcagagttctaagaatcaataaccaaaagctaagagacgactttttaacacattacaactctgccaaattattaaagttcacagggttcaaagtcaccaccacacaagatttacaacacactctcaaatcacgtaattacttattgtacaatataataaaatacatagtttagataataaaatagatgacaaaatgagtaatttagataataaatagatgacaaaatgagtaatttagataaaaacaagtagtttagatgataaaatagatgctagaataaatagtttagatgataaaatagatgctagaataaatagtttagacaataaaatagataaaaataattttagtgggtatgagctttggcgatgagtattttttgtatttgcacgagccagatatgttcactttgtatgacaagtggcgggcctggctggataatataaatcacgtttccgacactcttgaacgatttttaaccaaatttaaaaaattacaaaaatccacaaaccacccgaacataatctcacaatctctcacattttaacactttttattcattttttattttttatttattttttataattttaacattattttttattcattttttataagtataataattttataaatttgataatttaataatgtcacggaagaattcaaaggtatctgcgaaaaggcgtatgaatgtaataaaaacggagtacatgataaataacaggaaaaaagagcaaagaagagaggtaaaaaaactgcaaaaccacgttaaagcacaggtttcccccaaaaacttaatccattactttagctcctcaaactttcaatctcccacaatcaaaaggtttaaaattattattctatataaagaaaattatttgatataaagaaaattatttgatataaagaaaattatttgaaaaattatataatttgttttacaggacggcctgggtgagattgagatggcggggtcgaaattgaagaatccaggcgttaatttttccaggtcggtcgactcctcaagaccactcagggccagagataaaaaaatcctacaagccactctcaaacgtaaacgcaaactacaactcaatcaactcaactaacacataattaactgaattaacacaattaacacataactaagtgaattaacacaattaacacacataactaagtgaattaactgagttaacacaattaaaagaattaagggataatatgttaagtgtgtgtggtttgagattaggttttaaagttgtatccgttgagtttgagtagttttttaaagtgtgtgaggttgtcgagtttcgggcttttgaggttaatcttccctgtccccgtgcagtagtgcgtgatgatgttccggtccagcgaaatcgacacaatctggaccttactgcaacgacacaaattctccaactcactctccgacgtctccgatctcaaaccccaaagactcatcaacacattctccaccctgtccaccctgtccacactctttacagtatttatagagtttacactgtttacactgtttacagagttaagagtgttaagagagttagagttacgtttagttgggagttccgcgtaatcagaactgagatccctagagttaatatccctagagttaagatccctagagttaagatccctagagttaagatgggtggaactgagatccctagagttaatatgagaatggtggcgagttcttttattgtaatctttggctccgaagatgtcctcgtgggtagtgttcctcatccgattttcattcctcagtatcgaatttgacctaaatatcctctcaacactctttttcacactgttttcctcattttcaccctcaagcttattacaggcggtagacactttagttaggacagaggttctagagttagttgagttactgagagtggaattagttggtgactcagtagttagtgattgattggaataattcattttggagtaaaatttccgattcttagcacttgcaaagtctctcatacaacgatctgaagataacccagcgggcctcaaaaagtcatttccaaccacaaatctattcacacccacattatttacattatttacagtattatttactgtattattcacattatttacagtgttattaagggtgttaggagtggtattagcagtgttaggagtgttatttacactatttagagcattatttacagtgttaagagtgtgaaaagatgttttggcggatttgaagttttccgattccccgttccttctggtattttcatcctttaagttatattcttcaatttccctcagattttttacagaatttaaatcatcagaatttacatctgataagttagagtttacatatgataagttatagtttaattcggatggcacggaatttggttctgataagttagagtttacatctgacaagttagagtttaattctgatggtacggaatttagatgagatgttacggaatttacatgtggttccgttgtttcttgtgattgttttttcattccttagatttatgtaaatttaataatatttgacaataaatttattaaatattaaattcggtgataaaatttaatttgaggaatgtgtaattccactcatttggggccttcacaccagatttacataattcttccacaaacttagtatcattttagtaattcacaaatgccctttataggaaaaattttacttttggcttaatttaccaaatttttacattaattaataaaaaaatatttttaacaattttgttatggaatcaaatatttactatggaattaagaatttaaattttggaattagattttaaattgttgaattaaaatttttactgtggaattagattttaaatgtcaattcgtccggagcattccgctccgccagaaattgtaacccttaaaaaattaagttaataatttttagtattacagtgctgaagaatccaggaaatacaacaccaactctcacatactaaaaatccaaactcaaatgtccgaacgagctctcgaaatgcttctactacccgaagtaacaaattctactcattaactgagttatataatgttgtaggatgagatgggattggtgttggatataggctgtggtacggggattagtggtaatgtaatctccaactctaatcatttctggatcggcctcgacatcagccaacatatgctacgtactttcaacatctacacattcttacacattcttacacattctacacattcttacacattttacacacttacacacactaatagtattttacacattcttacacatcttacacatttacacatttacacattactgtgtcttatttacacactttcgtgtcttatttacacatttcttacacacttaatttagtattttacacattttacacattaactatactattttacacactaattacacatttacattaactctgtgaatattagatgagagtttgttgaatgagattgagggtgatgtggtgttgtgtgacattggtgagccgatgaactttttaccgaacatgttcgacggttgtattagtatcagcgtactccagtggcttttcatctccaatcataaatcacaagaaccctatcacagattatcatccttcttcaagtctcttaacactataattctttatttactcttgtatattactaatagtatttcagatggttgtataagagtttagcgtataatgctagggcgtgtttgcagttttatccggagaatgtggaacaggttgacatgttacttgatatcgtaaaaaagtgtaatttcaacggaggtcttgtggtggataatcccaactcagtcaaggccaaaaagtaaataattgtgtttaccaatgtatcttaggtattacctgtgtatttggtcttataatagtaatatttaccataaactgcccaatccaattgaacaaaacggtgatcacgaagaagttgagtttgatgaggttgaatcctgtgtgatgaaaaaacgtaaaaataaattaacgtacaaggacagaataattaaaaagaaacaacaacaacgaaataaagtaattttactcagataaacttcttaacattgtactcagataaacttcttaacattatactcagattacacatattaacactattgtgctcagttacatactgtaaatattgttaggggatgaaaacaaggcctgatactaaatacactggaagaaagagacctcacgccttttaatatactatacataatgtactataccaatatacttattactatcttattactatcttattactatcttattactatcttattactatcttattactatcttattactatcttattagtatcacatatcactaactgagtattagattagattaggtcacctgtctggatacagagtaacaggtctctccttaggtctttggggaataggtctctgaggttcttattagttccccagtcttatttattagctacagtcttagtttcttcactaactagttaactatttattaactatctatcacacactccttggtattatattaactcattagtctgaatacagagtaacaggtctttacgtagatccctggtgaacagtgatgctatattgtgattacagattttagaagctcttttagtccagtagcagaaagcgttccacttagtcattcctgtagtaggccatctacttgggtcatgacgtttatactcagtaatataaccttcagaatacaacgctaagaatatcatgagtaacgcaccagcatattgtgttggtaacataacgtggtcacctcccttgttcccaaccatacctggaaatcctacggccagttgaatttcatgacacatataaaatagaattgccagacatgtggatgtcttaggctggttaataatggaacgggatagggatgattctctgtagtgaagtgaataaataaatattaccgtcaaacagatttgaaatggtgggataaggataaaagtatgccaaaacctgttgtcagtattaggttcccaaacaactgaaggtttggcccattctgccttgggtgactcagtgtatttctctctagaaacaactgccacaatgactggtgggaaacatgttaggataagaagtaccatttcaatcttgtcaataaggtaaaaaggtactatcattcctggtgcgattgcgggataaacggcatagacaacacccatacctacgaggaccatgatgacaggagacactatagctggattaatggaactgggtgcatcatattcaaatggtggaggatccttatagcagtatgtccacaaagttgctgctacaagggcaattatgcttgagatagtcatgtcaataattactgctatatagtcagtgttccacttcctcctgttaccaaacataagaatagatacgtaatgcataaatgatgtaacaatggggaaagagttttcaccgatcatgtaccaatttaggaaccaccactccatagcatagaccatgaccatatagataccaaacacaaacccagacgcagcaataacccagtaaaataaggtgacatggccctggtcaccaccggtaataaacacgaaaaatagaataacaaatgtgagaaaattcatccaagtccaaaatatagaagaatatctaatcacaggtttgtcataaataagtttgatagccttacacttgccagcattgtaggctccttgaagtgctccgaaattagatgtaacttgttcatatttctgtgtttcaccagcaagagcactagtatattgacttccactatcttcttttgccttaacagctttgtaggcattgttaacttcgttgtactttgcgatgacttccatggccttcttaaaaaaatctgctttatcactttcactagcactactgagatctgagagagcctttcggagacctactgaatcactggctcctacagcattagcaagtgcttctgcaagttttttaagttcttcttgaccagtttgaagtttactggcagtggctagtgtgttggctttagtatgtagttccttggccttcttccaaatcttagtatcattaccattaccaacttgacccttgagtaggttagctttcttcacgttgagcattcgttcgtatatatgactgacaactttaaattcagtttctaccttatccttatcagtagttagtccattgtatgtaccttctaatgtgtcgtatttgtctattacattgtcagcattactaacagtaccgccagctagttttccagctgaagtggctagagtttcggcattacctttaagtgtactaagactaccaccaacactggtagccttatctttaagtgccgtagcagcaatctgtagttcttcagctttaagcctaagtcccgcaccaagattactaccatcaacatcatacttgatagcatcagaatattgactctgttcatgtccaccatcaatgtatttatctgtaagttcaataagattacctattagcatgcttggtagacaccaaacttcaagcgaacttgccatcttcctgacgaatatactgaacaaattctcaggaagtttaaaccttagcagagcatatggagcagcactgtaggttaacctaatattaagcatcattgacaagccagcaaaaatgtacgtcacaatcttcaatagctggcgagcatcattatcctcttgaggcgctcccatttaagatattaatcactaatgttttagttagtgatgtctatggtacagaaatattacttaaaatcattgtatccatcagaacaaacattaaactatcatatcacacatatacataatttatatagtatatgatatatatagtacagtagtatactataccataatacataagattacagtactatactcttaaacccagacacataatacacatacctatagtactaaagatactatgaataatatattatgtatggtatataataaggtgaatagattgatttatttcttttcgagtttgagtagttgtggtaaatgtctccagccggacgggttctaaggaattttagctctagttaatcttaccaaatcgttgacatttccaatgatttcacaaaacttaacatttcttaaaaagttctttgacatcagctatacgttaatattatctcaatggttgggacataccaccaagtttgttctgactgcacatctcgttttatcactcaaaaatgctaaaaaattgttaacccaattttccataccgagagttgtaaatttgatgttcttttcagtctttgctgtaccatcgtacgggtgtttaactctgaacacgtcggtcatgttactgaatattattaacattttatcaaattacccagcatccaataaccacttgaaaccttctctatccacatcccttgacccaggaaatccaatctcctcctaaaaaccattatcccatgtccacaacatgtaataattattgtgtaaatgtgaaaaaatacttgtttgtgaaggacaatggatttttcctgttttaagcgttccggatcagacaagtcaatatcctgcggtgcactaaagataatttatacaataatttcataccagttaagacatccagtgatgatcgtagccttttcacctaaaaattatttatactatgaacagtggaattttatttatttgtggatttctgtacttttggaattgtttaggaaagttgccaattctctgtcccaccgacttctaatcctcactgatctatttatccatccttgcacaggtgataatctaacccatttttattctcaatactttaaattataattagtattgtgttgtaaatacttagtattgcattgtaaataattggaaatatgttgtaaatagttggaaaagtgtttgaaagagcttacagtgagattaagtagtagctgttgaattgtaaaatgatgcatcttccttcctaaattcatcatgaccgatgataaacgatttatgtaattgactgtaactgtgtaaaacattactggatgatgatatttggcgttggctttgatgttcagattatatctcattttaaggcactaaagtaatattacaactgttaacttacttcaaactccttcttcacgaatacaagttgccctgaaacatgattaacacgtaatattgtagttacctgcaattctccaagctgacagtgagaatacgcagtagtatttcttgaaagttgttcttttaaggtcatttaccaggtctgcgtcctgcacttcctgagcatatgaaggcgccacatggcctccatacgtcctcgctgataatttcggctgcttacccaaaatctcagacgaacataatttcacatcctgcaataccacaatgtcctacacacattcagttatccagtcaaatgttgtaactattcactgttaactgtgttaattgtgttaactatgtaaattgtgttaactatgtaaattgtgtaatagtaagagggtagatagttagtatacgggatcgtgttgtttgacaatttgtatgaatgattcccagatgttttttttggacttggagagtgcgagtccgcagacgttccaggtgaggatggtctttggatccttgtcgcttagtgatgaaaatccctccttgttaatttcaaactccattgaagataaggaggaaaggccagtgtcagagtaactttgatcgtcagaattgtccttcagtaacggattctcctcaacttcagactcaaccaaatcctcaatctccgtctccttacttattctctcaacttcttctctagccaacgtctgacgctccaactttactattttaggcccagtagcactgatttcctgttctactctgattattttgggctccacagctgatatttcctgctctactctgattagtttaggctccacagctgagatctcctgctcaaccttgattattttgggctcgacagcgtcaatttcttgatctagtttgattattttaggctctacagcatcaatttcctgttcaactttttcaatcttaggctccacagcatcaatttcctgttcaactttgattattttaggctcgatagcatcaatttcctgttcaactttgattattttaggctcgatagcatcaatttcctgttcaactttgattattttaggctcgatagcatcaatttcctgttcaactttgattattttaggctcgatagcatcaatttcctgttctactttgacaattttgggttccacagctgagatttctttctcttttgtttctggttcatttttcgcttgtatctataggcaattattaaactacgcaaagttatttaaattaagttaatttggtaaattagttgtgtacttcggtgtgtattcttccgagaagttcggagtcgttggtttgtaggtgtttttcggtggtttcgggtttcagttcaatatcaaaggcttcgatttttattgatattttagacctctcagcgtcaatgcacttggtcaacaacgtcacgggatcaggactaattttcaccatttggctcttaaattttaacacgtaactaagattataaactatttataaatgtgtattaatgtattaattagggtaaattatacacttggcaactaatgaaattaattatggctaaaagttaaaaacccaggcgtctcgccaaatttagatctaaagtgtaatcatgatcattaattaaattattttaaacattaaaatctaaactttacaaatttcaaaaattaattttttaactcaagtcgggatcacatacttattttattttcatttactttattatataaaatttatttaattaataaaatttttttaattaatgaaatatttttattacattttaatagtataatttcgtgttttaatggccgatagagttcagaaggagttggaggattctgtcccggaccttcatgaattattagcccaaaaattactcactttccgtgaaattaaaagtgtaatttcccgtagacgccagtttgaatttgacattctcagccctgaccccaatctctccctcatctcctacaaaaattatctcaaatatgaacttgaacttcataaatttctactctccagatttcatcaattcaaactaaaccacaaccctaacacttgtggtaactctaccaatggacataccacccacaataataatactattacccccggaaatattcctaatacccctggaaacactaatacccgtggaaacactcgaaatagcaccgagaatacccctggaaatactaatacccttggaaacacccgtcgaaacactggtgtaaacactatgagaaggggtatgagtttaaagttgatgttaaaactgcatagtgagcgtcatataaatgggatattccgtcgtggtataaaccgtttcatgggtaacactgagttgtataaattatacctaagctattgtaagaagatgaagtcgtataagttatttgaaagggtaattgtgaacggcattagcaagaacccaaacgaggaaagtttatggctaatttttgcctcttacgtgctgaagaccaaggggatcagagcctcaaagaacattatccagaagtcactcagaatccttccaaacaacctaaagctactctccttcctcatgaatctacaacttaaaattttaatcaaccacatcaactctggtgattcagtcaacggtagcacagttgagggtgactcagtcaacagggggatagttgacaggggtacagttgagaatgacacagtcaacaatgacacagttgagggagacttagttgacaggggtacaggagaattgagtaaatctgagtgtttggaggagctggagaagtgttggataatatttaagtatggacggagtaacttgagtgaatcagatttaaaagtgtttaaagaggaaattacttcagttattcggagaattcacactcaaaaccctcaattgaaaagttctataaacaaattattacacaatattactactacagagggtaaagagtactaggagttgtacggttgactatttccaattttgtttgtaaagttgagtggtgtcgataatcttttttcttttatttatgcgattagattgtagatttattattgacttattcacatttatgtccctgttctcctcctttctcaccgtcactccttttggcgccaatcccaccatcttactctataatcagtattatagcatagttaaattagctccctctaggggtattaattaggtagctccctcttccctatatagtttaggtagctccctctaggggtatatagttaatagtattagaattagctccctctcggggtatataattctaggtatagttaattagctccctctaggggtatatagtatatatagtaataactatagtaagatagtgttgtgtgggatacttggaatgatttccaggagttgactcttaggtctctggttttatcccactcaacttggtgctgtaacttctccttctccaaattcatcaaattactctgaatctacacaattatcaacttacaattatataattgaggtaactagatagactgtagactgagtagatggtgggtaatacatttttttcgtattgtatattagctttgatgcagttttcggcgtattctctgcgttcctgttgtttgttcaggatgttaacgcactccttctctatctcgccctcaaaactcttcaaatccacgtcccttcccatactatacaattctacaacaatcaacattattcatattattacaatagtaatagtgtgtagataccaagttgagtggtgtcgagtttgattttatgccgtttgtagacgattttccgggcatcctcgtagatttccttgtacttctcccttatgtccaccttctttatctcattatacgcgtccttcaatactaataatttacatcaattatgtgtataaccagaaattagacccagagggagctaagtaactaggtgatagggagagggagctatcttatcatactttactatatacccctagagggagctactttaccatatacttactatatacccctagagggagctaacttaaatatatacctatagtatttaactatatacccttagagggagctaatttaactatataatcttaactatatacctagaatacctaggtatatacccctagagggagctatcttaactatagttaactctatacccctagagggagctaattaactatagttaactctatacccctagagggagctaattaactatagttaactctatacccctagagggagctaattagagaagagggagctaaataactgaggaactggatccgtttgaccaagcccagtaacgtaaataccttgaaaagcctgcggtgccttatcatgtttacacttgtccggatgtaccaataaactcaactaaaccaacccatcaacacatttacacaattagataaagtaataaagtaataaagtaatagagtgataaagtgaatagagtgaataagtgaattactttgtggtatcgttgtttgatatcttcttcggtggcgtctggtttaagttgtaggacttggtagggacttgagaacgtttgcgaggttagcctcaggattaaacccttggaatccaactttatattcttattatcatactcgaccttgccgcctacacatttttattctattccaactcactcaacgtgtttatctcctcgtaaaataactttaacatctcatccacagcgtcgttagctttattttccacattttccagtggattttccacattttccagtggattttccacattttccacattttctggtggattatctggtggattttcggtggtatttggggaatcgtttgctgtggacgggtttacagttttttctaaattttcaccattttcatcatcatcggatgtttttttagcgtcattttctgacattataaaaattattttaacaaatttacaaaaatctatagaatttacaaatttataaaatttataaaaaataaaaaataattataaaataataaaaataaaattaataaaataaaaaagggaaggagtaaattattgttagttgtaggtggttccttcttcgggttgcagtagtcttcggttgaaatggcttgccatttgtctgcgaatatcgaccagaacagattctatcgtcagctgccgcttccagtatttcaacgtactaaaatgttccgataacacctaaaacacatttttacacattttttacattattttacacatttttaatagtattttacacactaatttacacacttttacacatcttttatagtattttacacactaatttacacatttacacacattttacacactaacatagttacacactgacgtgtcttttttacacatttttacacacttacacacactaaagtattttacgattattactgtaatgttaagacggtgtggagatacgtttccgttggagtcaactcccgtgagcgcaattttggtgatgaattttaactttggcggcttctccgggtactcgtcgtcacacgtaacagacaaacaataaatccgattctcataattcgtctaatacatcaattttacaccaatattatgttaattttacaccaaattttacctatttaaggcctaattttacacttattttagtactaattttagactattttagtactaattttactctaattttaagtattttaacactaattttaagtattttaacactaattcagtagtattttaactctaattttacacttattttacctatttaaggcctaattttacacttattttacctatttaaggcctaattttacacttattttacctatttaaggcctaattttacactaattttactctaattttaagtattttaacactaattttaagtattttaacactaattttaagtattttaactctaattttacacttattttacctatttaaggcctaattttacacttattttacctatttaaggcctaattttacacttattttacctatttaaggcctaattttacactaattttaagtattttaacactaattcagtagtattttaactctaattttatgttaatattatgttaattaattgtataaatgagataccccggggtatccgaggattgtgcaggaccaattggtgagtgtgatgtcgtcaggtcgttcgaggccgaatgaaacgccgtcgcttacgcagcccttctggcccctttcaagctcgtcaattagcttaaaactacgaggcactctcacctgaaaattttttaccttatataaaattaattaattacctcgtccatttaatgaaataactaaaattaattatgaaaaacataaaattaattatggaaacataaaatcaattatggaaacataaaattaataatgaaagataaaaatatcctccggaaattcactggtaaatttcagtcataaattatattaactcagccttcctgccacataaatcacataatattacattaaattattgcaggagattaaatttacaattgtttgatttgtgagattgtgactttggtgaagaaaatttcatggttaaagagcgagggaattatgttggtgacatcctcagtgtgtgccaaacgcctcagcagaggcactaaatcacacaattctgagtcattttcatcgttaaaccacgtctcaatgggtatggcattttccggatttaaacagtaacaacagggcgaattatcaatagtaaccacgtccttcaggggcttattaagaatctcaagatccttaatgtagtaaccgttccagtacttacaactgtccctgaataatcttctcttacacaccccgtcagggtcaatgaagtcaatcacggggtccgcgtacgattttaaacccgcagtaaaaatcacaatctcgtaaaaattcgataccacagataaaaactcagacaagtacggacgcttacctatgtaaatcgttctctccacaccattctgcatcaactacaatcattatcaactattgtttttatatttattatcattaatactatagtatgaatagtacagtggtttagtaatattccgggtgaactccaaagtcaagcgacaattggcccggatagtagtgaggcgggggaccgccatagggagctaattacctaactataatactacagtttactacaatattaatactacagtaagttggaatagtctagtggtatatgtatatcccctatgaaaggcaaagtcaagcggagattggcccggatagtagtgaggtgggggactgccacggggagctatttacctaactaaatcataacaatatacttacttgcattgggaaagagttgtttgagggttcgaatgaggagtgaattagcgtttcatccaaatctaacaccagcatttttttctacaacaacattaacttgggttaaacttactcttactgtacagactttgggtactaaagtcgtgccatacgtaaatcccgtttccctcctttccttggcgattcccacttcataacgtgttgtaccgctggttactgtgttaaactgtcgtgctgtatgttcagtgtcattaaggttggaatcctctggtatggtgtaaatttcattaaaacgtatcagagtcgtgctcttttccattactttaccagatttacgcgttaatacttgataattgctgtgtatgtatctaatgtgtaggtgaaatttggctaagctaacaactggttcaataaaattaaattattaaaatattaaaatttattaatttgaacattcgaggtaaaaagttaatcaaactcaaaatgtgtaaggtaggaatcctatgcatgcataaaaatttatctccatcaaatctccacattttaatcaaaccataaatatttaaacattaatcattattttaatattattttaatattaataatattagttaatattttaaattaaatttgtaaaaaaattttttacaatattaccataggtatgacataattttatgttaaaattagtccataattttgtatataaaatggtaaaaaaaatgttttatgagtttcgttaaattggttgaaaatttgtgaaattgtgagattctgacactacaaaattttcagagtaaaatagtaaattaattttttaaaatgtcgaaacaaacttcgctaattaataagccggaaacggccgatatggtcgaactcgcccagggcctcaaaaagttctcaacctatcccttacatatattaattatatattaattatatataataatgttacagagtggagtggattccggatacgcgatttcccctttgtggcacttttatcgttcatctagaagatcataccttcggatcactcatcagatcgtaatccacaaatattttattctataattttattctattttacttaattttatttaattttatttaataatttgggtaaatggtaaattagaaaattgagtaaggatgacagagtgacgtttgttggctatagaatgccgcatccgttggagaataagcttgagataaggatcaggactaaaactgataacccgttcaccgtcattctcagcgccatcactaacctcagaactaacctctctcacctcaaaaatctctatctcgtactttttatccattttcacatttttacccatttttacactataataattatttttacactataataattatttttattttgttgtgttaattttgttgatttagactaccctgaaggatcgcacttaaattaataattttaatttcctcaatttttcccccaatttttctcattaattaaattatttcattaattttattaatttataattttgttaattttctgagattccgcggaaaattgtctgtgccacataacaccagacgttactaagaatctttagcacatttgcgcttttaacatttcacattaatttgccaaatccaccactaaatggaaacaccaaatccatctctttattccatctccaaacagtattttacacattattacattaattttacacattattcacacctttttacacattaattcacattattttactgataaattatctaataattaattgatttgtagatttttagtgtttgggaggggttcggagttgtttttttacaactttagggacaagtctgagcaatcttttaacctctctgacgtcctctccgacgttgattttaacaccaaaattgacaatttcaacattctcgcactctccacatactccaacaacactaacagagttactaaatctgaaagtttgagaaataagtcagaggtttccgacatctttgtcactgtgttcctctccaacggcttcatcgtcctactcaaacacgacactcaactaaaataccattttcatcatcacatcctttctaccacttaccctcagaatgttactgtagaacacactggagaaactgagaatgttggagacactgtggaaactgtagaaactgagaatgtggaaactatagaaactggagaaagagtattggtatctacgattagagtgaatgactggtatagtttctatgttctgggaggtgtgttatatttgttaagttggtccagggacaggactgttaagctccatgacaatgtgttacactttagcgtatgcacgtcacaggataagttattactagtcctggagaattcactgtgtttactcaccgttgacgagctctttctgtccaattgtttacacagcccagacccacacctggacgatagtcacatggaacaactaattgacattagcacatcgggtttaaaaaacattttagtgtcaaataagttggtatttttactgtataaggaggagttgttatatacgtttttgaacaagctgagcttgtacaagtttacacccgtactaaatgtgactttcttcaactttcaaacggtctcagatattaacctagttctcaccattgacacggagtacacagttgtcatctacgattacgacaccgtaaacactgttatcactctcaaacagatggatttagtcagtactacagagggccagagtggtgatttacgatataatgtgtgtgtgttgtgtgatgacatgagtttgctcctgtttgacaatcacaatctggtccacagcgtaaaattacaacttcaagatgataaacttgtactacacaatgtgaacaattctgagaatgtcactgaggatgtaacggacactggaactgcaaagagaaatttagaagaaaaagaggaaaaagagaaagaagaggagagatataagaagttgaagagtataaggaggaagcggtttttggatttggaggcggtggagtttgaggatccgccaactcacaccaccgtccacactactgtccacactatggacgattctatggagagtaactctcaactctccaaagcctcccaagataaagaaaccgcaaccacagggactggaactgatggagatgtagatgtgggagagatgggagagggagagtatgacattgagaattactcttataaccagtacggcacggagaatttgatgtatttggtgagtgagatgaagaagttaaagaggaaagtaaagcagttggaatacctggcaatgcccaaagaacataaaatactaacaccaggactctgcccaaaacccaacgatcaattcaaacaatggtactaaccactcagttacacacttcttacacattcttacacatttacacaccaacgtgtcttatttacagaatatcgtgtcttttttacacattcttacacactaaattacacactattacacatttttacacactaatttcagttttttacacatttttacacacttttattactagttaaggggtaaaattagtatattaagggttagattggctgtttaggtgtttgttttggaacgagtacggccacataagtaagcaaaataacctcgaaaataataacctacaaatctacctcttctcaggtacacacctcttacacattcttacacacttacacacatacacacatacacattactgtgtcttatttcgacactaacgtgtcttttttacacacactaatagtattttacacacacatagttacagttacacactaatttaccgctgattacgtgttaaataatgtgcagggcctttgagtgggtatattaaaaaggttgatcgtttcagctgtcaaatggcttctctacgtaagtaactatagtaatactatcttcagatctcgatgggcttgtttgtggcactaacatcttctcctcacatcccaaagatactcaagaccacacacaagacattacacgggatggtatatccgatgttccggttgacaatgtgcagaaaaaggttggggtggtgtattattataatttgtataataataacgagaattgggaccgtagattccctaatgaggagattaaagctgtttccatctcatcaaactacatcgccgtagtcacccacttgaacattctttacatattgactaggaataacatgttactaaatgtatcaaagttaaagggtacaatagtgtcactactgactaacaggaacatgttagtagtggtgacgcagataataacaaacacacacgacacagtttataatgtgaatatcctatggattaacgggatcaaaggtttaactcataacaacacacttaaaattattactctatacaatgatctactcattctcaatcacacacacatcaaacacatcggtataatatcttaagtatattattcagttaggtaattaggtaaatagctccctatggcagtccccctcctcactactatccgggccaattgtcgcttgacattggctttcatatgggatacatatttaccactgtactatcctaactatataactatttatattatagtaaactgtagtatagtaatatagttaattagctccccttggcagtcccccgcctcactactatccgggccaattgtcgcttgactttggagttcacacggattgtatacataccaattgctctattctaactaactttactatagtattgtggtagatagtggcccggtactatccgggccaattcctccttaaccttgtggttcatagtagatataccgctagagtaatattatataggcctgagtaatgagtatgtgttgtggtatatggacagtaaatgtaagttcctgctggataacaatttgtagacaagctgtggctcctgattaataatattaagaatattaacaacaatgacattttggagtggattcccaccaccaacatcaactccaactactacccactctacatcaataatttcaacgtatccacatacttacttagtttactatacataattgactaaaatatgcttaatgtgttgtagttgtattatataaagctgaggagtggtgagcgttatccgaactgtggtaagaacataaacttctttgggtacactttgcataacttgagcataactctcaacactgagacgaatacgataatcaacactcacaagggcggaaatttgagaactgaaggcgcctccatcggcattgacagtagcgtcttcatcaacactaagctccaagtaccagagagtatcctcgagaacaacatcgacatctacgacgaactaagatacctacaaaatatcaacatcaaccaactacaatacatcatcaacatcatacaactctacaactattggtatatacaatctgagaactctgcggaaaacactggtcatactatggacaagaatgagataaacaagtatttgagtaatattaacatatttgagaagaaccacgataaactgttactaaggattttagccaaaattcagtccacaaacgtattaactttatttactgtagtatattagttatatgtaattagctccccttggcagtcccccgcctcactactatccgggccaattgtcgcttgactttggttttcatccggaatatgtattactcactgtactattccaactaattatagtattaatattgtgtagaaactgtataagaatgtggacataatacagatgttgaagatccctaaatgcttggaaatagctaaaacaattgtaaccaatgacagatacaggtaaacacaattaagtcaattgtttcagaaaactaatcaacgaatcgttaattctactacaaaagtccatgacactcaataaataatctcatcacactttctaatatagtcaagtgtataaaattattggtataaaattattatttttttggcggttttttgatgtatttttgtatgaaatctttgacatttctgtttttggcgttgtgtaggatgcgttcgcgtctggttttaaaccttagactggggtccagtgggatcttctcgcggtaccttctccgtctcgaagagtgtttagtacgtagaaacggactataaatatcataaggagtggctctgttcttcttattgatcttggaatagtactcgccgtgcactttgaaaccgtctggcttcaccgtgaaactcctgccattgcccaagtctatcctaattggatccgctgaaaatttactatacaactcctcctcctcccttttaccctttgctattacttctttccacgttatgtctctactgtaccatttctttatagtattatttgctgcttctggactatcctccgtaccagcactctcagcactatttacattattaccagagtttacagtagtgttaccactggaatcagtagtgttatcggagatccccctgagcatccgtttaaactgtgcgattctgccgtgtcttccgaggaaccggttcatgaagtagatgtacctggggtcatctttgtagtgttggtgtacgtagggtaggatgtggaaatagctgtggagtttactgaacctgaactcattcctatcaagagcaaagttaatatatctactgacgggtcctttggcgtagtttttccgcgaggcgtaccagaaaaacctgagcttgttgtccttcttgtaatgggcgaaaatgttccttttacacttgactttccgggccaagtcaatgtcgtagttaaagttcttgttgtcagggtcattttcgtataaaaatttatgaattacgtagtaagggttcttgtccttccacatgtcaaagtaaatcttactccgcacagtgccctttttacggaccttttcagagttgtacctgtaaccatacctcaccttccttgtcatacacaggcctttaacatgtttttcagttgtgttaaatatattttcaaatgtgtcgtaagttcgaggggtgtttatattgtacagaaaagataattttttacgagattccagtcccgcacggtggaaatttactattttaaagattttagatttatttgaccgggtaaatttgggtgatttggaaggaatgttaagctgcgataagttgaaagaatggccagatgtgtgacttccttctatgattttcattaattaacccttaaaattaattataaataattattataacggtaaataatagggtaaatagtaagaaaactggtggtattttagtgttggagagataccatgtgatagaacagttttgagtgaaattatgagaaaaattgagcttaaatttaagaatttgtttaaagaataaaattccatacaattttgtcattattaatttaaaatgagttaaaaattactcacacctcaaacccaagattttaacactgtaaaatattaattaattcacctttatttaacttaatattacattttattgcgttatattcacattatttaactttttatcatgttacatactattacttatattacacatattatatattatactgtatacattatactgtatgtatatacacatgtatatgtaaagtagtattagtaaaaagtatatatggtatatatactacgtgtctgggtttatgtatactatagtattatacacagtgtataaagtatattatgttaatttatcttcattttaactattaataacttgagataaacgagaatggttcgggatttgtcatttattataacacttgttactttggttcagctggattttctaatttaccaccaactaatctctaattattctaatttaaagcggtaaaatagattaaaaggttaattaaacgttggaataactcagttgtgaagtgtaaaatcaccagactctacccaatttaaatatttaattcctgttaaaacatataaatttaatattacatgagcttaaattacttatactaagttataaaattgcgtttttatgttaaaattatgtgaaaaattagatctattttagatctacaacttgtgatctaccgttaaaagatcaaccttacaaactttacattatttcattcctcttcatttcatgtatttacaactcttttcatgatctaactccctaattaatacgtgacaaaactgaaatttatcaataaatctccaaatatcagatcaatctcataacctttgtactgagaagattacaatttttaagttttaatatatactattaaagtgttaaaatccttactaaactgtgtaaaataatgaaattgatatgtttaatattaatattatgtaaaggcgttgatttggtgagggttgatgaggaggctgagcaggccctgttaatacctgtagacctaagattagacggtgaaataggtcatcaaatccataaactttaccatcctggctgttacgactcttatatcttctctggactcagggttggccacactgacattgtcattaataacctaattagaggcattaatttagtctattttggcgctaaaacattggttaacaggcgtattatccacaccataatcaagcatgagctggaaatagtagaaatcgtatcctaccacactggcgtaggagacaagtacgaatacgtagaactgattaaaacgcccgaagtttctttttttatagaaaatattaaacaggccgtgacagttaacttggcagatttgaactcgttaccactttacgtagacaccaggagtcatcccaacggcactgttgaagtatttgtctctgacatttttaaagcgtttgtaatgctgggcgtggttaattatggagctaacctcgtagagtccacgttccacaactgtgtttacaggtccacagtcttcaaacccgtggaagataacaaggtacacgtgactgtgacaagctttctcaaaaacggtaagaggaataaaaactactacgacattaataccgaggctaatatacaaggaagtgtcgtaaattacgtcaaaaccaccaccacctacgttggtaacattccagaagacttgggctaatccactgtaatccgggtttagtccacactagcccacgttattacggggtaattcacgttattcctgggtaatccagggttaattaagggttaattaaggggtttaagggttaattcctgggatttgggttaattagggagattcagtaaattacgctaggatcaggtaaaatcctcatgaccgaggttccacaccctaagataaaattttcttaaattttaatttcactaattttaaattattttaaattatttaaattaatttaattaattaattttatttgttaattttgtaaaatatgtgattttgtgtgtaatgtttgagattctgctcagaagttcaataactccgcttaatttccctaaattaacaagaaatttaattaattccaatgttaacaaattattttataataatttcaggagaatttcaacttttcctgggatccattcgaaaagtaatttttacgccaatttcactcaaaattctctcaatgagttaaatcatttgttaattcagaaaaaaaacttcgctgggcgtcagcgtgggttaaaaaggcgcaagtctaagaaagagcccagacgaatccaacactccttaggccgccgattagagcttttttggcctaaaaagaggagaaaattgaggatcagactggtacaaaatgcccggggtaatgtaatttatgaccccgtcctgaagaagtttttggtattttattataaacaaggcacgcaagtgttcagaggattcagagccaatgggaataaattcgaactcgccaaagccaaagccctcaacttcgccagacaaatgacacaatactacacacaaagatacaacaaaataatcgagaaatttcatacccacactgaaaccaccgatggtaaaactatggacggtaacactaatcatagtgttgtcactcgggatgtgataaattacaatgtgaaattacagccggactgtaatttgagtggtgttcgtggtatatttttcgatgttaagacgagttcgtgggtggtaaaattcgtcgactctggcgttagaaagtataaattcttctcaaccgagcttgggtttggaaattcctacaccaacgccgttgaattcttgcggtttcaactgtatagaaatcatcaattcttacacagaagacataggacaaggaaaaacagaccaatactaaagtaaatccaaactcagcatggatagtacagtggatagtatggatcccatgtgaactccaaagtcaagcgtaaattggcccggatagtagtgaggcgggggactgccaaagggagctaattatactattattataccacagtttattacaatattaatactacagtaagtcaatatagtggagtgagtagtacacattccgggtgaaaggcaaagtcaagcgggaattggcccggatagtagtgaggcgggggactgccatagggagctaattacacataactaatatacagaataatatattaaatattgtagagtatgcgatattgtggtgagtatggttatggattgggattgacttgttgccaattttgtaccatgagtttttgtatgcatagcatggcttgtcgtgagatgtctctgtttttatgagttattaactctaatatcttatccttcaccttgaatttcttacttatgttcctactgttcctatacaacctaaaaaactcccctataccatcatcaacgtgttgtatatataaatagtgtaaatattgtaatactgttgtataagagtaaataattgtaatgctgttgtataggagtaaaatagtgtgtgtagtaccaagatcatagagtgcgatagagatagtggtgggatcgtcagaggtgtagaggaggttgatgagtttggaaatgttcacaaactcgtcctgctcaaacttctcattatgcaacatccaaaatttctctacaattcacaatgttaacgtttacacgagtttacaatagtcaatggggtaagtagtacctgagtgtagaattgaccatttgagtattccactgttcaactcgttacaatagcgctcataattactacaatcatactataattaagcaaactctcataactactaattccggggagtcggggtaaaaattaactatagtaatatctaagtagaagttgataactactaattctggggagtcgacccatttttaactactaaatatagtagtatacctaaacttgattaatttgttttcgagttggatgtgtagtttttggaggttatcgtagagttcgctatcgttccacttatcatacagtagtagtgttaacgcctgaaaaacgtaaactcgttacaacgtacgttgataatgttatactcgacaatcacttgcaaacagtttatattattcaacaaattcttaaacaacaacaaacttatccttattatctatcattcattattgttaagtaaatttccataactactgtatctggggagtcggggtaaaattaactatagtaacagctaaataaatgttgataactactgtatctgggtagtcggggtaaaattaactatagtaatagctaaataaatgttgataactacgaattccgggtagtcggtgtaaaattaactatataattaagtaaattggttgagaaactttttcgattttggttgtggagagaatattgcagaggaggtgtatgagtttctgttggtagaagaattcgatgtatttattagttcttgagacgagccacaggcagaaaatcgccttgtattgcgcatttggtaagatttccttgtccaaattactctttatcaaccccaacacactctcattctctatcaactcgtgataacgacctaaacacattattcatagtattatatattagtatagataaagttaagtagaatgtgataactactaattcccgggagtcgacccattttttatattagtatagataaagttaagtagaatgtgataactactaattccggggagtcggggtaaaattttaatactatataataatagtaatagctaagtaaatggtgatagctactgtatttggggagtcggggtaaaatttcaagggtataattaggtaaatagtgtggtaagtggtatactgagttgtagtatgttggcgagtgagtatagtttggagtaatcgttgatggttaactttaagattaagttgattatattctcaatctcctcattgttaaatatattattattattatacgctataaaccctatagaattattactaattatgtaaatagaatgtgataactactatatctggggagtcggagtaaaattagttattaagtatattactatagataagttaagtaaacgatgataactactatatctggtgagtcggtgtattttttacatagtagtatgatatagtaagttgagtaatgaatacctgtgagaaggtaaagaatgatttgtatgatttttttatctttttcgtgcgtgataatgtcgtagtaaatcgaatacacgtcacgatggttcagtatctccaacaatatattatatatattattatcaactacacaatcattattaccgtagttttaatcatgtaaactctcttaactactaattccggggagtcggggtaaaattaactatactaataattaattaaatgttcacaactactatatttggggagtctaccaataatttaatactatataataattaaatagatgatgataactccgaattccggggagtcggtgtattattaactgggtaaataagttaatagtgtgaaaaattacttcggcatatgtcgtgtatatgttgtagtgagtagagtcgtagtaatccaggcccggtggcgtacgtagcgtttaaaagaattttaagtattaaatgatcatttttaaccatttcaacccgttctaggctgtttagactggtgaaatgtttaattaattccacggattccgtgtccaaagcgcccgtaacaagccactcctcatactctggcgtcaccaagtcataatttatcttattcctcaacatcaacttgttcagtatctccggctccatcctctcacagtgttctatcaaattatggaccaaatttttaacaattaaaaaaaactaattaaaatattattaaaatattattaaaaaattaaaataaattaaaatttttaagaaaaattaatttttactaaaattccgaaatctccccaataacacataaataaataaataataatgtaaaataacacaataataatgtaaaataacacaataataatgtaaaataacacaataataatgtaaaataataaagtgaaataaaggtgggattatgtgaatttgaagttttgaggtttggaatctgcggttttgaagttatctaacgaaggatttttatccttcataatcttctcaatttcgtcccaatttctcttttttacccttttactctttttacttttattactgagttcgctctgttgatcatcgtcaaagtcgagttctatgtctggctgattcggttgcgtgagtgtggctttgtgtttgagaagtttttccggtactttgtaacaggttttagcttcccgctctattgtgaatatttgtccctccaacgggttcaatagctccacattcaactcagtaccatcataactccctatcccctcatatatgtcttcatccttttctacagtatctacagtattatccacaatgcctgcagtttctatagtattctctatattattactattactagtgttagaattatttacagtattctctatagtattactattgctagtgttagaattacctaaggtatctctggtgttagaattatctcctgtgatagcagtgttagtgggtctgaaaggaactgaagaatagttaggctgattaattggttacgtcggtcttgttttcgcttcctcttattttccatatgccaactcaatacttccatcaactcctactcatttttcactacattcccactatctagtatactattatctagtatagtatttgtatggttaggtaaaattagctccccgtggcggtcccccgcctcactactatccgggccaattcccgcttgactttggagttcacattagatatgtatatttcactgtactaattccattaccttgtgggtagtaatatagcttttatcatgagtagactgatgttccatggtaaaacaatcgttaatagtaatgtttggaaggaattggtaattattcccgagattaaaattgtacaccacggcacccccttgaatcctgagtttgttaccctaaggaattagttattagaatgagtaatagtgtgatagagtgagtgagtgatagagtgtgagtgagagattacgtgtttgagaagatgtatggtattgtttaggcgttgttggaagttgatgttgttgatgttagtgtggtagaagaaggttttgtacaggtaaaatccaaactccgtaaaaccaattcccaactcctgattcaccgagtctacagctacactatctacagtgtcagtagtattctgggagttgagttgtttcttgattttttcgagcagagcgtagtccagtcccttgaccaaatgcgtaaactctatgtcaccgccctaaattaacttaatttaaagtaatttaacactaatttaaagtaatttaacactaatttaaagtaatttaacactaatttaaagtaatttaacactaatttaaagtaatttaacactaatttaaagtaatttaacactaatttaaagtattttaacactaatttaaagtattttaacactaatttaaagtaatttaggggtcaattaggggttatttttgaccagtattttaggagttatttttgaccagtattttaggagttatttttgaccagtattttaggagttatttttgaccagtatttcaagtataatttagagctattttaagcatattttaaaggtaaatttatcgtattttaaaggtaaatttatcgtattttaaaggtaaatttatcgtattttagggcttatttagcttagttttgtactattttaaggctattttatggtatttagaggtaatttagaggttatttagacctcaaggagtagttttttagggcttaggtaagtccccggaggggattttcctgattgtttaccgttcaaaactacatatttacccctcagaattgcatatttacccctcagaattgcatatttaccccttatgattactaatttacccctcagtacataattgcataattaattaattattgtgaattaccatgtatcgtgactcttgttcggtttgtgttcttagtagttcaaattcctcttgaacttttttatattcctccttcagctgcgccctctccaacgctcgatttctgtactttccctcctcaactctgaataatttttatttccccagttacctactgttcacttggtctcggctgttgttttctcctgtgtttgtccactctaaaagattttcaacagtgttaaattggactcaccttttcttctgtaaagccggaggaatcccgaccttactcaagactaaatttatctcacccctcttcatcaatttttattcaataatttatccaataatttatccaataatttatttaaaaatttatttaaaaatttatttaataattaatttatttatttaaaaattttagaaaaaaaatttagaaaaaaaaattaattatttttgtcatgacaactttgggtttgattcctcctgggatgttccctagccagtcttccatcccaaacaacactcccctcaatcctctcaatcctcttactcctcttactcctctcactccccttactccaggtaataacataattatataataataattatattgtataataattgaattagtggaggcggacccgagtattcctccgaaccaaacgttgtacgtgaaaaacttgaatgacaggataaaaatcgacattttgaagcgggagttggtggaattgttcgggaaattcgggaaaattctgcaaattgtggccatgaaatcgttctggagaagaggccaagcctgggtcatctacgataacatcaactcagccacagaagccttaaaagaacttcaaggcactcttcacactatttctacactattcttacacttattttacagttattttaccttaattttacgttattttacagttattttaccttaagtttaggttattttaccttaattttacgttattttacagttattttagcttaattttaggcttattttaagcatattttagcttaaatttacactattctaatacttattttacagttattttacacactattatacagtttacacattaatgtgtcttatttcgatactattgtgtcttttttacacattttgcacatttcttacacactaatttacacatatttacactatttacagtataataatgtgttagggcataagttgtttggtcatgtgatgaggataaactatgcgttggagaagagtgacgtggtatcgaaggcggatggtacgtttgtgccaaggcctaagggtccaaagaaacccagacaaatactacaacgcgaactcatcctcaaacaaatgtattccaactcagtcagtaataattcactgagtaacaactcagtgagtaacaatgcaatgagtaacaatgcaatgagtaacagtggaaaggaatcatttggatttacagatccggtgaataatagtttcagtatggaatcgcaaggtagtctccctggacaagggagcgtaccaatgtaccaaactctaactccttacaacaatgcctatagtagtggacatagtagttcatatagtacgggagttagtacaggatttagtagtgggtatagtacgggatttagtggtggtttctccgatgatccttctatcaccgttagttctctacaccttaggaaataaccttagtaaatagttacctaaaccctaggaaatataccctagggaatagttatacaatccctagggaattaccctaggaaatacacttggtatatagttaattagctccctctcccttatattattagctccccctaggggtatatagtaagataaactaagtaataatggtgtaaaaaagttgtagaggcggaaccgtgtgttatttgtggaggatttaccggacgggatagcgcacgaggacgtgaataacttgttccaccacatgccaggctttgtggaaaccaaactcatcaactccaaacacgtcgcattcatcgacttcgataacgaattcaactccaattacgctctacaacgtattttacccatctcttacacattcttacacattttctatagtattttacacatttttatagtattttacacactaacgtgtcttatttgtagaatatcgtgtcttttttacacacatttttacacactattacacacatagagttacacatttacacatttcttacacacttacacactaccgtgtcttatttcgacactaacgtgtctttttttatacacttcttacatatctacacactatttatacacttacacactattacacactaaattacacacttacattgttttagtactccagggtaaattacttaacggtcaaccaatcaaaatctccttcgccaaataatccacaaccactaactactgtataaacactgttactatagtataaacactagattataattagaagatgtgtttgaacaattgtttcaactgttgttgattcagattgtgtgacaacttgataaatctgctaatctttaactttaactcattactcgtatttccaatccacactctacacattattattactattactattagtattactattagttatacctcccgttgaagcctaacactatttcatactttaatcctctcagcacttccaactcctcattatacaatctgaacataatattcacagtgttaacatacgattgaacgtgttgtaggggtaactgtgtgagaaatccgttggaaagagggccgaagtaagtctcgttggtcgaccagttcttattatcatccatcgtcacacaactcaactcaatcaaaccatcatacataccatacacataacaaaataccacgtcacctaatcaatagtattgtatacagtatagtgtactattgtcatgagtatacaatagagataccgatggtgagattgggtttgtactttttggtggtgcctctgaatccgtcgatgcacatcaaaaatccattaaacacattacttatactaacctataatactgttaactatgataaaaatgtgataactacgaattctggggagtcggggtatttttaactatagtaatatttaagtagaatgtgataactactaaatctggggagtcaacccattttttaagagtataattaaggaaatggtcataactactaaatttggggagtctgggtaaaattaagtaaatgttgataactacgaattttggggagtcggggtatttttaactatgagatacggtgtagtaatcgttgttcttgttggtaatgacaccaattacgtgatcgccaacccttggcacatactacacattattattactacaaacttaccacactgttcattctgtctactcgtgactacaaagtgtatactcgtaacaacaaatttatcaattctgtaaactcgtgacaacaaaataaataatattgtcaactcggaacaacaacttgtaaactcgtgacaacaaaataaataatattttaaaggtataaaaacagtattaagagtgatagagagggtaagtagaagttggaggtgagtgggatattgttgagagttccaaagtaggtttttggtccttttttattttcaagttcgtaaaagtaatattggttcaaatttctcattttacgctttagttcttttattttcccttcagtcaactgttttaacttgagttctctttcctgttgctgttccggggttagtggtttaggcgagggtatgatcttctcaaagtcaatgtcaccctcagggtcaactactcctaacaacactttatgcgtctcggaatctggatcctcttcagcttccggatcctcttcagaatttgtatccttctcttcagaattcgtatccttctcgtcagagtcaactctatcagagggtttgtagaatttgatatatttgttaacaagttctctcacgtggtcaattgatagcgtctcgtcgtcgttgtgcctcgtctcctttaatatctcaggattattctccgctatgttattgtacttaatcaacaagtccctaaactcatccgtcatcacaggcttagccggctccacagtactcacctcaacagctttaccccgttcctcactattagggactgaatttcctaaattagaacgtgtgaactcgggattagagggtgtgagatcgggattagaacttgtaaactcgggattagagggtgtagaattgtgatttgagagaatgacttgttgtatgatgtgagtgatgagtgatttgtggttggcgggatcgagtttgagaagccgttctatgatcggagctatcacaggaattaaaagatcaaactcctcattcaccaaattaacatcagattcctcagatttccttagattatttttatttttattgagttgattgtatgtttggagtaaaagtttgaaatcttcgggtgttagggatagaagatgtgaattaatttcgtcggtgacgaattcgtgtaaattttgtgtgtttagttcgagggactctggaggtactggttcatacacgtccgatggggagcttaacccacctccagattctacacaatttatccaactcaaactgtaaattattacaaaaattatcaatctcaacattttaaaattttgaattgagtttggaccaaatttgggtaatctaaggttatgattagatggtctgaaattacgtcaaatcacacattaacaaaatgttatttaataaattaatatttaataaaatattacttaataaaatattaatatttaataagatattgttgtatgatagattaatattgtggagagacgtttgagataatgtccaattaatattttattccatgggttatttgtacttatttgtacacatacttaaattgttaataaattaaataattgaacaatttattaagatattgcactatcttttacgtttaaactcgttcatattactactaatgcgttttacattgtatatacacatgtatatacacatgtatatatacatagtatagtatagtagtatagtatagtagtattagtatggtagtattagtatggtagtattagtatggtagtattagtatggtggtatttagtgggtgtctgggttttagggtagtgaattgagtgtatcttacatagtttatagtactattaagagggtttaagtttatatttacagtgttttataacagtattaaacattattaatagtattaaggagtgttaagtaatgtaatagaatgtactttattatactcttaatactatacatatacaatatatactatagtatattatatgtagtatagtattatagcagcatagtattatgtgtctgggtttatggctagtaaatcaagtgtatattacgtagggtataatactatccacagggttctaatatactataaataacagtgttaatgagtgttaaacagtattaagagtgttatgaagtgttatattagtgtatactaaagtatataatataccctggtatactcctactactatacataatatacatagtatactatacataagtatatatagtatattatatatagtatagtaaagtagctccctctcccctagttaattagctccctctcggggtatctgttaatttagctccctctccctatacccttatattattagctccctctcggggtatataattaattagctccctctaggggtatatagttaatagtattagaattagctccctctaggggtatatagttgaggtatataaattataagattaaggttgagatgagcgcaagtattactgctgatttgtgaaagctattcgtttcctttacttctctcaaattcttttcctttacctctttttcatcttttacttcttcttcttccacttgttcaaaacaatctattggatattcatccgacggctcatccatattacaccccttacccactcccttttcttcttttttcacagttttctccttttttacttccttttttacttccttttttacaacttttacttcctttttttcttttcctaacttctcattttccttggatttatcatgtttgggtccgtgtagatcttcggtaacgacaaagtgtatgggcccggattcaacttcaaagtcgtcaagaaagccactcaacacatctcccaactccctttcccccaacttattatcccccaaattactctcacccaaatcatcttcactgaatctatttttactacgatttttatacacatctgataacacatctgatcttactactggtgttagtattggtgttggtgtggtggattccacgctgggtataaaatttccgctacaaagtacggaaatcaataccaaaaacttcatcctcaaattttaaatttacttttatttccacttttaatatttttccaattttaatatttttaatatttttaaattcatttaatattttaaaattatttttagattagttgaaaatgtgtagattggtacttttttgtacttagaggaaatacgttagaaatgtgaccaagagtaagatttccacttttacgcctaaaaagccgtttgactttagattttttaccctctcaaccgcccctacctccctcaacacatcctcacactcctcatctcccaccgttccctcagttccctctgtaactcctactccctcagttccctttgtaccctttgtaccctctcctataccctctgtaccttctctaataccctcactaataccatctgttccctctcctataccctcactaataccctctgtaccctgagtgaaaacgccgttgatgtaatttttatccatttggtctgacaattgtttgagtttttcgcttaggtcggcgtaagtttgtttggatttgagttcgtgttcgagtgactcatagtgactcaggcagaaatcgataaaatttgtcaatttcttgttgagttgctccagctcgtacacaattccctcccacttttccaccgaatttggctcaaaaatcgagttaaactcggtgattttctcgttcaaacctgacagtaacacactcaacttctctctcccacacaccaatccatgcccactcttcttctcctcatcctctttctcctcactctcctcactctcctcttcttcctcatcctcttcatctttttcggtgttggaatatttcatcttgttgagttcagagtgatttagcagggggtctgatactccaccagatcctccagttacatattccacaccaggttctccagtagattttacaccaggttttacagtatcaggttctccagtagtttctacagcaccagatcctacggtagatcctagggtgggagatcccccggtaggaatgtgaacgggttcgacaatgtgttgtatgttgttggctgtgagtttgatgtgtctgagtattggtatgagtttttggtattcgttgtcaaacatttgttgttccttctcgagtgtgttaaactctgtgataatctcctgtagttctttgttttcgcttagttttacttccaggtttgacagtttgttaatgtaactcatgtgttcacttgccttgtagagtttattcctgagcccggagctgatccggtccagcgtctcaatcagcttttcggcgtttctagccctgtgcaccatgcctaaccttaacgcgtcagtcgcattcacacgcacgcccgcgtcagggttacgaacacacaaatcctcaaacaaaccatcccaactctcaaactcataattaacaccaccaacaatatttgtacacaataccgttaataacattaatagctttctcatcttttcagtcttaaaagttaattttcagtatgtccaatggtatttatcagtgtttttggcgtaatttagtgttattttaggcgtaatttagtgctattttaagggttaatttatcagtaatttagtactattttaggcgtatttacgggtaatttcaggttgtaaataacgatgttgtatgttaaataagattaaatatgtaagattaggttaaaaaattattatgtgtgaatttggttatgttaaaaagttgtaattatcagatttagaatttttgttgctgctctgctgcttcattgctgcttcattgctgcttcattgctgctcttttctaaccctaaatcatcatatctcccgctcgttcaactactccaacaccctttaaacaggttaattccagtgttaacaactgtataacagtattgtatggtaattaatgagttttgagtatacaaatgtgtatgtgttgatagtgttaatagagtgttaattaacttaataagcactaaagtattagtgataagagtgttaaaaggtgaaattggagtccatttctgggtgtgtaaacgcaaatgtgtagacaaaaaattttcacaatcaaccaattaaatcaatttaattatttttaaatgttaatttaataaaatagttagtgttaattttaatataatttattgtatgtgagagaggtgttggaatcctcgcctgacatggaatcttgtaattattaaaaagttaaattaaattaattcctaatgtatttgtactttttttatcatgtcaatttttcccttgttcagtggtactcttcactctaaccactattaaacacatttttaaacgctattaaacacatttctaaacactttaatagtaaaaattggtaggtaaacagtaggttgtgtaaatatttggtataaaagagaagaatgagggggctaagtgttgtaatttgggtaataattggtattatccccggcatagcgctgaacctgaataaatcgaaaatctcactccccaaaatacaaaacgtatctttacaatagttaataagaatttgattaataattttttagagaaattatcatatgattaataaattttcactcaacgacgagttcagcaccaatatcttcaaacaacaagtaatacaacactattactatagctataatacccaatactatacctataatacctaatactatacctataatacctatagttaatacttaatacctctaaaatacgcctaaaatatgcttaaattacctctaaaatacgcctaaaatatgcttaaattacctctaaaatacgcctaaaatatgcttaaattacctctaaaatatgcctaaaatatccttaaaatgtgtaaaattaagcctaaaataagtcctaaaattagcttaactacccctaaaatactagtcctaaattactcctaaaatactaccctaaaattactcctaaaatactagtctaaaattagtcctaaaatactagtctaaaattagtcctaaaatactaccctaaaattactcctaaaatactagccttaaattagtcctaaaatactagtgtaaaattactactaaaatatgccaaaatagtccctagttaaggcctaaataaccgtaaaacactactaaattacctctagacaatactatgtataatactatgtataatactatgtataatactatgtacaatactatgtacaatactatgtacaatactatgtacattagtatggttaatattgtgtataatactatgtataatattatgtacaatactatgtataatattgtggaaaatggttaatgtgtgattaggtgataaatgagttgcgtggtagtgaggaggtattgaagggtataatatttaagatactgaaccacttttacgagtacgtcaagtaccgtttcctcaccaccttcttcaacctttacatcatcaacccattcgatattcaaatgggaaacctcctcaacaccaaactcaacaactattatctcaccaagtaattcacactcttttcccagatttacccatatttactcatttaccatatttacttagttctatagtaatatatagttagctccccgtggcagtcccccgcctcactactatccgggccaatctccgcttgacttaggttttcataggggatccatacctaccactccactattccaactcaattactatataaactctaatgatgtttagtaagttgaatatacctacgtattgtacgccgttatcgtttggattatcgtatgagaaggtgcgtgtgggtgacgggagtgaaagttggttgataaaatcgggtaataaaactaacaaggccttcgtacttatgcacggctggttcgggaatcctcaatccactcttcccttcctcaatactctcaaacaagttagttaccccgttgcggtgtctggtccaacggcaccagttatttatctacagagttagccaccccaatggctctctctttgtcccagagtcattatatagtattactatagtaatatagttaggtagttagctccctttggcagtcccccgcctcactactatccgggccaattcccgcttgactttggttttcataagggatacatactatccactccactattccaactcaattactatataaattctaatgatggttgtagattggagtgttgagtgattacaatgtgttgatactgaatttgtatgacaatagtaatatatttgagaacaacgttggactcagaggcatgaaacggttatacgacgggatgaagtttctccacgacaattataacaccacacacttcaacatttacacacagtccgttagctcaatctccgccattctactataccactttctacaacattacaaagtttctcatagtaacacaggggacacagatgactcagttggtacagaggatactgagaacaataattctgttggtacggagatgttatgggatatgagaggatttgggatgggcctgaggttggacgaggagtttgtgagggctgtggaaattgacaagttaatcctcgaatcgcccgtgatcaacgttaaacaatatttactcaacgataaatactacagcaacatcatcaacaatctctacctcaacaacaaatacttctccaagtaccttttacacatttatacattttttacacatttacacactctacacatttacacattttttacacactaacgtgtcttatttatactttcgtgtcttttttacacatttcttacacattcttacacactaatttacacatttacacatttacacacactaatagtattttacacattaaaatatgtatagttttaatgagtatataaacaagttgaacatatgtaagtatgtggataaggatttgttgcgtcgtgtgaatgtgttgcaaggcgtgaaggacgagataactacgttgaagatgttacaggaggagttttctggcttgaggaagattccgaatttgttcctctttaagaattcggggcatattgacctctgtaagaatgattctaaagactacctcagcaccgtcaagtacattctcaagaatccaatcctcagattcttccaatacaatacaaataaagttaataaactataaatttacactgtagttacgttacggggttaggtctagcagattagttaatcccaactctttctaaatctttctaaatctttctccagttctttctccaactctttctccagttctttctcccgttctttctctatttctttctccagttctttctctatttctttctcgagatcttctagattctctatgtgattttctgtgtgattctgtatgtttatgtgatttcctgtgtgaatgagggctgtgtctatgtgttctgttagaggtgcgatttttgcgattctcagattttttatacctatttctgcttctacttctggatatatttctacttctacttttgcttctggatgtatttctacttctacttttgcttctggatgtatttctactgtgaggggaatcatccgtctcagagttttcattctctaaactctttgttgtggtaagaagctatttgagttgttttggatctgtaggtttagacttaagcaacattaatctcctaggctttgctcctctaaacaattatacataacatagtatagtactatagtatagttaagtatagttaaattagctccctctaggggtatataattcaggatatatagtaaagtagctccctctcggggtacagttaagaatactaaagtagctccctctaggggtatatagttaattagctccctctaggggtatatatctaagatagctccctctaggggtatagttaattagttacagcatctcttgcatgatttcctgttcatataatcttgtaagttccgcttcatcttcttctaatgtgtcagtatgagatttggaatcttttttcaagtaccaatcatgcttgtaaaacttgttcttcctctccagtaatccaaccttcacactgtgccctgtaaattacaattatccaattatataactgataagctgtgtaaaaaattacctagatagtgttctctgtcttttaggtcatgtgattttaagtcttcccatttaaactgctcccttccacccctagtaccctccctaggcggacttaacttcaaatctatcatcaaaatataaatttatcaaatatcgatacaaattattataaaaaattattataaaattatgtataaaaattttattgaattaaaaattggaattattggtaaaaaaatttttctaatttcgaccccaaaatgacaattttaccccttgatacaactaacatagtaaaaataacacatttggtagtgaaaaattacgcctaacatagtaaaaataacacatttagtagtgaagaattaatgtgtgttggtgagtggttcgaaggtccctgcgtcgttacgcctgaaaacgacagtctcagaatcctgcaacaacactatgtgatcattattaaacgccacaaacgtcatttgcacttgacccaaacttacattgtgccccaaacttacattgtgtcccaaacttacattgtgtgtcaaatttacattcttccccaaggtcaaattgtgtcccaaggttaacttttgtagtaatgtccactcgttggttttttggaagatgtagaggtgggactctgtggctccggcgagtagtccctcccgactccaacacaacgaattcactcggcccaaacgcttaacgtccaactccaactcaaacttccaaatcatcacacacccaaccgcaatcccattgctattatttacactgtttacactcccattattattattagtaatttcccagagtttgatggtattatcaatgccaccggtggccattaatagttcaccggtgttactgtgactgaatgcgagggcgtaaacaggaccggtgtgcgccttgaaagttgtagtctcaaatctcgtacacgaagtcacaagcgttacagatcccgtcaaggatcctaacgccactactaattctcctccagtagaactcactcccacagaattcagaacactagaattcattccagtagaactcagaacagtagaactaattggagtagagcccactgccatagaacttacaggattgagttggttagttttgtagataactttccagagtccttggcagttttggtcatttctgtagtaagtgagagagttgtcactggagacaacaattagaatagtgccaaaggctggcggtgcccaggaaacgaagagcggttcaaactctgtgccaaaagttgaaagcgccgttaaagagttgccagaatccttagtgaagattacgacctcagggccagtttgggacctacaagcggcggctaaatactttgagaagtagtcatactgcaagtcgttcagatgcacagccttctgcagtaactggcccaaattcaccgataaatttggtgtcaccgttaacatctttttattttactgagttcagttatttttagtcaaattgtcaagaaatttgaaattttgaaaaatttctattaatattaaattttcgactattattaaaatttcgactattattaaattttcgactattattaaattttcgactattattaaattttcgactattattaaattttcgattattattaaattttcgattattattaaattttcgattattattaaattttcgactattattaaattttcgattattattcagaaatttttattaatatttagaaaaattgggtaaaattgaaaaaattgtaaagtaagaatctggtagggtaaaaagtattttttcccgatttattcaaattaacaaattttacatttatttcctgtaaattaacttttaaatgattaaatcacctccaggtacgaactacacatgttacatacaattctctccttacctactctttacacaatatataaatattatacacaatgtataaatagtatacacaatgtataaatagtatacacaatgtataaatagtgtaaaaatggaatagtaatgtgttccatagggatagagaggaggagggagagatcagaagcgttggacagggccggtgcagtgtttgaggatttgtacaagaaatatttaactgtggacaatgaaaacctgcagaaacgcgcggaaacttacctcctcaagtcattctacgacaaacaaaccttcaaaaatttgaattcacagatcccaggccttagtatagccgatccacagctaaatttagcccaggaaaatggccctcaggagctaaatttagcacaggaaaatggtcctcaggagctaaatttagcacaggaaaatggtcctgaggagctaaatttaccttcagaatcacaatccgcaggacacgaaactgtgaaatctgacaccgtgacgaaagactatgtgaaacaagtgtcgtttgagaccgatcacatgaaaacgggcgccaaattagtctccaaaacacccccaaaaataccaaacaccgctaaatctaataccatttctaaacctaatcccacctctaaacctagtccccgggctaaatctcctaacccccggtctaaagagagcatttggggcgacgaaagtccaaacaggatcctcaaaacccctcaaaactccaacactaaacctagcaccaaactcttgagcggcagacttaagtctaggcagttgaaattggaaactaaccctagggtgcaggataaaactgtgtcaaaagatgacacgcggatatttgtggataatgtgacggagagtgacatcagtgaggagagtctcacgctggaaaacactggccacttagttacgcttaaggaatacgaccactcgccctgtttcgacaaggttgaagagttcttaacggggtcaccaaatcacgttacggagcttaactctgcagattttaacgccggggaactccacggagatgacagacgagcaattttactgcgtaacaaggagttaaatttcatttgcggactgtctgtgctatttcaaattttcatgtgtttcaacgtttttgggctcttttttctcttacactcgtttcaattccagtttcactcgctattttcctccatttgccttccatttttattacacttttcaatgttttatttggtgtttaccattggcgtttcaagggttaagaagtcactcctcacctacacaagtgacattacagttgaaattctcagtaaacgactcaatcgtcagatgcattacagcaggctgagtaagtttacagtgggcgctgagcgcatttttgtactgctggcacttgtgattgcctgtattcccgtgaagtttagccaagatttaacacaaatgcaagttaaggaatcggtttacatcgcttttaacgttgtgtacgccctactccaaatcgccttctgcttctactacttcaaagttctcttcaaaaaactcttaactctacactaatctttgattttcctgaggttacagaagttttcagttttaaggaattaactttaagtatgaaggagatggtactgaggacaggagtaagcaaaatgctaaacttgctaaatttcaccaaattcacaggaaaccacaccgtaaaccccgttcacagtgtaaacagtgtaaacagtgtaaatattgtaaacagtgtaaacagtgtaaataatggagagataatggagttgaagaagcgattgtataaatcgtacaagagtaggaagctgggcttggcatcgacgaaaacgcgtcgtagaaacgctcagcttaatcgttgagaacacattaatattttattttgtggtgtattcattagttgatatattttaatatgagttcggatccgttagattcttgtttaaatgagcttgaaaataccttttccaaattatccaaagataaatcaaatacttgcgagaatttacaaaaatgtatgaaattaattgaggagattaaggattcgttggcgaaggtcaggttaagctccgaatttatgacccgagaccatctcctgaagatgaggaagttttttgaactttacgcccttgtttgcctcgaactaaacgacaccgaaggcttcaaatgcgcctactcacaactacacccgctctacttcgatttctcacacgtaatcccatttttttacacaattatcattttatcaatattatttaattaatatcatttaattaatattatttaattaatattatgttattattattgattatggtatttagttgttgttgcggagtgaccgtatgagttatgtgttgagtatgtggatgttgcatttggtgagtgagaataagattggggacttgtatatgttactggagcggattccggcggatttgaagaaggacgagaaaatcctctttgtgataaatttggaacgtctgatgatggaggggaatttggggaaactcctggacttgaatgataactccaatgagtaccacaggatcatcgcagcgacctataggaataaaatcgcctccgccatggaactcagctacaaacaactcgacatggactacatcatcaaaacactcaaactcaaaaataaacaagtgatcactcagttaattagttaaattttacacctttttatgcagtaaattagttgattttagtcagattttcgctctaaattactcaaaattttacctttttatacagtaaattacttaatttttcacgctgtgacacagttaattactcttaatttttcactttttatacagtaaattactcaaaattttacccttttatgcagtaaattacttaatttttcacttttttacacagtaatttacttaaaattttcactccttgacacagtaaattcttttggagtatgataattttgtaggagttgttggattttatatcgtattacaaccagtttaagcttcagtcaggtgagaaattgccgtctaactactcctcagacacgacttctgtaccctggaaagtgctggaggacgctgtggtattccaaaatgactctgtcgtaaagcataaaataccatccaaagagctcctaaacaactccctaaagtacctaaacgatctcgaaaagattgtctaacccctcttaacacttaattacactattaacactataataatactataataataatactataataataaatagagtaaatttatatgagattaaaatattctttggtgtgtggtgacatgtagttgacttcctcaagagtaaagtcaaagaggttattaggcaccagattcgggttaattatgtccactatcaactcatccatcattcccactcccccaggattccccgtgttaacagtattaacagtgttcccagtattcccagtgttaagtgtgctcccggtgtgtaaagagtttagatcccgatgagatgtacagctgacgtgattggcagttttaatgattagaggtttgaaaaacacgtgagtgagtgcgtctaggggtttaaggcgttcagtgggatcatatctcaggaggttagaaattaggttaattaaatccggatcagtgttcttggggaaaatcgtactcagctccacacgcttcaaattcgggaaatttatattattgtagtccgggttcatagccttcatctcaatcacactcggcgtacctacaacaaattgtgttatatatttaacaatatatagttaagtagctccctctcggggtatacaattctaggtatagttaattagctccctctaggggtatagtaaattagctccctctaggggtatataagatagctccccctaggggtatagttaactaccctaatatacaaaatactatagagagtgcgttacctagaatttgtataattttgacgagttgatcgatggaggtatctccgcagaaaattggtctccctagtagtagttcagataaaacgcagcctatagaccatgcgtctatggctgtggtgtattcatttgacccgagcatgagttcaggtgctctataaaacctgctgcaaatgtatgacacgctccagtcacccttgatcagttttttagcgcttccgaagtcacacaatttaagtacgttggtaaaaggatctacgagtaagttatgtggtttgaggtcccggtgacaaatgttcatggagtggaggtacccaaacgctctgcaaatttggaacgcgtaggtccgaatcaaattcagaggaacaaacccaagtgatttaaagtaagttctcatgaccttgtggacagtgtctggcatatattccatgaccaggttcaggtacttctcctcaccgttgggttttgtgggcttagcttgattattcgaaggcgttgtcgtagaggttgaattattgtactgcaccgtaaagtagtaatcccgcagctttataatgttcggatgacgcaaatccttcattatcgttaactcacgattcttatatcgagggtcctaacaacatttacagtattatatagttaagtagctccctctaggggtatataaatagggtatagtaaggtagctccctctcggggtatataactaagtagctccctctcggggtatataactaagtatatagtaagttagctccctctaggggtatggttagggtaagttaggagatacttgtaggacttttttgatggcgacttgttcgttggttttgagtaggtatgcttcgtgtacgataccgaatgagccgtttccgatgactttgttgagtctgtaccaggactcgtggtcggtattattattcgattctgtcatcattttacaatttcattaaggagtaaaattgtaaaggttgattctagaggaaaattgcagatgagatgccattaatttattaatttaaggtatagaaatttgtgctgataaaataatttacacctgaacgaattaaacttttttcaacttgagagttaaaactactgaaaactaagctgtgtatgggttaagttcttttataattccagttttgagctattttacaagggtttaccattaaagaatcaaattataatacataaatcggacaatttaagtgataattgacaaaataacattacagtaccaaatgtccaaaatttattacttggcaattttaacaattttttccatttaatccactttctaccagattactttattggggagatcacaatacgttgggtatcatcaccagaatcattttttttattctaacatccacaaatttattaaaaaataatattccaaatttaattaattttattaccctagggatccgaacagctcagatttttaaactttaatgcggatattttaggcacatcacaaatctcacaaatctcaattttttccccaattcccaaatctccaacttctcctccagttcagatcaattctactctgaattttctcttaacttttgttttagtttcagaaatagttttggaaatttgaagtttccagctcactcctctttaatctccccgttacctaatttttagttaattccatgatatatatttacaagactttattttaattaagggttggtcttgggtttgggctcctccttcgttttggttatttttggaactttgaactttaattttttctcagtttatggtctaatttttctacaaacatttgattgggatttttaaaataattttaaaatgtaaattattatttaagggccgagttcagggttttaatttccagcctcacttttatttaccgttttaattcattaaatatttttatcatttccccgaatacttttgttactctttttttgtcacttgtaaattgttgttacccacactttgtttttttagaatatgtcagaccagctacaacaccttccctggagccccgaaggtaatctctagaacaaaatttctacctacaaattcctaaaaatttaaaattttaactttaaaaattatattttatttactttagaaattataatttttttatttaaaatttgttaattatttttatataattttatttacgcagccgataactcattttttcccctcaaattaccacgaaaattaacttttagtaataaaaattagttagaaggtgtgaaaataatttgtagagttgtatgttggacctccggccaagttattgttgagtgatggtcgtgagttttacggttactcatttggctatgaggaccaggaatcctttaaccctcagcatcttgacaccaccggagaacttgtgttctcaacctcaatgctcggctacgccgaatgtgtaaccgaccccaactactccggccaaatcctagtcctcacataccccgaaatcggtaatatcggagttccctccgatgatacggtattatttacccagttccctctattcacatactatatacttaactatatactcttaattaatacccctagagggagctacttaactatatacccctagagggagctaattaactatacttaactatactctttaatgctataaatatgtgtaaataattaggatgagtatgggctattgagaaatttcgagagtggtagtaagtatttgcgaggtttgatagtgtgtaattacacgattgaccccagtcactggttatgtgtttcaacattttctgactttttaaagcggaaaaaggtgccggcaatttccggcgttgataccagagcactgacaaagcatcttagaactaacggtccactgctcggtagaattatcataggcaattctaagctctatggcccttcatatttcaacagcgaccacacacaactcttgaataaaagttgtttctacgataggaatacaaaatctttagcgcagttgttacattctgaacagctggatcaggtgtctgggaacttgtatttatactcatttcatactacaaataattataacaaattggtgttaaaatatacttttcaatcatctgagtttggttcccttttaaaccaattgaagagatctgatttccacacagtttaccataagaatttgaccttcaatagcatgaacctgacacaggatttagtgagcaaatttctaacctcagacaccaattctgttatgttactggttgtggtagatttgggaatgaagaacagtattctccgtagtttacttaataattgtcctaacaacgtgagggtattggtggtaccgcatactgttgatttcagtgttcttgattatgacgggctttttctcagtaacggcccggggaatccaaataactattctgaccttgttaaaactgtaggaaaatgtttaactaagcagaaaccgattttcggtatctgcctcggaaatctattattaggccttgctgctgggtataattgtgttaaaatgcatagaggcaactatggagctaatcagccctgtattgatctcagaacttataaatgctatgccaccactcaaagtcatatttaccaacttgtcactcaaaattcaagtaacccaatcacttagttatctaattaccttatccctacaaatttataactgagtgattaactggatgaatttttagagcccacgagatggacgacgttgtttgagaatgcgaatgataatacgttggaggggctggttaatttggactatccgtttttcggagtacaatttcatcccttttcaaggcctgtgtactttgaccctgatgaccctaccaaataccatgacctggatacttccttcttgtataaagattttttcacctgcctcctcaagaaaactttaattcccattcatatcagaatgatgtcaactcatatcagatgcaaacgcattcttttactcagctccggtggactttccataggtcaagcaggcgaattcgattactcaggtttaatttaccactttaccaattgtcatactatttacacactatttacacactatttacacactatcaatatactattaatatactaatttggtataccaaactctatagtataatatgtataatattgtgtatagggagtcaggcgataaaggcgttgaaggagagtgatgctaagataatactggtgaatccgaatatagcgacggtgcagacatcaaaggggatggcgcacgtcacatatttcttaccaataaccttcgagtatgttaagcagattattgaaaaggagaaacccgacggaataatgtgcgcatttggcggtcaaaccggtctcaacgtcggaattgaactttatcaaaaaaacgttctcatcgacaacaactgcgaaattctaggtaaaatcatactattcattatattattaagatattattgtgttatattaattatattatattaattgtactgacggtgtgtgtaaatatttaggaacgagtataaagacgataattgatacggaggataggtatttgtttaataagaagatgacggagattggtgagcgttgtgcgccaagtaaggagtgcactagcatagaagagtgcgttaccgtcgccaaagatctcggataccccgtactcatacgcgggaatttcgaactcggtactctccacactatttacccctttacacattttttacagtatttacagtatttacactatttacacattttacacatatttaccctgtttacactatataaatataatattgtgttaaaaatgggttaggagggtttggttctggatttgcgaataacgagtctgagttattggaaattgtaactcgactcttccacagtaatcgcgggaaaacttcacttaaagtacttttaaacatttttacagttatttgttcagttacaaattatttaatcattgtaaaccctgttgatataggacacatgtgtgcatattgataaatcattgaagggttggaaggagattgagtttgaggtgttgagagacaacaatgacaactgtgtgtgtgctgcgagtatggagaactttgatcctttgggagtccacacgggtgattccatagtcgtagcaccggcacaaacgcttagtgcctcagagtgttctcacctacgtcaggttgcatttaacgttgttcgacatctcgacttggtaggcgagtgtaacatacaatttgccgtaaatccgttcaaatttgagtactttatagttgaacttaatgccaggctgagtagaagtagcgcattagcatcaaaggctacaggatatccactagcttacatggcagcaaaaatcgcgctaggatatgatctagtacaaatgagaaatagtattacactctgtactacagcttgctttgaaccctcacttgattacgtcgtcgtcaaaatgcccagatgggacctacgcaagttcgaaaacgccaataacaccataggtattattatcccagttccacaggggatttagttactccccaactcaataccattacctatagttatactattacctatagttaattatactgttaaatataatagctagggtatatgttggtttaggaagtagtatgaaatcggtgggtgaggtgatgggaattgggaagacatttgaggagacgatgcagaaatcattgaggatggtgtcggatagtattttgggcttttgttcatattcagtagaagatttaacgagagaacaggtgattaaaattcttgaaaacccaacaccagaacgtgtgtttgcaatttacagagcatttgaattgggaattaccgtccaacagataaacgaattcaccaggatagacaattggttcctaaaccgtctgcataacatttacttatgcagtgagaggctgaagaagttgactaggaaagaggaattaacacacagtcagctgttgtattataaggtgttaggattctcagatcgtcaaatgtcactcctgataaataataaaggaaatgtggtcaatttagtgaacaaatctgagctggaaaagtatgaaaatgagtttagagattacagactaaaactccttgtcacgccaaaggttaatatcattgacactttagcagcggagtatccagtggtgacaaactattgctacatgacatataactcgacagaacatgacatacggccattaaatgataaattatactctaaaatcgcggaaactgtggataaagatagctcaaggtcaccgtcaatgaggtacagagatgacaaattctcaccactcaacaaggaaaaatatgaccggaaaactctcgacaaaggtgaattcccacctttatccagctatttccaatactatactacagtttacaacttactactacttgttaattagttactactacttgttaattagttacaactactgtgacaacgtgttaactctggtttagacagtataatagtgttggggtgtggtccgtataggataggaagtagtatagaatttgactggagtgctgtgggatgtattaagactctgagaagacttgggttcttctccatcatagtgaactgtaatccggagactgtttcaactgattttgacgtttcagaccgtttatactttgaggaattatctctggaaattgtagacgagatttacagatttgaatgcccacaaggaattattctatccgttggaggtcaaaccgccaataacctcgccatcagtatgttttaccccgttttacccctttttaccccgttttactcagtcttactccgttttacttagtcttacacatttagtggattccaactattaaataataactaaataaattgtattagagttgggggagttgggtttgaatatcttgggaactccggtgagttcaattgacaagtgtgagtgtcggaacaagtttagtgacatttgtgacatgcttgggattgatcagccgagttgggaagagtttacatgtgtagatgccgctaaaaagttctcaaacaaagttggattcccagtactcgcaagaccctcctacgtactctccggcgcatccatgaaagtcatttcatcacacaaagaactcgaatcgtattatcacacttcatagttaaattagttatgttttacatagttatagttaaattagttatattttacaccttttatacagttaattagttatattttcatggttaatattgtgataattggataggtttttgcagacgagtgcgatagtgaacagatcgcatcctgtggtgataacgaagtttattgagaatgcgaaggaggttgagatggactgtgtgtcaaaggacggcgtgattgttaactatgcgatttcagagcatgtggagaatgcaggaacgcacagtggtgacgccaccctgataatccccgcccagaatatccacgttgacactcacagaagagttaagaaaattacgcagaaactttctaaatatttgaatatcacaggcccattcaatgtccagttcatgtgtaaaaataataaaatcaaggtcatcgagtgtaatctcagagccagtaggacatttcccctgatcacaaatacgcttaatattaactttattgaactagccactagagttatggtaaatgcgcccttcagagttgagaatgtacaacttatggacctggactacgtcgccgttaaaatgccactgttctcatttgacagactctatcccgcagatccactactcggcgttgaaatgaaatccacaggcgaagtatttttactcaatattacacactattacttagttacagtcaacttattaatcatagttaacaaatacctttagtatataacaaactaatgtgtgtttagatagcttcatttgggtataacaagtatgaggctttgttgaaggcgatgacggcgagtggaatgaagatcccagagcgtggcgtattattatcattgggtagcacagtgaacaagttcatattctcgagaaagattaagggattactatcactgggactggacgtatatgccactgagggtacctatgactacattaggaaactttgggactctgaacagctgttttacaactcagacaatgaaattgacacgcagtttatgtccaaactgaaccttgacgactttgagtttgactttgaacccacgagtatgggcgagtttaagaaggtgtttaagcccacagttcaaggcacctcaaacggaactccagacgtctatgaactgattagtaaccggaaagttgatttgcttattaatgtcacagactccattaacacgctctacacttcaggcggatacatgatgagacgagcgtttgtagacgctaaaatcagcctaatcaccagtactaagctggcaactttagttatcgacgccatgctgtacagaaagtctaaaatctccaaggggaaagatttcatacacatcaaatcacatcaagagtatttatccgaaaattgctaatctctcactaattcccatttatacattctatttttactgttttatatttatttttgtggtatttagtggaattaacctgaggttgtagtgtttcggagattcgcccagtatggttccaaagggttagattaaattattttgaaaatgcttaaatttgtatttttttgttttcattcgattgtaatattttaaacccaagtaaaactaaattagttgaaaattaaatgtagatttgttaaacccctaaaatttgtaaaatatgtgtaaaattattcaatcttcccaaatttcactaaatttcaccatattcccctagtttcattagattttattggattttattggattttatcggattttatagtatttcatttgatttttgtttcatgtagtagttgttttttaaaattaaagttgtttttaaaagttagattataatttatgaatgttgtgattatatttgttaaaatcctgttaaaaaatggatttgagatctacattgagtgaggatgtgattaagttgctggattctgcccttttagactgttacgggcgttttattactttattgccggaggaggtacttactgatcacattcatctcccgttccatttgcaggaaacttactggtggtactgcgataaatggcgggatcggaacccttcactgccttcatttaccttttccgagttcatccagtttatctgtgtcgactgcccgattttacagagatttgttagtaaaaatgacttgaaaacaatgataacaaattggcgccagtataagaagaagatcccagttcgcggcgggataatatttaacgttctgtgtgacaaggtgttactagtccagtcgtacagtagtaagaattggagttttccaagggggaaaatcgacgaggcggaaaatgaccgagcgtgcgctgtgagggaaattaacgaggaaacaggtttagacgtgaattctaacataaacgatgatgtgtatctggagctgattgaggatgatttaaatttgaagttatttttaatcccggggattgacgagaatcaggcgttaaaacagacctcaagctatgaaattagtaagttcaagtggttcccaattaaacaactggagaataaaaagtacttaaaatttggcacatttcacgtcacgccctttgttaaaaaaacgcttgaatttgcgcgcgattttcaaaatggaaagttcacagcacagttcccaactcagtacgacctctatcagcaggcgctaaataataaactaagaatgagtagaatcgcaaattcagagactttcggctcagtgtcacgctggagccctgaggaaatgttcaaggttaactctgaaaagttcggcattgtctccacctacaaagaagacgaaactgataattttaacccattttcaaactggacaccggttgaaattggagcgaataataaacgagataaatacaaagaccgacaactcgtaccatttgatccaaactccttcttctaatttttctccccttacatttattttattagttttacgtgtaaacgtatctaatttatgcataaatatgtgaaattagtttggtaatgtaaaattatgttaaaaattatataattgtgtttatctatgttttaatgtgtaaaaagctgttaaatgatgttaaatagttgattttgttggaaaataataaaatttatgatttctgatgagattttgggaattaagttcagattaggattctataggtatgaatggggtccaggtgttaaacgatcaataattatttatcttttatcgccctctccaatatattattataaaatacaataaaatattattataataatatatttccccattttattgaaaatttattgagttttattttttatattgataatttagaatgagttcagtcactactactattaagacagaacactgtaactttactgattacagggtttatcctggccgcggtaagaagttcgtcgcacgtgacgggaaagtttacttcttcatcaacggcaaatccgccgcattccataaacgcaaagtcaaacccgctaaactcaaatggaatctcgtaatccgccatctaactcattatttcatctatacaactctttatttcatctatccaactcattatttcatctatttattctatttttctagttatattatttatgtatgtcccagatatttatgaggtataaaattccataggcttggagaaaggcgaataagaagtttcagactgaattgtttaatagaaaacgttcaaaaaagacatcaagaccacaaaaagccattgtcggtctctccctagatgatctcaaatccaaacgctcacaagccaccaaacccgctcccaaacttgtaacacccctctccacttatataccattaaccactacttatataccattaacaagttaataatattgacaagttaataatattgactggttgataatattaagtatgctaatttggggtttagaatgtgaagcaatcgttattgatggatacgaaggataagaacaggaggagttttgacaattcaaagtctcatcagcccacaacctcaaagtcaaacgtcccaaagaaactacaaagggccactgtacgcaattaatctcttttcctctacatcttactatttaaccctgattacttagaatacatactatgagcttcctaggccacaatagataaattcaatgcttatgtaaaatattaatattgaaaattacgtaatcagattaagatgtgatcaagtaaattcttcatcagaaggtaagggattagcatcacttgattcattacttgagagattggccgtagcatctgccataacgctgctaatggcacttatgctagaaaacgcatgttccatatcactgagactatcaaggctcggattagagttgatagaactctgtctctgagtgtttaactgaagatttgagggtaataatttacaggcgacttcatctgcaacacactttgcatgtcttacaatctcgccagaggctacgtcatagatttctgaagagatttcagctgccctgttaagcgtttcaaccaagtattccttattcagtaggcgggacaagggtatggttgggaataaactacgggatttctcaggttctttcagacgagtaccgttggcaagagagtctaactgtagtctaagttgacgattctgctggtctaggaatctattcgtcttctccaacttccgaatctgtgattggatatctaaacacatattaaacactaatgttaatatgttaattaaacaccaatgtggatagattaatagtgttaaaattaccgatgatatctttttggagcttaaaatgctcagtcaggagcgtgtcacgatcatctgaatacatttaaaatcaaatctctgcacattaagaaattcaattaaaatcaatattttaaaataaaattatgtgaaaattaaccaaaaataagttaaaaaaattatatttggaggaatttgtggttaaaaggtgacatcacgaacaactaaaatgtgtaaaataaatcttcaaactgtaaatttaatctttaaagataaaaaataacacaaactgtacaacatcaaaatgagaataaatataaacaatgaaataaaaaataaacgcactataacaataaataatcaaataaaataattgggtaatatttattggtgaaaatgaatctgaaaagattaaatgactataaatatttattgtaacgatttggatgagtgcgagatcagggtatggcctcagttacacttgtggctgggctaattattcaacctttttacggaatgaacaaccctttgtaagcttacatctccctcccgtcggctcagacagaacaatgttacagctaaaaaatttttaataaaaatagatcaaattaaataaaataaatgccaattcgctcaataatttaactaatagaactacagtgaggataataatagtatttaaaatggttgtaaatgtataaggtagtaccttccacagataacggctgtttgtgcatgactgaagattgtagtgatagtcaagcatccggggcacctaacatccataaaaaaggagttggggccttgtacaaggcgctttaatttatgtttcttcgcctcttcatgaggatctagattaaggtaatctacttccatttttatttaaaaaaagttttgtttttcaaaaaaaataagttattgaggtaaaattcaagttcaagaagactattatcgatcaacatataattgaggagcaaaacagagtagaacaagaggtgctttgcactaaatgaacaaatatgtacaattataaatccaggtgaggcacaagttttatatctgaaatttgggtttataaactttttttaaaatatttactaatacaatgaaaaggataggaacagcttcctgtttccttcgtagagatatataaaattttaaactgttttttccatgacactggtttaatcaatggggagccaatccagttttccccatcaaagattccaaacctaaattgtaccctaaaacccaaataacaacacctttttcatctacacatttacttatctttaatcctatgtttataaatttccacaattccctaattctctgttctacaaatctaactttttcgttccgtccacccaaatatttgcgttaaattaaaattttttaccttaaataacatttaaaatatttttataaaaggtttgtttctaaatgaaattgattccacaattttatatcacattttcccatatatgttcctgttccacaccagtttttacataattccaagttatttaaacacataataattaaaatcatgttaaattaaattatgttggataaattaatttcaaatgtttggttaaatttcatcatcgctatcccatcgtttccgttgtatctgttgaaattgagatttaactaagtaaatactctaatggttcctgtgttagattgcgatttagtgattgcctaatggaatgttttactattttttactacctcaataatctgcttcagctcctgatcagtcacttttgacgttccatacgcatatttctgtgcgttctaatttcgttatttagtaaatttataacttatattctcaatacttacttaagtagatagtatagtaatacttgtagcagaaaattttctatgagagtggctttttcaggcttaacacttgagattctgttcactaaataatgaaattattattgaaatttacgtctctcttgggcttctactgtgagtattgatctcagaccaactcttctagcctccaataattgcctacagaggtttaattaaatgaaaaattactgccgcttaagctcctcttgctctggattctaaaacatcgtttaaacaaattattattcaaatgtatttcatgaatttgattcagtctcaacgatataaataagtatagttatttatttaatattgatgaataggttgagaaattagataattaaggtgtaggtacccttttggcgttttctagctcagctccttcaaggtttatttgatccattaacttaatttttaaaaataaaagactatgttacaatattttacaaagttatggagaattaaaattgataaatgcgtccaaaaactaatgtacttaaaataactaaaagtatagagaaggaaataatttatttcagaacgaatttacaaaaatttactaaatttaaattcaaatgactaaaggtaaatttgtcgtaaagttcctgaaccacctttccaacatttttagaatccttacttaaaatgtacaaattaggcgaaaataacctaaaatcaagaccatttaattttttcaacgattctagagataatttattaagtgcagattcctcagtgtgtaagagaattaggaatccaatcattaactcatcctcccctattaaatggctttgaatgaaaaaatcaataaaatcttcacatttgtggatactgttatacattgccaatagtatgaaaatttcgtttaagtaaccaggagtcataatttttgagaatttatttacacatttcatccacttttctattggaaatccggtgtaaattccgaaataaactacagcccttaaaatatcaacatttcctaatcacacattacaactaatataccattatatatgtagataacactatgaaataataagaatgtgtagagagaaccttgaagactccactgtgtatatgtttcattgtaatttgacaagactagttgaattaattccgggtcattccagttcagagctaccatattcctcaataacactttaacgtgtttaggcgtaattccctttgttagattaactgagttattattgtgtaaattatttttgagatgatatttagccctgttgaagagtgttttggagttctgaacaagttcagaataactatcaggatcgatatgtcttgaattggaattgactaaggaatcaataacgtccacaactccctcaaaatcgtcttctccagaagaaattaagttcaacacattactatacaagatttttagaaatgattcgaccttatgatagtgttctaaatttagctcacgatcttgttcagaatggtgatcttgttcagttttagcaagtttaacatgtcttgaaactgaattgtaaaggtttgttatgtccttaaaattcagttgattaactatatttgagtcttcaaggtgttgaaaaatactcacaagtgtggacaaatcaagagtcaagttatgatccaaaagagcgtttagtagagaataaatattaggaacggaacaggttttcaagagggcatttatattatttctaatgtgcgataaaaggatctgtgcatctaccggaattttaagttttttttgggatttaagaatttgaaccatatcatagagattaaactgatccaaattccttaatttgttagttaaaaataaagttattttttcatcaagattagattccagtgatgccagaaaactcatgactgaaacgacttctgaaggggtccattcactggaatcaacccttaaaatctgacttttaactacttttaaaattttattcaagtcttccgattgaattttagtgtttgatttattttgattttccaaatttaaggcccttagtgatacatatttaagtaatttcggtgtataggattccatccctagaacaaattttgaaaggatttgaaggcttgaaatacgcctcaaatatgtaaacacttccataaaaatgcatcatttatagatatactaataaattaataatattaattttagtgtgcggtaactcatctatgaacacaatttgtataatttataacaataaaacttgttctaatgagtttaaaaggtttataatagtttggttggtgtggaacttagcttattttcatttgaatccttgaaaagtaactgttcagcttctgtaagttctgtcaattcttcaggggtataagtaaactcttggctttcaacgggttgtgtttttgatagaacggtgtccctctccgcttgcatttcctttaacctttgaaggtttttataccactgtgttggtggtatttccttagcatctttcaaccttaacttaagatccctgacgtattcttcaaacattggcctcagtgggtcatcatatctcaaacgcctcaaaaatgaatcataactgggctcacccggtaacttaagcctgttaaataattattttagtatataataaatatataatagttaaaataccagttaggtcctctttcgtgcataacttgacacttgagctggagtcttgttgaaaatgatggattaactttatatccactaaggttcatatagtccattaaattataaaaacaactcataggattagtaacaagttcattacaatcactaggatctggtttcttaatgtcttgagaattttcatacgcattttcacccttaagtgtaccagtggaataggggagcacgtataaataaggtaaatcatttcctagtgagaagactttggtcattttatgagcttgataattgtcctttgatagtacatagttaagttggaacatattttctacgggtactaaagggtcaactaagaatccaaaccccgctaaaagatttgataaggctgtttccaactgatttttttcattcattaacagttgcatattagcatcttcttcactttcatgttctcctgcacctaaatctgtcttctcaaatctactagctttttcaacttgtttgttcattttacgtctcatttccactgaaaactgtttaaatctcaagtcctctaaatgtgttagccatttccacttgggaacatcgggaaagttacggaaatcctccccagttctcagaaggaaatattccaaatgctcgaaaaactgacgcctgttaatgtcatagtactcccaactagggttgtggtacatataatcatacaacattggagtatctgttctttcattaaacttgaacatgttcacattccacttactcttgacactctaaaatttaaagttaacggtgttacatatgattttactgtttaaattatgtatatttgaatacctcaatttcagatggagattcgggatcattggttgtcccggactgagagtacatggcatgtttctcaacaaacgcttgccaatactgatcactttccaaccactaaacaattattaacataaacaacaaaattataactagtggtaatattattaagtgtggaaattacttcgttagtatcgactttccaggttggcggattatgctgtgaaatccaaagtgctttaataccatcggaaataattttatcagctgcttcagtagcatcggcacatgtttttttaacggtttcataagtttcccagccttcatttaagtattctggagaagtttgtgatgaaagagcgtcatctaatgttttcatggtgtttgtgtatgtttttttcatgtgagttaaaatattcttatgtgaaatgcgatcgtcccacacagaccagtctagaaggtcaggattatcctttgttccatcaataactcctgaaacattggagtcgaagccctttaacaagttccattgagattcttgatgaggacttccaccagaggcaaacttacccaaattgtgccagtttgtaggacccaaagatgagcgtaaagctttagaaaaatgtaaaagtcttccagaggtggccatggaacaaatcttaaaacattaaataatttaattttgattccatccccccacccctttaacactttctcatcctaatcttacacatttacacttaattcaataagtttactcattatcatcttagaaataataattacaaataattaaattattgtattaatattttgttttctcaattatatatttttccatattcagtgttgataattatatatccctgagataatatcttatataaactaataaactttaaaatcaatgatattatacaattatttgctcaaatttaagggttttagtttaaaattgatcttgtggaggaggatatgtgttataaataaagtatccaagaccgacaactagagccaggattaccatggcgatgtagaagtagtttctagttctttgtgcgtctaaacattcatttattacaactatgttataaatatgtaagtaattgggagagttagagtgtgtaaaagttaccatctggcgctttgaacttatctgagagttgttcttgtttattttcattattttgatcatgtgatgccgggactaatccaacgaccatttgatccctgtcgaatattgagatgtatcttctgagaaagtttgcgcctataacaaacaaaggctttttaggctcgggcatatccattggcagaactcccaccatacacaccttctcaacttcgtcctttaacacgtaatcctcaggatcaaggtcaaattttacttttcttcccatgacatctgaaaatacaaatgataaacgtgggagtttatcaatgttagaacaatcttcttcaacagtaatcttttcaagtagaggtattatcacatctgatggtcctgatattaaactacttccagtatctattgccgcattatattttctatcaaactgaacaggttcaccatcaaccaataaggaagatacttcaatctcccagtaatctaaaaataacttagcacattgtaataagtgatagtctagggtagtgaggtaccagttttaacaacgggaaaccaccatggtttatgtcctggaagtacatatttaggatcaatgcttccaaaagaaagagacccaggtctaaacatcatttattaatccctgtgacttactgtttaatgtcctttgacatgtaaaatgctattatattcctctttaatattttctaatcaacgatttagtaaggttgtaacagttgaatattctatttacagtggaataagtaagaggtacctgatttcttatcgagtcgaatatgggagtgagtttctttgattctttgagttcagtatcgggaaatccaagaccaactaacccatcgaaaggcaaatcgccaaacggatgctcactttcaagtacagataatccaattgattggtgtttcacatttctacatgataatataataaatattaaacttacagagacccgattttcacgttatcaaatccaagtgccagtactaaaaatcattcataaacactattatacactatttaatataatatatagatatagcatgacgtaccgcattcaccggtaccgtaacggatatattcactcatcatttcatcacctttcatcatgggttcataagtagtagacgcagatgaatcaaacattctatgccttgcacaaccatttgaactatgactaattccataattaatcatattacattattatacatatattatatacagtatctaatatactgtatatacctaacatactactatgaatatacttaagggtatatacactatagtacatatggagtattatatgtatatacagtatactgtatttaaaccttataaaaccatattaaatagatattatcatactattactagttaaatcacaagggattatatctatggagttgaataaaatacagatttaaatatcaaggtgtgaggcaaaactgttaacccgtaacaacacaagaattaagttttaatttaatcttaaattaattaataatttataatttacatcataaataagatttaatttaaccaatattttatatctaatataactgtatagaaataaactagtgttattttatacttgaggcatgcttttgatggtatccataattgacttgatccggtgtcaaatacctaaaaattatgagttaattaagctattgacatacgactacgaagctttttggcggggttcccacttgaatttcaccaaaatattgactattttcgaagtttaaaaggtactgctgaaggttctgtgatccgtcatcagacttgaattttaaataactatactcattaggtcttttactagcatcggaatgtttagtatgagaattagatcgttctgagtgttttttacgtttcttcttgtttagagcaaatctgtagagattaactgagtggtcaggcttattaaaaatttgcgatgatagcattctgggatattccatgttaaaaatgtgcgtatagcatttatcacagtcactcgtagtgtgattgaaaagctccttcatgtaaacagttgcaggagtatcataggcgtcaattatcacactacctatacgcttaaatatttcagcagacaagtcctttaaagttgaaccattagccagaaaaagggaagaaacaaaagaaaaagagtaaattcccaagctaaatattaaagttaaatatttaaaaacgttaaatttcatttttaaaattgcgaaaattatggaaaaatcatcaagaggttagaatttaaatttgatacacattgcagtgaaattgtatttttgttacaaataaacaaagaagaaacttatattattacagaaataatatagaaaatcaaattcaacacgaatataaaagtttttcttgctgatattgtctacaatacatgaaatataatcagtgaacacacaaaaggaacgggttgatattcatataatatacagtgatttctatgattaaaaaacgttattttttaaatgtgtacttgttttcaggttaaacttaaaacgacatctccccatacactactaaaacaaagttttgacaaagaggaagaagaatagtcaatatgattaaaatgaatggtatatttgggccatcaaattaaaatattttaaagtattatattcataatttaaacattaatttttaatatttttctctgtctcattcttttaatgaagaaatggaatgaatttttctcaattttattcctcacatcagttttaaacttttattttaaatttaatttcattacatttgtcagttcttccaggcgagatagggattttgaacatcctaattctagaaaattgtcaaactctttattccttcaggattcttccaataactctctaaataacaatttaaaccccaattatgttagtattcatgactttaacaagcctttaagccaaaataatcctaaaattttcctaaacaaagcctttaatgacagattatgtgacaccaatgttggctccaaactaactgccaaggccatttttttatgcggtggattaggtaaaagacttaattatgactttgggggactaggttctgattattatataccggagggtatgccaaaggcaaagcagtttattcacatatataacgtccctctgttcgtttattctctctctgagtttattcataatcccaacgtatctgagataatcatagtcactcgaccttcctggttccataaagtgcttgaaatgatcttgaaatccaaagaattcatctctaactatccagcaattgaacgtcatatacatgaggaaccggaaactgcggatcatattccagatgacactccagatttatcagagaaatccctaaaaagaggtttcgtttttgcatacgatttgaaaaataataactttgtgcttgatttacacctgattgaacccagttacaacacgaatagtacaaatcaagataatctacaaaaaagatataaaattattaagttttgtgagtcaggacctgaacgtttcaactcggcttataacgggttgaggaatttgggagagtatacaggaggtgatgagatagtaataatacacgacggagtaagaccattagtcagacttattgacctaaaggagttaataagcactgcaaataaatttggaggagccgttcccggataccagagcccggacactgttaaattggctcagaatcacaaggttttgaggactttggacaggtccaaaaccttcatcatacaaactcctcaagctttcaagtataaaattattaaagaggcctacgataatgttttagaatctgactctttcaaatatgaaccacagctgtttaaccaattcacagatgacgcaagttttgtggaatctcagctcagaaatcatgtagtcatagtaaaagggaataggaataacttaaaactcagttataattcagatttggatctatttaagtactacttgcatcacaccttttttttaaaagatcacaaataaatttgtaccattatatatactacttattaaaatattttttataaatatttgtgaaacaatttatttctggaagaactgccatattctagatcacctgtaatgtgtgtaaagggtacacggatgtagtggaatgtgtggatttaaagcagcaggaataaaagttgtggtataaggaattcctagaccaaaacccaccaattaaaaacaataatacattttataaaatatttattgtttagaaaatcaaaataatcattttagtcagcccaagcaaggttgatgttgtgtcttccaactcacaaaaagttttaataatgatactataatactgtaatacacaatcgaattgtttaataaaaattaaattaaatacagaaaacctaaattaatttgttaacgatgttgaaaagacccgttatgtcctcagctcgtttgggacccctcaataacaatacacaccaatacagaaaaaggcgtgaattgactgaggaccagaaatctgaaatgaaagaggcttttgagctttttgataccacaggatcaggtttttaaataattctttaccacattctaccccttatctacctcttactcattctaatctactttattccaccttaatccctttaaattcccttattaaatatcatatattatgattaatataattatgtaagaggtgtataaaaatttcaggccgtatagacgccaaagaactgaaagttgttatgaaggcgctgggattcgatccttccaaagaagatgtaagttttcaatttcacacataacttttactctttagctccgcgctgtaatgaatatggccgacaaagatggctctggaactatttcatacgacgactatttttcaattatgaccaacaaaatagtaaccttcctccacttataaataaaaactatacttatctctatatacaattgagttattataagatatttaagattgttaagctaatttaattctgtttcagctggaaagggaccctatggaggaaatgtcgagagcttttcaacttttctcagatccaaacactggaaatatcagttttaaagtattctttacttatcctgtcacaattaccattttaattcacagtattggtgtctatatatgtttgtttagagtctgaaacgggtggccgaagagctcggcgagatggtatccgacgaggaaatcaaacaggtatggcttaaaaaatctatttttattcttgaataaaattctagagcctatatcggtacatatatcatacgtatattagtgtaaagagtattataatgaaaaatataatgttaccacagtaatactgcgaataaataatgctatatataatataaatttttttgtaaatgtattgtagatgattttggaagcggacagagatggcgacggggagatcaacgaatctgagtttataaaggtcatgaaaaagtcaaacttattttgactccaagaagactgaatattgttcatgcggataattcatattacctaatattttcaaattaagcggattataaagtcctctaaataaaaattagacaaaatttaccatcagtttagcaattattggtaaaattttatatagtgtcgtgggggtggtccatccaagggacaagccaaatattgttcatttgtccccttatttttcgaaaattattaatatgatattgttttgatcccaaatcccttgtagttagagttttatttgtttatacttacttattttaacgattttattcccttcatttaaatctggaacatgactaatcttacattttactgattcaaccgccttttaattcgaaagaaaaaattcccatttttcatttaaattattttataaatggtgataacgttttttctgaatttcccgctaagctcttaacaaatggccgattcaggactagaacctaattactctcagtccttcagcagaaatacgaccagcgacagcttaaacgctgagacttataaagtaaataaaggaaatctcgatggtcagctgactaaaacgtatcatgaccaggatatgcccactgatacggccacgttatcggattcgaaaattgaaactgaaatcgctcctaaagatcaagaattctcaagtgaaaccaataattttaaccttacaactactgccgaagatagtgaaaaagtagtcgcatacaatgaaaataatcaagaaagtagtttattaagtaaggaaaacagtgaagctaccagcttacaagaaatgaaaggagaacagcaagaattgataaaggaattgaatattccaatagagctggaccagaatttcgcaccgcagccttttaagtttgacccgaacgaccttaatattccgataaaatatgaccactcaggagaggcagctcctacagatttaccaagcttgcttaagaagttggatatcccttgtgattctgacgttttaacgagtagtacttactcaaatgaacaatttaatccacctcctgacaaggcttcgtcagaaatggcagagtgtgatgatactgagccgttttatatatacccaaagaccaaaggacaacagaaggtttcacaaaatttgggatacaacaacgtgggtatgccaatgaaacaccaatataactctatggatttttcaaataatctcggattacgggagttgtctaataaattgggttatagagacacagatactcagagatttaacgatttatcaagtaaccaagaacttaatgatttaaatagacatgattttccagatttaagatacgattatcaacatgacagagcacccccgggattactaaactatgatgtttacggtaatagacttatggaacctacccgacaagacttttacaagaaacacctagatactgatatgtatggctatgaagattccagatacaagagaagaagagggtcaagccaatacagtcagtctcacaatcctttcagtagtgacgaaaacttacaacatcataacttgaaactaagtcagggacaaatgagtgaacctggtctggttggaagagaaacgacggatgttcatggcagagaatactatgacccggacctctataacagagacatgagatataaacaggattatggcagaattacctttagtgatatggttaatgggtttcagtcaactaatacccatacttataccgacaccgcagcatcacacagctttgcagacacatttgataactcacaccaacaagatgctgttcctggccttaacgtacaaccagttactgttgaaaattgggcacagtgtgaaaactgtaaaaagtggcgcaggttaccgctaaacgttgacactgatcagttgccagaaacctgggtctgctccttgaacgtgtgggatccagtctacaactcgtgtaacgtacctgaggaaatatatccagaacataacgcaaagaatgttcaaccagataaaattgttgataacgaaaatttggagtttaatcaagtgcccatgaatagagtgggccatccctaccacgagcctaagcaccacaagagaggaccaggtaggagtaagctcgtctctaaaggatacaatttaatgcacaaggatatgagtgatatttcagttgaggacaaaaggtattcacgagattatacagacagggatggcatgaggacaccgacaatcaacaacaggtactatgaggacaatagtagaagagaatcaagcagaagaatgtccatgtcaaggacacttctctcacctattgtatccaacatctcaagctatgacgaggagtgtgaagtggtaaagtttaatctccccagtgcaaacactcaatttaacaatggttacttcaagaatgaaagtaccagtgttagtggggagtacaacgaagagaaccagactaatccgtttgcccctgattataaacaaaatttaaagagaaaggggcaaaatgaggaaaaaggtagagatacacgtttatcacacccactgcgagatagactaacactttactctgacaacttgacaagcctgctcgccaccgagttacctcatagtgccttattcctggataactctaaacgacacaccgtaaaagaagacgactttgctcacgatgaaacgaaacctaaggaaagcgttacaaaagacgtatacatcaaggaagaggggaacattaacataaactatgcgtacaagactagctggaaccataaaaccccagactcgaatgacatgggagctacaagttattcacagccaaatgaacgaaattaccctgatcgaaataagttcaacgagttattgcacaacagaagtgacttcctccgtatatataacaggttatcgacacaaatcccaacattgagtgaaatcaaaggcaacgaggagtctcaattttcaaactcaccggaccctgaatcatcagatgactcggaagattacgattcggacgatcagcgtagtaacccagacatggataacgaagataatagaaacagtggtcgaaatagcataagtaagatcattgacaaaaatgacctgttgcagttgttgtataattttgcccaaaagcagttgaatggagaagaggcttcgacagaccaaaacatactccactgcaacaagtataactacgtcaacactaaccttagcagcataatcaagtacaaggatcaactcgacgccacacacccaaatgattcaatggacaatccagagttagttaattacgaacctgtcaactataaaatggaagttaatagtgaagatagggagagaaatcactatcaggcgagtcgagaaagtttaaagacggataaagaaactaacgaggacttgtccagagatgaccaaagcgatgacgaggagttgacggatgaccagatgactgatgaagaatttgaagatgacaaccacttaaagatggataaaaagagccatttggactatccactccccaacataaagcaattgtcgaaaaggtgtagaaatttagacaaccctgaccaacaaaacctaaatttagatgacccggagataaactccaactactcaatgttaatgcagccaataccccaaaattttaaccaaggtgataatttgaacaactacaacaataacataataaaaatgctcagcataccgatttcctacaagtcaaatgagcaagaagttaacatacaacctgacaacataaacctcctatcactgccgattccagatttgtcactaccggatttatcaatgtcagatttaaacaattcaagcacccaatacgttgcttgacacgccactactgacgctactcaggttatagagagttcagtacaaattaatcaaataaattccaccaagcgcatttttaaaccacttgaatgtgtaaattaagtaatgtactataactttccactatatattttacatattccattcaattatatacttgtaactttatgttataccattgtgtactttgtatataacattgacatacaatagtaaaataggattagtgagacaatagaagtagtatataatatatatgtattttttatagtattttaaaagttggaaggcaattatttatttttttggaggctagatttcaatgttagacaaaatggtatgacaccagagatactgctcccaggtgctatgacagaaaacttgagaatttataataatttacacccgttacagttcttttgaactaaataatttaaattgacaaaaaaataaattttaaatcagatgtgtacagataaattggggcaatgagaatctggattatgcttctaatagtacaagcgctactctttagggtaaacgcagttaaagaacaaatggaggagggatttttgggaatgggcaagctgagtaaaaaattaaaacagaaaaaagctgacaggaaaatgaaaaaacagctttacaaacaaatgaaaggtgacttaaagaaagatctgaatcgtgaaatgacaaaattaagaaatgaagaagcaatggatgaaggttacgaatcgggacacaaaccatgggatcacaagaggggagtatttggacgtaatgatcacggaaggcatagaggaggtagaggccatactcatgaagtggatgataaaactcttagaaaactggaaaataagctagaacaccaagttttagatgacctaagagcttttgaggaacaggttgaagcatattgaatgagttcctaaaattttatttttggaattcaagaatcgtaatactttaaaagtcaacaaaacaactgatattattaaatattattgatttacactaaaataattttaaatttaattatctttgtaaaaattttaaagttttataaaatattttttgattcttgttaagagtgtcgtaatgtgagttagtgatgccagatatttagtttatggcaatttttatgtatttatatttttgtataaattaatttagaatatttaaaaatgtatattaaacacttttctggtaaataaataaaacaatggatgctttggtgttagatccaccaaaaaagaaacacaaaaagaaaaatgttaagaaaaaacaaactaaaacccctttggaaaagccctcgaagcaaaatacaaaggccttcagcttcagcggaggaaggaggtcagttcacagaaggtttcaacacgcaagcgaggttgaagaaaagcggttgagaaggccgagaatctataaagtacctgaagttcctccaccaatagtagtggttgtccagggaccaaagagtgtaggaaaaagcactatgataacttccctagtgaagcagtattctaaaagaaacattacgaatataaatggaccaataacactagtatcctcaaaatcacgcaggataactcttatagagtgcggaaactctatgcttgacatgatagattgttgcaaaatagctgatatcgcaattgttatggtagatggttcatatgggtaagtttaagtatttctgattatttatttaggtatgaaatggaaacttttgagtttgtaaatatgatgcaagttcacggtcttcctagagttataggagtggtcacgcatctagactcatttaaagataataaaacaatgagaagaactaagaaaattttgaaaaagaggttctggtcagagttatacgacggggcaaagatgttttatttcacgggacttcagtatgaccggtataagaaaaatgaagttttaaacttagcgaggtatatttcatcccagaaaccacctactatcaactggaggttatcgcatccatacacagtgagcctgcggcatgagattatagagactaaagatgattcatgtaaagtatttttctatggatatgtatacggaggaaaacttaatactacaaatgggatacatataccaggtgctggggacttcacaattgactcagtgactaacatgcaggacccatgtgaaatacagtccaagtattaactaaaacatcttattcatctagttattaacctgagattagttttacatttaataatagggaccgaactttgaaggacaagaatagaaatatatacgctccctattgtgacgttggttcgttgatgttagatgatgacgccatgtacattcaaatgtttaaaactaaagaacattttaccgagatgccgaatgaagataatgctcaagtttctgaagctgttagaatggtaagaactctacagaaaatcgatgactcgaaacccaaccagcctgagctaactgtcctcaatgggtatactgttgatgatgcttccgaatcggatgaatctgtgaatgattatgattcagagtatgaaaatgatcaattatcaattaatggtgctgatgaatcagatgatgatactagttactcatccgatgatgagtcagatggagaagatgattcatctgatacatctgaatcacctaatttagatgaaatcaagatatatgacgagattagtcaacgtgtttattttggggaaagtaaaagtgagaacttacacttgaaggacttttcaaaagttttaaacaaagatttcgatcaaacttgggatagtgaaaagctaagattgctaagggagtccaagtttttaaacctagctgataattctgatcaagaaaaccaagaggatgaggaagataaccttcaaaatgaccctgagagtgaaaagtttaagaaaattcaggaagaagagcagaaaaaattataccaagaaaccttggatcttgaccacacagggaatgtgggtatgtttgtcaagatatgtgtcgccggaatccccccggaattcttgcaaaatgtaaacaccaagctcagaccaataattttgggctctttacaacactcagaacagggttgtgggttcattcagctgaaaattaagagacacaggtaacacaaaaatttctgacctttcatcaggtgggcacctaagattttgaaaaccaatgatcctttgctattttcaataggctggagacgtttccaatccataccaatatactgcatggaggatcgtaatcaaataaggttaaaattttaatatttagtttttaaaaactaacatttctatagggtaagaatgctcaagtatacacctacccactcatactgtttggccaacatttatggaccactatcacctcccaattttggtatttttactctataccttcactatattatatatatatatactgaatatatactaattatgtataatatcatagaatgtaaaaaatgccttaggagtcttggctgttaaaaattgggatcggatttctaattacagaatatccgctacagggtcaatagttgggactgaccagaactataagatagttaaaaagctcaatttggtaagttttacaacaatttaaattatacaggagggagaagcatataagatcatgaaaaatacatgtttcattaagaacatgttcaattcggagctggaagttataaaatgtattggttcaaagatacaaacttcatctggaataagaggtcaaataaaaaagcccattgagaaaaacggagcatttagagcaacttttgaggataagatattattatcggacattgtggttttaaaatcgtgggttaacgtagaaacgaagcgattttacaacttaattctggattctgaaggattcagaagagtaaagtcgatagcggaacttaagaaagaggaaccaattaaagccgattcaaagtatgagaggaaagaattacttaaaagaccagtccgtcgatttaatgagattaagataccgaagaaagtcattgaaaaattggcattttcatccagaccaaaggtttttatatatttaataacttgctttataggtcattgaacatcctaaagatgatattactgttactgttgacccatctgagcatgaaaagagaatagccagaactttgcagaaactgcacaccataaggaaggataggctggaaaagcgtctggagtctattaagcagtacaagattaagaaggatctggatgaaggaaagctccaagaggtcagaaaaacaaaattaaaggaaattaaaaaggctaaatatgcaaaacaaaccaagaaagaaagaataaaacgctcaaaactacttttagattgaatttaatacaaacatatacataaaatagatgaatataaatagaatttgtatgaagatttgaatactacattacaggttgtgtattaagacgaattgttactgcgttaagttttctaacggcttaaaacaatttgtacaacagttaatcatacgcccttccgatcgtaacacctttagtttctttaatgaatacagcaacgtaaaagaaaccgaacaatgagaatgcaaaaagaattatacttacaacaacttccgagtatgaaattaggaattcggatgcaattaaggtaagtgaggcacataaccagttgataaaaacagcaacactcaaggcaccgtttctatactcggtcccgaaaacttcggataaataaacccacataatacctcccaaaccaaatgcaaaaccaataatgaaaccgaaggaacctatagaagagactatgggaacccacgaggcttctttaccaattggtttactgaaggatgacagtgccatgaagatggtcgagaaaccaataccccagactaagaatgttttcctcccaaatttaccaataatgaaagtaagaatgacagttgccacaaaattaaccaaaagtatcgatgacgaagctatagtggagttataattcctacccattactttaaggaaaattttggtgacatttgacgtaaggatagtcactccgaccaactgttgaatggcagccaatacgaatgcgtgaatgattacctttctgtatttaggatttttgattgctgtggataaaggtatgcttggggttgatttggcaacttcctgatctctgtcgaattcattaaagacttcatcgacctcttcctttccatggagcttttcaatgacttcacgtgcttcctcagttttaccctttgaaatcaattcatatggtgtatcaaatgagacaacaaagtgaattagaatcaaagaagctatgcagcataacactggtaaaaattgagtaccacgccatacaaccttatcccatgtggtaagtacaaagggaccccctttgtcttcattggtcacaacacgaccatgggccaattgccatcctgccgaaatcagtaaaccaaaggtaatgaacagttggtatatcacagcaaagtactttctttgcttaggatgacatatttcaaccaaaaataccggtataacagcagccagaccaattccgaatccagaaatgaggcggcccatgaacaacataataaaatttacagatgaagcggacaacgtagatccaacaacaaagaatgaatttattaagtataaagtgatcctccttccgattttcccggaaataccaattaaaagtgatccaaaagcagctccgagaaatgttgagccgttagagagaccggcaaacaattgcgattttgggcaatcataaatatcgatctcgtttttgcaccatcccatatctactattgcgaattctttagtggtattaagtgccgcagacgttagaccaaaacataaggctccaagagctccaatggatgctcctgcaatcaggggtccagaagctttaggaatcatattgctaatatacaaatattatacgattgaatttgtgttgtattagaaaaatatttattgtagatagtgttcatttaaaattagtcgtgaaataacgtgaaatgctaggaatccaattaaaggttagtctcgataggagaaaacttaatattacattagaattacaaattattattactaaaattacaaaatattatcaaaaaattaattgttatatgaaatacaggttatatggtacataatgtaaagaattcacaaaagtgaaagcatatgaacatgttccgaaacagcaagacagcaccacccgtaatagctggtgaaagttctataaatataaatctgtacacaaaaaataataaagataaaaataatactaattaaactttatttaatctatcggtaaatcatgttacgaagtatgtatttaaacatgtggaatactacattacaggttgtgtattaagacgaattgttcattactgcgttaagttttctaactgtttaaacaattattactgcatttaatcgtatgcctttccaattggaacccccttggtctccttaatgaatacgattacatagacgagaccgaacaatgagaatgcaaacagaattatacttacaacaacttctgagtatgaaatcaaaaattcggatgcaattaatgtaagcgaagcgcataaccagttgatgaaaacggcaacactcagtgctccgtccctgtattcagttgcaaatacctcagagagatatacccatactattcctcccaatccaaacgcaaaaccaataatgaaaccgaaggaacctatagaagagactatgggaacccatgaggcttctttaccaattggtttactgaaggatgacagtgccatgaagatggtcgagaaaccaataccccaaaccaagaatgtttttcttccaaatttaccaatgacaaaggtgaggacgacggtcgatatgaagttaactaaaaacatggaggatgatgccaatgtagatccataattcctgcccatgaccttggtgaatatctttgcaacgttagaggttaaaatagtaattcccaccaattgctggatggctgccaatacaaatgcatgaataatgaccttcctatactttggtgttttaaatgccctcaacagtggtatacttggtgttgatttagcaacttcttggtctctatcgaattcatcatatacctcatctacttcttcttttccgtgaagtttttcgatgacttcacgagcctcttctgttttaccctttgaaatcaattcatagggtgtatcaaatggaactacgaagtgaattaagactagtgaggctatacaacaaaacactggtaagaactgtgtaccacgccatacaatcttatcccatatactaagtttaaaaggagtaactccatcctgaagaacattagttacaacacgaccatgggccaattgccatcctgccgaaatcagtaaaccaaaggtaatgaacagttggtatatcacagcaaagtactttctttgcttaggatgacatatttcaaccaaaaataccggtataacagcagccagaccaattccgaatccagaaatcaaacgaccaataaaaagcatagcaaaatttacggctgcagtagataatatacatcctacaacaaagaaccagttaactatcatcaatgtgaccctccttcctattcctccagataaaccaatcagaagtgaaccgaaagctgctccaatgaaagttgaaccattggaaagaccagcgaacaactgagactttggacaatcataaatatcggtttctcctttacaccattccatatccactatggcaaattccttggtagtattaagggcagcgactgtcaatccgaaacacaaagctccaagagctccaatagctgcttcacaaatcaacgatttagacgttttaaccttcattctattaatctaaaaatattttacaataaagtgaggctataatacaaaaaaatttttgttgaatagatttcaactgatcaaaataatcaagtaatatctattaaattttaagaatccaaattggaatttaataacaaattataaaatttcaaaacaaaactaaaatttactaattattgtacaccgtctcctatttttttcctcttgcctgtacttcctgggtggggtgtaagtacagataattttcaaaaattttcgcatcctttttttctatcgaccagttaaatagttttatttatatttgaaatttctttaaccacctaaaccggtttagatcctctccagtttacacatgtttcaacccaacacatttgtaagctgcagggtgtgtagcttcatctccatttttacatttttattttttccctgtactccttaatttttacaattactctagatttatcccgggaatccattatgccaagtttggatttacatttaaggccatggagttccattccaaggattccactcattattagagtttaaaactttaaaaaatttttatatacaaaagtcaaacgtatttcttattattcattataataaatggataataaacaggttttatttgtttaaaacttaattcatcctatttctagattagttactgtttaatcagcctattttaaattaaacccaattttaatttatttagaaccttttagatttattcattactctgaaaaaatcgcatttgtttgggtgagaatgtacacataagtgatgtaatccttagagttacttcaaccctcaaatataaggcatgtatttgagttaaattgaagattattttgaattttgagtgttccataatcagaaaaacagtttaaatagagaaatttaatgtataaaaattttgatgtgttgagtatacgatttactattataaggaatatattaaccacttatagaattgaaataattaaaaagaaaagaaatttaaaaaatttggaaaattaattatataaactaattttcatgacaaaattgtatatgaaccatgacttataaattaaaaaaaaatttttaaaaaaatttctaaaatatataattaatgcataaaatatatttaaaaataaaataagttaaaaattatataaaataataattaaaataatttattaatataaataagtaaaatttattttatttatatatataaaaaatataataaaaaataaaaattttagagtaaaataatatataaatattaaagattaaaaaataaaataaaaaataaaaaattaaattaaattaaataaatataaattaattagaatagaattgaaaataaatataaatataataaaatttaataaaaacaaattatatataattgaatcaaaaaatatatttatttgagtaattaattttatatatataaatcaataaaataaaataaaataaaatataaatatataaaaaatattagtaaaattagaataaaaatagaatataaatatataaaaaattaatttatatgtaataaaaataaataaaaaataatattattatatataaaaatataaaaatataataatataaaataatttttatataaatataattaaaatgataatatataatatattaaaattatattaaaataacaaatattataataaatataataaatttattattaatatattaaataaataaataaaattaaaataaaatatgaaatatacataaaataaagtcatattatatatatatatatatataatatttatattatataaaattattttatatatttataaatatactgtaatattagataaatatatatgagataatttattatttttattatatatataattaagataattaatatattttttatattaatatataaaataaaattaattaaaactaataagaaattattaaaataaatataaaaaaatttttaaagatttaaaataaataatttagtttaaaaataaatatttattaataaatacgaatattatttaaaattttaaaatgataatattcagttatatatatattgataatgaattaactttaatattatataatattcaagataaatataattgaataaaaaaatttattcatttagtgtataaacattattaatattattttataaaaattataatttatattatatatataaataaacattaaataaaatatattatatatatactaaataaataataaataataaataataaataataaataataaataataaataataaataataaataataaataataaataataaataaaattaatttatatatataaattttaatttataatatatttttaataaatattattatatatataatattataattatatatatataaaatataaattaaatattaaaaaaattaaaaataataaatttatatatattgtcaaattaatataaagaaattaatcaatataatatttatataaataatgaaattttatatgtttattataaaattatatttatttcatttaatgtttatatatatataaataaatattaaagttattattattatatatatatatttaattaataatgaataataattttttgtattataatatattttaattttatattctagaatcatttaattaaatatcatatattttataattaactaataaatcgaaatatataaaaaagtgatatattattttttttaaataaataattaatactcatttatttttataatatatatttataataaaaatttatttttttaaattattattcaaatttttatatatattatattaatagatttgtattttttataatttgttttatatataatatatataatattattatttttaatttttaaaattatttataatattttcaatattatttaaatatataacaattatatttttataataatatttaactaaatatatttaatatttatttttatgattatctatattattttttatactatatatttttgatttaatttattattatttaatctactattatatatatattattcaatttattaaatcagatcatataattttatatatcaaatatatctatatattgaatttatttatatttttaatattacaattttattaattttatattaatttctttattattttatttatattttaacattattatttattatttttatttttaatatctatcaattatattatataattttattaaaattaattttttatttataattttatatttatttaatttatttatttattataatataacatattataaaatgtaatttttaaaaatttatttatttatttatttgtatttttatttattttataattatattatattattttatattattattaacctataattttatttattaatatattttatatattttacctatatttattataatatctatcatctataatatttttattcattatttttatatatattattttatatattaaaatcaaatttatatatttttactatttatattaaagattattttttattttaatttatatatatacatattttatttttttaatttaatatacattattatatatttatatcaaaaataaatttttaatttaatatatattattatatattattgtattattttattctttttgtatatatttaaaatattatttatcaaatcataattataatatatatatatatacacattaaatttactttattttactaaattatatattataatttatatattatttttaattatttttatattttatattttattttttattttttaatttttattatcactgttttttcaatttataattttaaatttttatgaaaattatttttttcttttctctatttttatatataatattatacattatatttcaatttttattcaatttttttatatatatttttattttttaatttttatatatatttttaattttgtattttgtattttttaattttatattatttattattttcttatttcaacataaaatgttcttttttatacttatttttattatttttaaaaaatttatttttttaatttttaatctcacttgtttgtattatcatacatgtatattgtttttttactttatatttatttttatagtttaaactgttttattattaattattcttataaactaattaatttatagattattatttattttttttttaaaaaaatttctttcaacatgtatgtgataccggttctcactcaagaaatttatatattttaaaaataataccaatttttaaataaaatttattaatgctaaatattcatctatttgattttattttttatattaatttcaataattttaataatttattttttatttccccatccatggaatccttagttagcgacatgaatttataatataattgtaattattcgcgttaaactagttatttttgttttataatttttaaaatgtagttttaattcgaattttgtaaaaaatatgtcgattctttttatttttaatattttattttggttttaatccacaaatttattttgaagtttaattttcactaatattttaaaaataattcacactgatacattattcacacattataacataataatttattacgattaccaacaatgcattctgattccagtaaaattagaaagatgcataaaaaacgacctaaagaaggagagatatcagaagacaaaagaaagtacatccattcacgaaatagtttccttttttttctactaggaatgtctgtatatcctaatacagatagtagtctacttgctcaaaaagtattttcatgtgaaaatttcactaatgatattatgcttgtccacaatatgtccctaacaattatcggtttgttgttttcatttttgggcggcagatacgagttttatatctttatcggttccgtttggggatcactattgtgccatttatgccatattttaatcggtttttacgggacaactatccacgcacgtaattctttcatttgcatttttttctttttgggaatatttaggtcgtcattatcctttacatgtaagtttttattacatcattattatttataggtcctcatattatttcaaaactttttttgttttctgcctatctcctttttaataattcacgttcagccttttcactttctatgggtatatttcagctaattttgaataatctgataggcgttaaaacaattcaacaagccaggttaaatttggttatttgtcattgcttacaagcatttatcactttcgttggtgccgtttggtctactattttgtttattacttataaagatgaagatgctcttaaggataacgaaaaatatgacgttcaaaaaattgcaaataaaaaaatagagaatttcaaatatctaaagtattactatccaaggtttattctgtatcacatttgctcagtaaaatacatttttcatactggtttaataccattcttgcttgaacttcccatgcctattaaactgagaggttcaatttcttatacatttggtgaatttttaggcagaaattcaggtttattttttgatgagacagttataacaaagccaggtgattcaatagatactgccttttttgttctcagagatatccccctattttttttaatatttgccattataactttaaatggagcaataatgtactctacatttactgctaaaatagcgattagtagaagtcctccctttgttttaacagcactaattgtttcaggtctaagttacggttatcttatatcaaaagcaactctgggctccaatgcaattcttcagtattattcaaaaaaaataacagaagaaacgatccctcgagaatcaaaggttgtatctgaagttattactattacatactactgttctctatttattccttattcgatttcaaaaattattgaaaaaagtttaaggaaaagtagagtttctcgagactacattttgtcaaggaactttggaaacttatcagttaacgacgtacacattttactcacattgttgaacaaataatattttgacacaagttatatggatatttaggaaatataatatatgataaggtccattagattaatatatggtacattgaattatgtctccagcctcttatagtattgccttttatgcttctccattatctgaagggaataaaaggcatataacaaaccttctcaacggattttctttctgatttactaattggggtaccatcagaatactccaaaggaaggtgattttcatctagttttccaaatttgtttgggtatgttctgtgtataaattcttctgggggaattgacagcctttgaagcctttcattctaaaaaaatgaaaagtttactaaaatacctcttcttggagtctttgttccttttttaattccttccgggccttttcaagctgttggtcctgtctaaaaaattacaaggacactgacttacagggatttgtacttaacaacactagttccgtcatcacaatcttcgagaattattcccaaatttggcaatttttggtccctcaaatgatcacagtgttttaacaaatctttggtggcttcagaatcaagattattcttcagagttgcttgggcaaatgctctggtctataattaagttaagtttacaaaaagataattaaataaccttctgtcgtaagttaaccaattcgttcaaaagtgacttttcattttctgatgactcagatttattttccacaccgtattcacaaccgggttcaaccagttttaacacctataaaccatactcagctgttgggttagcttaccccaaggatgcgatacaggtactgcttaaacaagagtgcttgagtatacttaatttgcgttttggagtcagatataaaagtgtttacagttgaaataaatttacaaagatttgacaagactttgggtgtgtcaaaattgtccaggaatgctgcatgcacctaagatacatatgtgggaacgataacacatgaaaacatacatttgatttaagtttctcgaattctttattgaggttcaaatcatcctctgaccacttttgatcaactgataaacttgacaattttgaatttagtgttgaaaaaaagttgaaaaatgtttcatcaattgacactggctcgtccatgccatcaggaccagaattaaagttcaaagttgagtcatatctatggcaaataaacactaaaaatctcaccttgagtttaaaaataatatacggatctgtcttttattgtacttagttaacatttctttaattgatataaagtttttaaggcttttgctcatcttcaaaccatgtatgtgtaagtggccgaagtgtagaaaatagtttgcccatttattactatcaaaatatgcttcagattgagctatttcattgtcatgatgcggaaatcggaggtcaactcctccagaatgtatatcaaaaacctctttgccaaatatacatgttgacattgcactacattcaatatgccatcctaaaattttattaaagatatataaaaacctggtctcccctttccccaaggactatcccaagatggttcatttacttttgacttcttccaaagggcaaaatcactttttgatttcttgtttactgagacttccccaagtgttccttcagcatccaaaatacggttcaaatcattaaaacttgttggttcaagttttgcgtagacgtgtttcccgctacttctaaaggcttcaatatcaaaataaacgctcccatctgacacataggcatatccattgtcgagtatcttcttaataaaatccacaatttcaaccatataatcactaacacgtgttatacagtcaggtaaactgaaaaattcataaataaattaatatttacctgacaccaagtgaaagcatatcgttccagaattccctttcccaatgtgaagaaacctcggaatacgatttaccctaaaattatttaattatttataaaatattatacctcatttaaggctctttgaatgattttatcatcgacatcagttatattttcgacaaaaaataagtcgtaatttagataattctccaaaatactccttatggtatcacaggctatatatgttcttgcatgacccatatgagctacatcatatacagttgggccgcaggtgtaccacttaacctttcttccctcctataaacattagaattccaatatacgtagaatttataggtacctctgggacgaattccaccttcgaggaagggcttaatgaatttttaacatataaacctgttaaaaatttatcttttttagaggggatttcccattttctgagttctgattcattcgccattcttttaaagtctaagtagttgctgaaatgtatagaatctttgacaaaagccctattaataagtttaaaagtattaataccccttaaacaaagcataacattaaatatatacagaaataaagttgaaaagaacataagtaatcatttttaataactttttataataatcgtacaccataacaggaatccagttaatatattaaatgaacagacttcttacaaatgtaacatataaatatttttttagatttaattttaaaaatatctccacttttataaactctggaaatgatcctaatttgatcaaaactcttacacccaaacaactaggtaatactacttcccttcttatatcttccaagaattaactttaaataattattacttgtttatacatcattattatgtttaaattggattatataatttatagaatctcccattttatcttatttaggaaggattgcttttgatgtttctaaatgtgcaaacagtgatataagaatctgggatacattcgtacaaacctcccaaaacctgtttaattcattcgattataaggacactttgagggttttgagggggttaaatacattttatgactatttaaactatgatttacgcagagctgatgttccttttctggcaaatctcttggataaactgtatgattgtgtaagtttttgagtttaattctgttttcagtgcgaaagttacaactgtacagagctttctgaagttgccgaaataatttcaacatttattatttcaaatcaacttctgctagattctggtagttcacaaatagacccttggaatttgttatgtaaaatttcaatttcatttaaaataaggttggctgaagccactccttctgatatagttagactactggtttccttttccaaagttggatcttgcgataacgatctcttgggtaagttttattcatggataatatattcagaaacgttggttcaatattccataacaaacaagagttttacccttgaacaactaagaactatatgtgctagttgtgtaatactcaaccactaccatgtgaaactacttgacactctttgtgaatcatatattaatcaaggttcctttagaaaaattaataattaattagatgttggaattaatgaccttgctattttatcctttatctttagtaattcttcttatactaacaggaaagtcatccatcttttcgaaaaaaacttgaaaaatgatgttgggaatattgatttacctagcttttgtttaaatttacacaagattggggtaaaagttccagaggtacgagattaactaacttttatactattattacaggattacataaacttaatcaatgttgattcactaaaaactgacacattaattaaccttttggttttgttttccaaatttccttctaaacagatcccagttttgaataaattgaagagcataaatttgggggatatggaaaaaattcccaatgtaagaatgaatatgcttaactttcgtttaggttacagaggactacaagtttaagattttggaatatatagcaaatggatcatttactaagaccacccatgatctgtttaatctgtttatttctgaaggacttttcaattctgatgataccaggttgattccattgctaactaagttacctgtacactggatattggaaaattttgagaagattgattttaaaggagttaaaacagaaaacgtagatgattcaaccattattcaaacaggactaatttcatttttaaagttttgcaacgatggcttgacctgtagccctgaaactagtaagatgctaatggataagatacaaaatagtatcaatgaaatggaaagaattcacaacatttcacaccttgatacaatttttgatatgcttccggccgaagaacttgatgctactccacatatactaataaatcagataagaaaaacccttaatatagagatacaggtaactacttttacatatacttgtcattaagttattttttaaattaattaatcattacagactgaagtaattcaaggtaaattgaagattttcttaataaaaggttctcgcgattcattatttttaacgtttccggaagatttcttgagttcggatcatctggattttcaatgttcctggattccaccgggcaaggtacctcgtcttgaggtgttgtcaaaaatgtactatataactagtctaaattacaacattaccccaatctctcactatgcatggaataaaattttaaataaagagtcgaaattaaattatttacccaaattgacgttataacacaccacattcttacacactttcagtaaattctaaatgtacattctacctcttattatatatgtcagcttaattgtatgtgataaaaatgaaactgaaaaggattcgtcacaaatccacttaaacataggtattatatatactatgaaatatttttaatacttttagaattcccaaaggatgatgaatctaaactaaacttaagcactggtatgaggacaaattacacatattaacttaggaggaagtgaacaggataaggaggtgaaaacaccagtagtgataatctcacccaaggtattttattaataataaaatgttattttcagcctctggttgattacgaaaggttgtataaaaaaatgatggaacttaagccaaacacaacgggaaataacagattaggtaatgaagtaattatctattatttgatttagaaaatgaagtaatttatgatgagaaggttgcgtctaacgatcctgtatacaagagagagatgttgtacaaagtacttaattaaaaatgttaaatggattttatagctattaaaagacgtagaatctcggatagctttctacagagcagatgcaaacgaagtagaaatggttggaaaataactaactaaacatcataataatctatagttaatgtcttcaaatcatggattaagttaatctgaagtagtggtaactaccaaaactgtgaaaaccaactccccacacttaaatatacaccgttctcttatttaattttttgtacagaattttaagttaatttctctttatacacagtaaacagtcaaaattcacgccatttcattactctaaacactataatatcactcacaatatcatcacaatgactggcgaaaatgctgaagaaaataacaaacaaaagggcactaggcccccaaattctttaattgtaagtcctctccccaagatatttaattttatttatttcaatactaccattatatatgttcttgaggcttattttgttcatatttgaagcaggtttcactttcgaagaattcttccttctacgccaatatcggcattaaacttctcaacggggcgaatgaccatctctcctacgatgaaattttcgtaaccggtttgggaactgctattaaggtcgctattgagacggcaatgcttctctcaaaccgtaaagttggtatgttaccctctctaagctatgttatatatattttttgtaggtgttattaagaagattgagacttcttactacaattccgacacagtcaaaaaacacattccaaaaattaacatcattgttgctaaatcttagactgttttcgaatcttaatttgtttccattgaattagcaagatattcaatattttgttaattttttaaatggccatatttattctttttaatttgtgtatttatatttttaattatcgtgttttttgctccaccttgtgtattttatgcttttgtagatttattttacattctattacatattcacgaaattttattaaatttcacttccaaataaataatttatttcttgataaattaattcattacaatctcgcataggattgtaatttgtaatgatttacaatgtctcttgatcccgttaggaacttatctaaagaattaataaatttattagaaggaagctgcaaaagctgtaaaaaatgccttatcacatccgccagaggctattaaatttcacataaccacagggtacctgaaaactctcataaccttgacttttagagtttgtttagctgttttgttggctctagttctagttttatatcttttctttactacattcaaggtaatttttctaaaatattatttttctaaccttttcttagaacgatcccgtactatatactcacatgtcactgggagggaacgagtaagcttaattcgtactcataatttcccataggaaggagaaatactgattaagaccaccttaaatttgaattatttattttaatttatataaaaatgaataaaaatataaactttgagagacgaaatactcgcggaggtatttattttactgttaactattttactgataattcttttaaaccaattttagagcagagaaactctgcctttaaggcaaaaattgaatcaagtaggggtgatttttttgtttaaatttaattatagaagcttcgaggttaaagacttttcttgagttaggggctctaaggtgtgtatttgagcccagaaagccatatactccagttaacccctggaaagctccaccctctttacctcaaagaccactcactaactatgccacaccagccttttacctgagactccgtgaagatactcttttcttcatcttctattatctccccgttagtttactcaataactagttactcacccattttttacataattctccacggttaatgttggatttagaacacgatacagcagaaactggctgctaaggagttgaggagattatcgtggagattccataaaaagtatttggcgtggtttcagagggctgaggcgcccaccaaggttactgagacctttgaacaaggaacgttcgtatattttgacccggaaggttctattttacacctctaaactagttatactatagatttcacatagatgatggtattttagagtggaaaagggtgattaagcacgattttactttccattacaatttcctggactagttaggggagtattcccttttaatatattttaatatatttatttttacttggtattttaacgagttgtgagactcaaggcgcaaagttgcttttgatctgcacctgaatgcaaatgtgtactttcggatcatttttattgtatcatcagtggatgataagtatggtacaggatggaagttcttaataaaatttgttgtaactgttgtggtaaaaagaaggaagatagtgaagaaacagaagaggaaatcacggaatccgttttaatgatagaggatccatttgtaggggctaagttagtcaaaaaggagactgaaaaaaaggaacttccagaacccattgaggaggaaaagagggttttacaaactagaaagcatttaaagactaaaaagaagcaaattgagagaattagcataggaggagctgttgccgcccttccaccgcctccaattgaagaaattgaaggggaaataccgaaagcaaatgattcatacaacaatttaaagcttggaaatggagtatatttggggtactctcttgaaaataacgggtctctctacctcaaatacacaactgaaaagcccgactgcatggatggagttttggcttatataaggcctgaccgagaaattttaaagtaccactatgaaaataatgacgggaaacaattaatttcaaccaatgtcagagagtacatgaagagtaagttccaacatgatcgcaaaaaatattttgacgcctggcaagaattcttccaagtgcttaattcctacggaggaaatctttatattctctccgctttcgaactcagtccaccacccaggactaaaatagttttatttagcaacaacaatttaactgaaattaaaagttgtgaggaggtttgcataaaggaaaacgatcttttgggtgttttccccttctccctagattacgagaccaaattaaatgacaaattaacccgtaaagattttatcgatttgtgtgagaaatatggctttgttttccaactgatcaagtaacccatcacacatttcccacacttactttttataatcacaaaatgccaactttatgaatgttttgttcattttatacatttacttaaatgtttcttgctattcattaaggattcctagagatttattcagtacagacttatatttatctgcttataatggattatttattttttcatttttgaattcgaaaaatattttacaaacatcgcaaaatagttatagaacttttaaaaggtgagaatctttgtagaatttaaaatgtgtattagttttaatgttcccccgcccggttcaaggatagaatttgagttaaatcgcattaaaatagatcctctcaacaatagtccagtaagattcatctcattaaacctttcttagtgggaatatgaagttgcaattgttgattcttaccaaaagggtaaaaacatttcttaccgatttttaaaaaacgactggggatatttagatcacactgatgatccaaaccaaccttcaggtttccttttattctaaaccatttcttcaaatttatacatataactgttttatatatattgattaggtgttattgagggtggtcctcagaattatgagggtaagggtttacagttgaagggtggaaaggataggcaaagaactgagtatttgccatattatctggaccacggtgttcatttcagacagagggttgagatgggtcaaatttcctacgacattagtccaatcgcttgtcaagatatagccttctgtaaccatccacacaattactcattatataattaacttgtccatacaatgaaaatgtttagatgagaccgatttggatttggagagaaagcaatggggaagttggcatcaaccaaaggtaaataaacttggttatatgcgttctgcatttcgatcacacataagaattgaaaaccctactgaattagcgtatccttggattaaaagatttgatcttttcgaggtattcaactcactatacgctacacacttacttatttctttccatattatagtatttattgtgtaattaattgattagagagtacctttacatcgagaaagacctagcactatcatacctactcccgatcccgattgtcttttctcggctctggattgtttttccggatatattccagattttgatttacccacagttgagcaatgtatatcactactcacacattattactattgctacaatattcctttcaaccttcatgtgttggttaggtcttgtgaatcagaagaagttattgaaggagtggtcgaggcttgagaagttgtataacaagagtcctgatgtcaaattactacaagatattaaggacattaaggtatcatattagtcatctattcttatttttatcatttttttatagtttgctttgtttggaatacgtgatttttctgattctgaggatgaaatgcttaaaatcgtaaccaacattgctttatctcgtgctagaatgatgctacaacttcaagcgtatatcactatcatactatcaattttactatcaattatactatcaattatactattaattatactattgggactataataattctataattatataaataatcctattgaataatgtggtgttagaaatgattggaggaaagacccagagactatagaatattatataactaggatagaagagggtgaagtggatcccagcagtgactatcaaggccctgaaaagactgtagctttgaatctggtcaattacaaaccaatgagtaggaagtttaatgcccacaccagcattgaggagatggctgaaacttaccacaggctcattactgagaatcgcagagaaggtcgtgttcacacaagaactgaaattacaccctctgaagagaatacattctatcctctaagaaaacaacggtatactttatctactttaatgtactagtgtcgctctgccatttacacactcatatagttattcccagtatactatagttatttagttaactatacaacacccctatcgggatagtcacatacttctatctttaataactctgccgcatgtaattttaggagaaaatttccggctttagaggctgaatataggccgatttggactaatagaagttacgggtctgagtttggtgatgctttaagaacgtcacaggtaatgtaaattttccatattttttctcagaaaatacccgaggaagcgttaactgagttcggaagacctttgaagaagaggaaacgtaaattcaccaaggatgtttgtttaaacataacaccaattaattataggaacgaaagagtaatttcagagacgactattccacttttgaacatgaatataattactgatatacgaaattgatgatattcaaataattcatgctaatttttattctggtataatttaaagattttgtcaatttttatcataatttgagtcgttaataaaataacggttttggggttttggtttcgggtctagggttagtgggtcatttggcccaccttttggaaacgtcaactagttcagaggaccctgtagccacaagctttccactttcatcgaacattgagcctgagactgtgaagcgatctgcgtctttagacgtctcagggtcatgttcggttacggcaaccacagttgttcccacagatactggggacttgaagttaattgtaagtgactttgtggctgctagaggtaaaactacattacccattagtccaaacaaattgtcgaaaatggcgctaataactccgccatgccaaactcctgcatgaccacaggcgttgtttccaacgttcacaactgttaacaaatgcactttgctcttcctcgattgttcttttgagagcatcttcaacacttcttcccttttcagggtatcacactcctccattgccggacccgtgccgttctccatgacttctgaggaggtgttgatgaacattcttttagtaaacccttcatccctcatcaatagatcgttgaacaggtgaccatacttgttctgtgtgagcttcgaaaggctaaatagctcaagctctgaatatgacctatatttgaagtatttatgacaccactctggtatctttaccattattacataggaattttaatttttatattgaaaattatgtaaatgttgcggatttttttaaatatctcccctaaaggatttaatataactaattaagtcttggaaaagtttaaatttccaaaattaacttctcaaagagatcctaggagactataattagttctaaataaacttgaacacccaactttcaagacatcatggtgtgtaatataattcattttctttatatttaactaatatttaactaactttaataaatttacagcataatattgctgaaatctcagaatttgagcttaaattagatttttttcctggttttaaaatttctattgagattctatacatattttttaaatcttctttatttttatttattaactctatgtaatccttatttatcatagtttatctgtaaatctgattatttatttttttccactctcaccgagtttttctcctttaaagatctatgattctgctcctattattatcacaaaacttattaatttatctaaattttataatttttgataattaaattactataaaaataaattaattattattttttgcattttatttgtaacttggtacagtgtgtaacaatgagaatctctttactgtttatagtttgtttatttaagggtgttttgggccgtccaggttctatatatggtggaacaatgctgttatctcttttgaagccgttttggaactatagacgttatactggaatgtccttgaaccctccaatgtgcagggttgaaaagacttatccctacaaatccataaacattaccacttacgggttaatgaggagttatactgctgttttgactggttattcaatgaaagaaactaggactggtatgaaagccaacaagggtactttgtatggctggaattcaaaggttaagccccagcgcaacggtaagatcacctttcttttctactcagatttcaagatgccgaaacctgttaagggtgaaagtgcagagttctgctgtcacatatactctccaccacttaacattggtcctagtgtcaaagctgcacttggtactgaggctgacgacccgaaacgagacttcggctctgatgagaaactggaccaaattttaagaaaggaaagcaacactaaatctaaaaaaataactagttgttgttttctagttcacggataatattttataccattattacagagcttattatactctataaacatttaatatatattgtatatgcataatagtattagtatgtagtgtaacggtgttgtaaaagattaaggcattaatgaagcaatttgtacatttatttgagcagtctaaaaaaattattcaagatgttagaaacctctaatttatttttcaaatattcgaactctcgtgacattgttgctgtcaagtcatttgacaactcagtagcatcaatagacctaagccacgatatacagtaagtatattatacagtaattatattatacagtaagtatattatgcagtaattatatggtatcacctgtttaatggatcggtataacatttgtaggctttgtatctacgaatctttggtccatcaactgggaaataaaggcttggtgggaactctgttccagctcttgagacaggatcaaaaaactttctaagccctttgtaaaacttcggtactggaaatccattccattcatcaggattgtcttctgaattcttttcaactgtttcagacttaatatcatcccttgatgtagaaattacatcagttgtatgatcatcgctttctttaaaatgtttaggccccagtgtgagaatttgacttgggtcaggtgaatgttgtctatatatttgttcatgaggatctggaggattcggattgagtattggttcaggtggtttgagatcgtaaatgggttctggtggagttggaatatcatttggattactagtgggatagctagaggagcgaaatctcttaggcctgtcgtactgagattggcctctactgcgccggctaccttcaaaatcacgaccgctgtactcatccttactatatgaattataatctaataaaaaatacaaccatgtattacagtacaataatagtatagtaatactgtaacaacggtgttaaagtatataaaagtagttatgagtaattagtggaataattggagagatacgtttatagttgttatctttagtgaaagacttattatcatggtattcagggtatttatgccggtatcttcggtccctttggggactacgggaacgactccgataataactccctgacatattcttcaaatttaatcgttagattttttagaatcgttaaaacttatttgaattatcatgttttcaattaaaattatcgtattttcactttaaaatacttattcttaaaatattatcattatactcaaaacattattgataaatttccattaaaattactaaaattatattaaaataactatatccaaatcattattccaacattaattaaaaaagtttttgaggatatttaattcttgaatgtgttaatacactactggggatatttaactgttatttatagaatttaatttgttttttatcattttgttatgtactaattttgtcatttaattggtagatttttattttaagttatgactgataaggattcccttttatctgaaatcgcaaacttggattctcaacttaaacaatggtttcttttccgaagagtccaagctgaagtatctttcacactattttactttaatttaactattttactttaaattaactattttacccttaatttttctatttatgtgaattaacaatatgtttagagatcattatctataaagaagttgcttgatgacaacaacttcttgggattatctgccaataacaagaaagtccccgttactgatcaggttttatggcatgacattgttaaaggaaaggtaaattctcctttattccacttctttatcgtgatttagcctgaacttgaggacgagttatctcccaatgccagggaaatgaaagtactttaaacaacttttaaccctttttaataggctgataaatacttggatatcttcagacggtcctgtgattatgataatgaatgtagactaccaggttccaatctctccaactagtgttatccttaattaccaataatcttactacattatttgattaggttcaaattactttcgatgtttgcaagagaattttaagactacatcttctgagaggaatgatttgtgtttaaattcattcaacgcttttgaggagtgcaggaaaaagttacttgagactcagcaagggcttatggaacaggctttaaagaggcaggaggagcaagataacaaggctaaagtgagattactctaataatatgaatttttaggagctttttaaccgcagattacaacttttaaaaaggactaaatctagctaattttactataatataaagtacataaaacaaattatatcatgttggatcatctcatgaatgttcttggttctggaacatttccattcatttgggcgtcgctaaaatcaaatctcgggtgttctttctgaaatctttcaagcaataaccttttcttttcatctctatgtgcgaaatctgataaagctttatcacctttaaataaactctgccatacctctcccggtttcgccttggataaatgaacttcaagctccgaatctcctaacatccaaaacgactcctttattactattatcgagtacaactctccatacagttttctaacactttcttcaatatttgtgttattttgtgtgtttgtactattttctgaagtattactctgtgctttggtattatggttgttgagaatttgaatattgattgaatttgtgttgaatgttactgaaatgtcatttttattcgttttaggtgtgactttgacgtagagaattaagtcgtcgtacgactgttcccattcatactcagttccaccttcacctacacaattatttaacaataacagtccttaataccattaaatgacttatttctactagaatccatccagaaaattaattttattattttattattttacaccttttaaatatttttatctattttactaatttttaaaaattttacaatttccaactatataaattattataataaaaaatacaaattattataaaatttaaattaaaatccaattaatggaaaaattgggattatataagcccttgtcgttttagtcttccataatcttccagtgttaccaggttcccttcattatcctcacattcagcttctgagaataacttgaacgtcttcgcagcagcttcattgttcaacttcttatacaaatccaacgcctcttgtatattagttatctcctacacaataacattataactgaaataaccaactataattccgtgtaaattatgagtaaactgtgtacaaaacgtgtaagaaatgtgtacaaaatgtgtaagaaatgtgagaaaatactttgaagtgtggagtattgggaatgccgagaactttcattccgaaggagtgtctgaattcttgaaagtgattttcgaaagctttccgtccccagtatgaggaaccaccgcagatttcacacttgaattcctgtccaagcccgtgtaatttatataaccaaaatggaataggctttccatcccaacctaagggtaggtttaacgggttgtaaacaggtttttcatcctcttccacttcactttcagattccgcagcattagtctccagtgcgtctaaaatttcttgtgctagggtttgggaattttccaactccttaacagttcttgactcacgtttctgtacaaactcaactgttttctcaattgttgacgcaagcacgtcatggtacgactgaattacaaattccttaaacgctatcatcttatcatgatttctactatcacacgagagtaattccagttcgtcactactcttcttactatacgactccatcaatgatttgtatcgttttccatttttaaacgagtttaataaaccttcagagccgaataatttatccacgggtgctaagtacagtggcagtaactctgtgggatcacgccagtactgcagatttccagaattccacgcagactcaaatgactcttccatttgcttctttagcagttcgtgattactcagaggattctgacgcttaaaaaaatcctctaaatactctgacaacgctgttaaatattcggtgtaaggcgtgtttctatacttgcaatagcgtgggattagatgaaaatggtcaaatgaggtaatgtaagctacgtaatccacttccgtgaatggagtcatatgcgattccaacatgctttcatccgtcaatcccatgttacgaaggcgtaacacctaaacacataattatattaatagtgtggtatataactaaggaaatagagtccgggaagtactaaataactcatagataagatgtatgagcggtagcaagctccgtaacgcagtaactaacctccttctgtctatgtgtattaattctgaaatttcttaggggttgtaaattgatgaaggtgtggtaatgttcctgaaggttaagacaacggccgtaattctcatcaggactgaaaattgagtcaagattaatgcaatttaaagtccgtttaacagtttcctggacatttcgattctcaaccgttttgttataacgactgttttgcttataataatccttcacattctttattgtgctataataattcgaccatactcttgattcatccttttcatcctcctcttgacctaaaatacatattacacccatgaaatgatgattttataattatttataataatttaattaattattatgttaaaaattacctgcgagaaatttaatttctttttttctgagtccatcggtatctttatagagatcaatacattgttttgcgatattttgtgactcttgaactagagaatcaattgccagttcaatagttacaagtttaggcccagatgccttcttacgatcattcagtaaaatactcacaaccttctccaaatgttcaagttcctcatggcctgatcttatcaattctaaaataaacttcattattttagtaaatttattttattattttattttatagcatggggaacgaatcttttttccctaaatcacatcacccaaaacacatcaaaaaattaatatcaacattttattaattaatataattcacttttaactcactaatttactaaagtatacacaatgcataattatttttgttatcaagagttaacacattttccattaatttggtccgttgaattagtgtgaccactgagcgtagaaatcatttcctttggcgtcgactactacaaatgctggaaagtttttgactatgattttatgtactgcttccattccgagctgtggaaagtcaattacttccactgactcaatacaatcctctgcgattagggctgcaggaccacctacagagcccaaataaactccaccaaactttttacaagcgtttacaaatgaacgggaacggttccccttggccaacgttatcagtgatgctccgtgttccataagtttagaggcgtaactgtccatacgaccagccgttgttggaccaaatgaaccactcacatatccatccggtctctttgcaggccctaaacataacattacgggttaagcatactaaagaattcctagatattctaaggaacaagtgtctattgggagagtacgccgtagaaaataatgaataaagtggtattacaagctccgtaacgtaccagcgtaataaatggggaaatctttaatgtattgtggcaattgtccagttttatcaagttgttcaacaatcatcgcgtgagcaatatcacgagcaactattagaggaccgtttaatagtaatctggtcttgacagggaatttacgaacttgttccaataccttttccataccaattgataaatcaatcattatctctaccaaaacattaatacaatatataattaactattaaatatatataattgctattatataactgtcccctggggtacaactaagttatcagattataactaagttattaataggttataactaagtggttagtatattataactaagttagtggattataactaagtggttagtagggtttggcggtacctccagcatccggcgcatcaagtttaactgttggtagaaattgtgcaggatcatgttctagttcttccaaataaactaaactagtgttggaattaatttaacaaacccccagtaggatttatcttagccaatacttgcctatccgctgaacatgacactccaatccctacacagtattcacgctgcaatactattttaatactataatattgtataactgggaatatgtaaataagtgatatggaaatgtttagtaatgtgtaattgtgtacctatagggcaagaagcgccatgtcttggtaagcgtatgactctaacatcatgacaaaaatatttaccaccaaattgagctcctatcccaatctctctcgttttctaaacatcacacaaataaatatgggattgtatgtatataactagtgtggcaataattgtgtggcaaatgtgttaactcgtgacaacagagtaatgaatataatattgttacttgtagaatggtattttcgaaatttaaatccctgaatgcattaccgaaagtatttccttgagttggaagagtatcaagatatttgcaactggcaagttttacagttttcaatgtcatttcagacgataaaccccctaaaaaataatttaataggttaaaaaatgttaaatgggatacaaaatgttaaataggataaaaaatggtaaatgggatacaaaatgttaaataggataaaaaatgtaatgggataaaagttaaattagttgaaatttaccgatgacaattgctaaatgatatggtggacatgctgatgtaccaattgtctttatctgatccattagaaaatcaaccagcatcttctcattcaatactgactaacacaacgtaaggtgttaatatttaactaattcatgaaaaaataaattctaaaattgatcaggttacaaattactgaggaaaataattctaattactgctgcttcagtaacacatttgccaaaaaataattacaaaaataaaataaatatcaataggttgcaaaaataggagtaactggggtaataactaagtatgttatactttggtttgttggtataaaaaggttttattggcggagccgccacctttagctatgaaaaggaattcataatcagttccatcttgagaataaagctcaacttgagctggtaaattacacttggtattcacctcctcatacatactcaaagcagacatttgactatatctacacccaaatgtgctattaatttactattagttaagtttatctaaaatctggtgtaaattaggattaatgtgatggttggggtacctaaaattcttattcatgtaagagtcgtagacgcctttggtgatagagttagcgtcattttcactaaagataaagttaccacgtttcccaattacaattgcagttccagtatcctggcatcccggtaatactctaaacaacgtaattcactcagtaataataaatggataaattaatactttccagcggatatgcaagcgtttttgagtaactgcattgagacgaatcggtcattgtcacttgattccgggtcatcaaatacttttcttagctgtgccaaatgctctgttctgaggaaatgcataatttctgagaaggccagagaggttaaaccggtcagaacctccggaggaacatttaaaaactttacatttgttccatctgattttagtaaattcgactcagtcactcttaacaagttactcagatcgtccaggcgcttaaattttaccaaactttcacttccattttgagaagatttggggaaaacctccacgaacttactattaaattcgacgggtaaattattactagtactaaaatctcgattataacaatttaatggtgagttagaacttcggcatttacagttttggcaagggttttggaacattctcctacttttaattatttttgtactgagaatactgaaattcaattttttaccaaaatttatacttttaacataatttatattcctattaaattttaaaaaaattgccataatttatatttttatcataattttaaagaattcccatagttattgaggggaataattttcttattccactgtggtgttgttttttacacatttctacacatttcatttatttcatttaatatttaatattttagtttactttatttgtaatatcgcaaatgtacgattttttcctctaatttcactaaatttgttccataaaatactataaaaaatgtctattaaacaataaattgcataataaatgataaaataatgtaaaaaaaggtttgatgttgaattttaagagttttagaacgaattttgtatttgtttctgggattttactgttgttttgtttccaacagtttattctctactattctctctactacttaaaaaatgtccatcacgttctctacacacttattctcgatattccactaggtgtcaaaccattagtataatattacttacatacctatgtaatttagtgttagctcttaataacaagttatatattggggtaatgatgttgtagtgttatatttattgtttggtatagtggtgagatcatttgtatcatcggttcgttattcgatagtttggtgcatgtattcggttacgattgtcactaagatgattcttcttgcttttttagataattctcatcaatctttaaatactattgatggtcttaaaaatacttcaaatggtgcgttacggagcttgcacaaccggcactaattacttagttatttgttctccgtagttatcctcctggttactttatacaccctagttatatacgtctttgacaatgatttagatatgttattatcattttttggtttatatgtgactccgataatgtattctttgtttaacagtgcttcaaagagttctttatttcaggatcgaaatttagttactgttgatgaacttttacattctgaccttggactctccactactattgatttatgggatcttattctcatgttctcacatcttttaagtatctccataggagcttgcatatccctaatgagtttagttattcactactattcactcactcccttaactactcagttccatagttataatccctaccggggctacttagttatatattaactgtattatatgattttagaatattataaggttgagatgagtgtgggtgattcacttttgatgaatattcgtttatttgtagtgtttataatttttgtactggtaactattttcttattcgggcttgtaatccccgcagttgatggtgactacaaagctgaacataaaatcaaatcaaacctcttcaaccaaacctttaacttcttcatcaaattgttacagcacattaccaaaaaaagtggtaatagtaatacagctgacagtaaaaaacagatgaaaaatacttgggataaacaaggtaactactaccatatacccttactacttaaatacctataccatactcaatattgtactaatataataatattgtagataatgtggaatatgtgttgaaaagtgttgaggagataaattcagtggacatgtttacaatggcgaaatttacatttataattggatttttcctaattgacataccatttctcatttatcgcttatacattttagtaaagtataacgtcttctctttactactgtataagaattttatgttcttattcttgaggccttatcgccttaatatgagtcaacttgctgaacgtgatactactaaaggttatgaacatcttttattcactcaaccaattagtaattccatcaacacaattacacaccacactttatcacacagtttccaggacgatgaggatactgaggatttactcaagaaatataataaacctgacaaaaaagtacacaaatcagtttttacacctattctaagtcataaaacaatacataaaagagataaaattaaatctgatccaactcctttctctcacacagaacaaaccaataacacatcaggtccaaatgaaaaatctgggcttttcactagcaaatctaagctatttactggtaaatctaagctatttagtggtaaatccagattatttgctggtaaatccagattatttgctggtaaatcacgtttattcactgctaaatctaagttatttggtgaagaaaaatcatttaattttagagagaaggataggttaaatatgatgaggatgatgagtaggaccaagttagtacccataaaatcatatcctttttcattaattttacatcatttgcgtaaatttctgtttcctccacgtgaacctaaatcccactcaggtgatgagtatggttcaaatttccctcaatttatcggtgttaaacacttttggtgttacattgttgtactattcacaactatattaccaaggatattaatagttttcttatattcaacgcagaagattcgttccccaagagaaatcttacataacttacccgaatccaatgcggttgaaaagattttaatacatttgttaatagtatttccaatattaacatctgtttttacaattaaaacctgtggtatcactgattcaatttttttactcttgagagaattcaccggtttattcacactgtcaacttgtgtatgttgcctgaaattacttttacaaacttataaactctataaacatttatacattttattaatattcctcacgaaacctttgatcatactaatcgatttcgctattattctgatcaacactgtcaatcatcctcgtgactataacagtaagaacatgacattgtataaattattgaagagatccattgggggaataatgttaaacggtttaatgtgtaatactgatataatcctaatggtaaaatggcatgataaggtatttcattctcaatggtctgaatttattatctcaaccttatttaaagtcctttgttgttgcaatttaacttctaaagttggtatactaatgctaattttagacatactattctcactaatttattgtctaatgtcacaatctgctcgtgtcctaatgttacggaaatatgaagtgaattatatcgtaatgagagtcatgaacttggagaaaaacgaatgggatgatttggatagtcctgaaaattgcatcacacttgcagaagttgacaaatatattaatactcaaggtctcttatcttctccaggaactatcatgtatccatttctctaactgcatgtctacggttattgagctgttaaggtttaatttactataatagtattatgctatgtatattatgtgtagtagttggagtataaggatatagtactatggtataggtgtagtagtatagtggtacaggtatatacagtgtagtattagtatattaatcgagtatgtgtttacgatcgaatagattgagtatatctttgtggagttgtgttaattcatgttgatcacgtgagattgttccgtgttctctcctgactacaaagtatctgtcctcacagaagatgacaatttcattagtttcatcatctatcatcatcctcttgggataaggttcacctggtaaacgctcccaaacatcatcaactccattacctatgacattgaacttctccttaaagataaaactgcggagtaaactacctttactttcatacttgtcgatttccaaggtgccgccacactcacgacctacaagtgtgtacatagtctccaacttcctctcaattccatggtcaaacactaaggtaaacttgtttttcacaaggtcaaactggatatatttcggatacccagaccagaaacagtaataaaacttccaaattatctcatttttaaataaaatttggcttacatcaaagtttaacagtatttttaccaccaactcgttaattgttatctcacactctgaaatactatgcatacgattgttggagtcaagaagagataaaagtgtaatactgaacctttttttggtaatgttaacccagggtttattcttgccaaacttacaatataacaccggtaatccatccactaacgtagccttatgatcatactcctttcgtaccattttttacagtaattttattgttaattattggtgttaagttaggattggtagggctagtacattcttacacatgctaattgagttggtggtttacaggttaatacacctcaataacaccttataaacactaattaactgtttattaacagtaataaacagtattaagagtatttaactagtatatagtattataattgtactaatatccatatacataacgcctagtatattaagtatagtacacacagtattaacgtgctaattgacttaatgcaacaaataatccctaaactaacaattgtgtaacagataaattaagtaaaattaacagcaaattaatatttatttaagtctttttaaagcatgtttaaggagtgcattacgggaatccgagggtttgattacatatcgatgagtgattttgcgatagctctttgtaagtccatatcagcattttcatcgataacattgatagggtctgaggggccagataacagacactccttataactgtcatcaggttttctaacctcttccatcgagtcaaattctctctgtaacttcttcgccaactccagtgatgcttcatcatccatcaattccgcatctctctccctctttcccattattccatccacttcatctaatccactcactctatccaagtcatctctaaacaggtcattcgcatccaactcatccatatatttttgatcatttatattatttgacaggaatttgttattattttcagcattattgttaatattattgcccgggttattaatgttatgcttggatgaggtggatttatctgaggattgctgggaatctagtccaactcgttttaaatacgcttctctatggcgtctgcgatactcggccatgtcatccatctttccgaattttattattttaaatttatacaaatgacgatcttacacaagtttgaattactcacgaatctgacaaaatatttacaaatccataaaattatctgtaaatgaaacaaaatattgtaaataaattggaaaacacaattttaataaattataaaaatatttatcaaaaatatttaaaatttattggaaagtggaaaatgggatccaatcaccgatactcctaatcttatacaatttttaaaatttatcaacacaaccaaatattcactaatataatcaaattttcactaatataatcaaatatttagtaaaatattgaaaaaatcgtcccggaggctttaaaaatatttgaaaaatttgggagaaattgttagttgaaattggtatagacttcttgtttccgtttcctgtggtttggtgagttcctgttatatttaagcggaaaggcttcagggtcatcttctaacgtataaccacaccgggcaatatctgttgatctctcagcctccgttaccacactcgtcttcacatccacaatactctacaatacaattaataccgcataaataactataaattatggtaactaagatgataaattaatgtgcaaataacaataaattaggttaaataacactaaattagggtaactaggatgataaattagctgttatttgttacattgggtgagataacgatatccatgacaaagggtacgacgttgatttcacgttgatgtgtaactcccagtgccctgaggcatgcgcaaacctccaaatgaaacgttgaactctctggtatataatcctccttacacgttatctacacattaattagtataattataatataactattagtgtagtgttacatagtttttattgcagatatcgtcgagtagttttttacatttttggctcagtagtgatttcggcaaaattccaaactcaaatgcatgtctcaataacaaatgcctcctaaaatggaacatatattaagttaattgttaagattaatgaataaatgcggttaactagtgtgacaatacctttgaatagtcatcatgtatgttctcgatcttagtttattaatggtgaaactaacatgtcttaaccataccggtaaaaaatccactaatgataccacactctataatacattattcacactgttaactatcactacggatccagtagtaataaccaattagtaaatagctaagtaaggatggaaataactggggaaataggtgtaaaggaggactaaatagagtcccctaggggataactaagaggttgagtaaatgggtaactaaagaaaaagtggttagtacaagcaccgtaacggggaaaacatacaggaaaattgatgacaacaatgggtatccagctaatagagcagatatcataagattctttaactttatatgataacaatttccataaaggatcaatattctcaattttataatccaaatcaaatatacttatcactccaccacccaccataccaacaactatcctatccatcactccattcacattactcaaactatcaaatctcctattcaatatacccactcccctatccattatactcactcccctatccattatactcactctactcaaagtatccactcttttattaatattatcaacgtgttgtagtagtgtattaacgaattgtgacgtgattggatgattttggtgtctgactttagacaaagagcgtatgataatatttttattctccagtgaaaaactttcaaatttatcagaaaaactgttacatactactgaatagaaattataatcctctaaaccagcatttgagtacccatccactatcatcaccacatcctcctcatccaactcatccacgcagttaatatcaacagtggaactaatagtactggtaatctcagcactaccaggagtagtgtccacagtagttaagggtccggtggataagggtccggtggttgtattatgcgtgtgactagtaactgagttaccacaattgactaactcagttccattagtactatgagtgatgagattaataatatgtttggaaagggtatacatccaaaattcatcgagtgatttggagtaaccaagtgctagagcaagattagaaagtactttaggcttaattcggtgtagtctgtcacatacgtaatcactaaatactcttatctcattagtacccaatcctccaattctacccttaaataccaatatactcattatcttctccaatatcccactatccaactcttctacaatttgtaatgagtcatccaatgtcctagtttcagagttatccaatatactagtgtcagtgatgttaggtgggttagtgatgttaggtgggttagtgatactagagttaactgtggattcccaattttttagcaaggattcgacaattcggaataaattatcctcattatccattctgtaatttaatatcatacttgtatgaattatatccagcagcatgttcaatttggtactcagtcccaccacagtatcagctgtgtcactcggactatcactgctgaaactcggtgtatcactagtatccgtattactaatccaaggccatagagtagtgttaatattatattgttgatggatagcattgatggaattattgagtagatttgataggaatgagagaattctactactcccagtcgaaccacacacataaatcacacttgacaaatcagaatatgataacaaatttggcaccctaccaagtgtgtcaactattattctcgaggtcttacgcatatacgggtatacaaatattgtatattctccaacattctccacactatttacactatttacagtattatttacactatttacactattattagtattaacagtagtaacagtatttacagtgctattagtagcagcagaatcggtagtattttcctcaatactatccagagaattagtaaaatgacttgaatgaagagaaatattgagaaatgataaatatttattatatcctaaccaaatatcattgtctcctcttagtccatacttatctcctctaacactcctaactgagttaacattggataaggtaccatttactgagttaccattggttgtgttaccatttactgagttaccattggctgaattacaattgacagtgttggttggaaaatattcgtaaatgagtttattgttatgagtggatttatggaatttaatggaattttgaaggaagtcatcagggctggagagtccataatgtttcgcggcaagtttaaggaataaatcatcagtgaagtatttggaacatttcatattattcctacgattgttccaaagtgataaaatccgattaacctcagaaaccacttcattacacaaatttttatagtccaatcccaaactaattttattcattttttacattactttcatctatttaatatattattggcattttttaacaatattaataatttatttagggcaatttttaacccatacaacaaatataatacaaacaaatataatacaaactaatataatacaatttaatgaatattgtttaggttgaaaaatattaatagaatttgaaatattgttggattccactattatacatacgcccaaccaaaatttacacattactgtgtattcttcttttaattttagcattaccccagttattatattttttgaaaccttttaacatttatttattatttgtaattaaaatttggtaaatgtgttattgaaggggaagatttgattgagggaggaaaaatttaatttcctaacccgatcaacttttgacttttttaaaattttagtgttttttgtaattattttctataaatttgatcgaataataatttaagatttgtctggtttatggttggtggtgtgttgttgtaattttgacatgtgtttattgtcttggagtattttcatattattttgcataattgtatcagttccaagcccacctcgttcataaattcttttagtatattttttcatggtattatcattttcttgagtattatttgggttataacccattcccattaacattgccattccgaagttttctaccggtactttatcatattgcgatttgtccacccttaacattttccccaaattatccactctatcatccactgcaacatctgttttattattattcaatagtatcggctttatattatcatttttcaacactttcgtattaaataattcttcgtacaaatttttatccacttctccatcatccacaatattcacactatccacaatattcacactatccaccgtattattactattatccgtagtatcactagtgttctcagtggtatcaccagttgtattatgagtgttagtatcttcagatgtattggagttaaagaggttcaggccatattttaactcattattagtggtggagttggcttgattaacaggtttaattaatttatttttacagggaattacgtgattaatattttcttcagcaggtttataatctttttggctgaattctttaattatttccttttttacttcttccttctcctccttctcaaacactccaaatcctcctcctaacggattaatagtactgttattattagtattagtagtagagttaggagtggatatggtaaatttcattataaaaatattaatgaattaatttacaatcgggcaattctttccttatcttattactttttataatttttatattgtttttagttttttaataattttatattttttaatattttgtgatttattttcacaatttttattcttatcaattgataattttattattaatttttcattttttaaactaaacttgttttaatttagcaaattctaatctagcaacttttaactttgtaaattttaaaaattttggaaaatctggaaagtttggactttttatgaaaatgttaggggattgtgatggtatttttgagggatgagtcggtgttggagaatgagttgattcggcgtgtttcaggtaaacttcgtcaattagcttctctagagtttgctgttattttccacaaacaccgaaatagactcgattccacccgcttcttcggtgatgaaatcgaatacatcatcgtcaaccttgatcatcagcataaattaccacaactactcccaatctatcctcatatacaatcactcatacaacaatataacactaattccagtaccacaaggaaccacgcacccgattccacagtactgaatactccagggaatactgataccaataccctagttaacgacacagtggataacacaccgtatagcacagaggatggcgcagatgtggactgggagaagtgtatatttacaccggaatatgcatcgtatatggtagaatcaataccagataaaccttatgaattagagtctaactatataaacactatcagagctagtattaatgagcgcagaagaagattatctgtgatattaagattattaggattccccaatgctaaagtaactactttaactaatttcctcaggcttggttgtgaggactgcgtttacttgggtgatgagaagtttagacaacctttaaccggcgagctggagtataaacttagtgactttttccccaacatttgtatcacgcccttctcaagattcactgaaatcacacataacattaaacttaaacacccgacaaacatacgaattcccaagttcaacaatacacgtaataattttacttaacccagataattattttatacataccgttaactgtagtaataattgtttaggcgtggttaatcacaagaataccactacgcgtggtattaatgtgaaaatagctgacagatgggatttggaactgtttggcttattatcagaaaaacagcgtaaattagcttatgaattgtcaaataacagtgcaaatttgttcacacagcacagtcaccagagtgagaaaagttccgtaaattttactaatcttgaactaattaaaaaggttaatttatccaccgatacggaaaatcttaatgatacgattagtaatagctcaacgtccaccagtgataccaacaccagtaccccaaatactcttcacaccctaaccaccgatgagatgagagtttataattacattaccgaacaagtgtttatgtacgatccacaacttcacacacaaacttacaatcccaatttcaacacttttaacacttttaacacttttaacactacctttaatagtactgttaatagtattgtaaattctagtgataccaccagtgtgaatactcccgtcaacagcaccaatcccatgattaataatgtggataatgtggatggtactgaggttggtggtgtggagtcaggtgtgtgtgccgtgcgacctaacaccgtaacggagatacatatggacactgtgggatttggtatgggaatggcctgtttacaggtaacatttggctgtctggatatctctgaggcgcgttacttacatgatcagttaataccattgacacctattttcctatcactttcctcggcaactgttgcctttagaggtgagttatcgaatattgataaccgttggcccgtgttagtccaggcaatggatgatcttgatgaccaagatcgaagttatatactcaagggcagatacaacaccacgtcactttatatccaaaactgcccacttttgatgcagaattatgaatatttgaatgatattcaagtggcgtctgatgctacggcgtatgttaacttggtgaaattgggcgttgatcccatcttgtcacggtatatttcacacaatttagtctaccagccgctggtagtttatcaagaagatttagatcaagttgactgtaccgctaccgacatgcactaccaagtcttccacgccactaattggaactccatacgattcaatcatcccaaactcacccacacagtactcacaagtgatagtccaaataacccagtacacacaagtaatgctccaaataacccagtacacactggtaatagttcaaataacccagtacacactgatactagttcaaatattggtgtgagtgtggatgaagagttaccgtggagaatagagtttagaccgatggatatacaaatgactgatgaggaaaatgtgatgtttataagtgtcttatcatatgttgtaagggtgttattacggctaagactaagtttatacatgccaatttcactggtggattctaatactgatttggcctgcactattgaatcctgccacaaacaactcttttacttcccaaatcacatacacaattcaggtaatttcactctcagttgtgtaattagactagcagcctagtttggtttactctagatagttattagaggactttctcactatattcttaagtattactaatcataagtattactaaacatacgtattactaaacacaagtattcctagaatggtgtaaaaatatttgtagaggtggtgaatttggaggaggttggcgtgggaaggtatagtttgcatgagattttatttggcaaaattggtttatttcgaatagtgttggactatttggagtttgagtactctaaatctgaggtttcgcccgaattttactcacaaatgaaggtgtattttaaccattttgagctgctaactttgggtaaaacgcccacaaacgctaccaaacagagaagattcatacacgcccacccctcataccaacacgatggaatcattcacaatgatatcctctatgatctcatcaaccacctaacctgtcaataatattttaattaccattttacatttttttaatttttataatttttttaatttttataatttcaagaaaattgtaataatttaaaaatcttcaagattattttaaaaaatatctgataatttaaaagaatatctgataatttaaaagaatatctgataatttgtaaaatttaataacaatttatagaattttataataatttgtaaagtttaataataatttgtaaaaatgtcagagaggaaggtgttgaataagtatataccaccggattttgacccggatgctttattgcgtcataagaaggtgttaaaggcggatttatttggcaagaaggaaagtccattggcactgaagttgaaatacggaaattctaagctaatgaacattcggatgatgtttccatttacatttcgctgtgagagttgccgtgatttcacttatgttggtacaaaattcaattcacgtgtccagagacttgataatgatacttatttgggcattgtaaagtggcgtttcttcggcaaatgcccaaactgtaaacatgaaatcgtgttcaaaactgatcctaaaaatggtgactacaccctggaatctggcgggaccagaacctacgacgcaaatagagacgccaaactggccactgaagaattagataaactacaagtaacacactactcacttattagcatagtattactgtatctaaccccttccgaatatgtttaactcctgactaactatttgtaaacttaattatgtagactgactaactatttgtaaacttaattatgtagactgaataactatttgtaaacttaattatgtatactgaataactatgtgtaaacttaataattatgtagactgaataactatgtgtaaatatgtttaggatgagaaaaatgagttgatgggaacgacggagaagatgagtgagaaggcagaccatgcatttgctgaatatgaggaattggaacgtttaacggctttgaaacgtcgtgcgggaaggatgcgagaacgtgaatccctagcagagcaaacactacaatcactacagagtaaaaaactagaatttgaacaagtaaatgaagatgaaattaatttattcaaacaacaacaaaatgaaatttttaaccaatatctacaacccgaactagttgacactgatgatcaatatgatagtgctgggaatgaggatacttgtgttaattctgtggacactgtgaatactgtggacactgtgaatactgtagaaaatgtgaagagtgggttaagagtggagataaagagtaaagagaagaatagtttaatatcaaatgattatgacagtgatgccgattaaatctttgtactatacataataaacacttattatatactatacataatattactctatattatatactatacataatattactctatattatatactatacataatattactctatattatatactatacataatattactctatattatatactatacatatagtagagtcttattctgggtagtttgggttctatagcttcagggtctttgggcatcctaggtatcaaccatgtacccaaaaatcctcttctaaaatattaatattttataacatatatttcatataatacaaaattatgttaatactgtcatttttgtaatgatttgttgtaatagtcatatataagtctccatattcctttgtatcttgtgaatttaaataatcttttttcataaacgccaaatcgagtatgtttgcggtacaacgaaatactgggtccctcaagattataaactatttttctaggaaaagcctttttattttgacgtttccagacagttgaatcacctaatcttatctcgttacatttaacaggtttaagaatatacgcaattgatgaaataccagtaatttcaattctgtacttgttttcactcaactccacactattaccatttttgtcctctttataaaattttaaatccttcggtaagtaaagaaaccaggtgaaataattttgaaatccaaatctaactaatgaagctacatatgaatcatatctgatctcaactctgccaaagcgatggtaacagcatatagattttggatattctttcccagatttgtgttcccagacgatatagtcatcaaaccgaacctcggtacatttaatataatctcttaaaatgtatgattttttatcatagtctggtgtaatcacttcgtaatctccatcatccagttgtaccttattaccatgcctattttgtttatacattttcaacaaatcaaccctaatttttatatccctataaactccattaggaaaactgattgtcatgttactatttatgtatgaaaagtatataccggttgggaaaatatcggatttataataatcataccgccagtagaccttgtcatcatatattatcttgtataacttcttattaaagacaatacgataataatgtgttgtagattcaactttatagtcatcaggattgagctctataccatttttagtataaagttttaacttatcaatattaggtctaatagactcgaaatattcaatatgtttctgaagtttccaatcaaactccacacggcacttgtattctgtaacatacttactgggatcgtctgtatcaagaatcactttatcacggtaaactatcttcccaaacacaaaaccattattagctttaaaataatggtaattgggcatacaaaatgttttatatttgtttgtcgacatcatcgtattaatatctaaagttataacctcaggtgacactgatttatcctctacattttcattacttggttcagaattctcattaagttggttcactgattcaacttcagctcttggtcgtttgttgcttggtccattcagatcaagaggttcatcagttccatctacgaacttaatagttacacaacctgaaatcaggtcgaaatttagagagataagatgtccgtggtgagcattatctttggtttgtttccaaatttccttctcttcatgcgagatgacatggcaaaacctattgaaaatgactttaaaattagtcttctcaagatcgtaataatagtcatgatctaatatatccatatctctaagactattagaagcttcgcaattttctaatgtaaaacaagcatgccatatatgattgtaaccctcttgtttatacaatttcagcttactcaaattgatttcagtattaatacgctcccacgtgttatcttttagtttacggaatagtatcaaatttccattgaatggtattatcaagatgtatttctcatcaccttcataaaccaatacaaatccggtaaattcagatgtacatgtagcctcccaaacaactgtatcatcttctaatactttgttaaatacatatgtataatatgatgaatactccttgaacttgtttctattaaaataattaaaatcatccttggattcttttatatttaagtttaaggtgaacaacggacggtcttttgaatagaagcctgagaaagcactatctattgacgataaattcacttcattcatttcgctcataattaattttaattcaactggtggatctaaaccttcaatatttggggtattagatctttaaatagatcagatcctatgtttcatacagatccagcagatctaaatgtaataatgatattgatataccagtgaaattgtataaaatacaaaattttgttcaaatctcaaaataaaccttacatcaactaaattatacgatacagtgcattaacttaatataatacatagtactctatacatattagtccagatactagtgctaggtacagcatggatatagtaaaccctagtttcataccctatgtaacatacaatttactagtcacaaaactctcaaagttaatattatctcattaaatactgtgaactattaaagagtagggatattattttaatctgctgcaacgttcatattgttcatctaccagctcatatgctggtaaataaccatcaccgatcctcaaatactcattacataccgtgtcatccctactacaatcacttattcacaattaactatatccacacacaattaactattttaactgtgtaaaattaactatatccataagaattaactataactatgtagaaaggtatttgagtgaataagtggtataatagttggaatattaccttccgatggaagtatagccttgattatagagagtgcaataatcgagttgaaaaaagagtaaaaagttccaaatgtcatgataagaccagttgagcagcggattaattctgaggaatttaaactcgtctgaattgccgggttcaatctcgcttaaactgctgcaaccctcatccaccctacgcgttccgagaataaaacataaattctcattcctaaaactcttcacaccttcgttccaaccactctccaccattctacacataattaacactattttaactatgcgattatttggtcaaatttatcagaatttaattagaaaaaacacaaatttggaaataattgcaaaagttgatcgggttacgaaatactgaggaaaatttcctccatttctgctgcagtaaccactcatttaccaaaaaataattgtaaataataaataaatgacaaaaaggttgcaaaatggtaataaatggggtaaggtaaatagagtagagtggtatacgtcatgttgatgtgtagttgtttggtgatgtaatgtatgaattgtgtgatttcggtgaattctttaaagttcggatctttaaagtagacgacttgtaattctacaggtgttaaaacgaacgaattattaccatgaggctgagtgtgtggagaatatttatgcgatgctagtctataaatgtgtaatgccactaaactatcttttccgccgttaaatgatacgtaaacatttctgaatccataatccctacaacagataattaaaataaaaattgatacgcgagggaattgtatattaattgtatggaattgttaattaacagtgaaaaagcgttgatattaaaatttttaagcttaattttaggatttgtgtgaccaggtgtaaacaaaggcttaaaattactattcagtattttgccatagttatttaactcagtttctacgtattttacattcgtacaataaaatctagaatacactccgtaaaatatttttttaaataaattcataaaaatgtaattttaacaatttaaataacttaagcaaatttattaatctatatacggaataattagaaaattagagtaaaagtggtgctgatctaattaatgattatttatttttttcttctaatttgtctttgttcctttccaaaataatttatacataatcgcaagatgacttcttataatgaccgacttaccgttttagatgatgaactcaaacaactccaggtacagtcacccaaacttatccactcatttcacataattatacttaattattatattttttatattattttattaatttggttaataatttttcaagggtatgaccgattgccaaatggtaactgatgatatggataccgataaccacgaagatgtcgataaaagatcaatctacgtcggaaatgtacttccttccactcttaaacttattcccattatttctcattattccaattattcaacttaattaacaattattcaacttaattaacaattattcaacttaattaacaattattcaacttaattaacaataatttaactaatttaacaatttttaacgacaatttgtgatattaaaagtatgtttatggataggttgactattcgacgaagcctcaggagcttcaggagttttttaagtcttctggtcaaataaacagaatcacaatcatggttgataaatacaccggccatcccaaagggtatttctcattttatttactgagttaactcgtgataacatttggattagatatgcttatgttgaattttctaatgaagatgccgttaataacgccataatgctcaatgaatcactttttaaagaacgtattatcaaagtactttttactccgctatacaaattacacagttttacatactagttatactctacaagtttaatcattaggtaatacctaagcggaagaatataccaggatttaatcgtagaagacctacttctagatccagatctagaccctatcgctcttacaccaggtacaccactctactatataactagtattatatacttgagatttagtaattataggccgactccccgattttagtagttatcacattctacttaactactatagctatactatactatagctactatactatagctactatgctatatggttatgaatgtgtttagaggtggtaggtattattcgtatcgtggattccaccgtgattactccaaaccatattaaatttttttccaactttttaccatttcatcattatttttatcctatttttatcatatattaatatatattaatattatttattgttgatattgtttattgtgtcgttgtgtggtaatggaagtttgggtgaagtgaatttacacacaccccattggtatataaataattttgtatttgggttgagattaatttattagttatatttttacgttgtttctcccagtgtcacgtttctaaccaattcactctcacgttagattccactccagtagacacttaattccacattctcacatttttccattacttccaccggcaactcagttgataatattattaaaagtgttgtctggtgttgatgtgactgtctgcgctgacacatttggattaatcttggcataaaatttccgaggattccactggaaatttagtcacaagttggcaattattgttaaaaatattttcatcccaaattaagaaattattttgtaataattttagaaaaactttgaaaaaaattttgtctagcacagattggagcaaatgagtgctacatgcgctttgctatagaattccatctcaacaaaacagaaatcgaggaattatacaatctttcacattttcacaaaatatcaaatttttaaaaaatcaaaatttcacaaatttccaaaattttaactctgccaacccctaaaattcttaactcttaactctcttaaatctgtttaaactgtttaaactgttgaaattgtcttaaaattgttgatattgttgaagaaagttgaaaaaagttgaaagagttgtggacgtgtagaattgtttggaatgtgtagaatagtttggaatgtgtggagttgtgtaggtttgatgtagtgatttactgattaatgtgactaattgtatgattagaggctgagaacaataccagctctaataccactaaccgtcctcacgatcacacacttatcgtgacaaactttactctcaatattctctctgttaactcttactgtcaatattcttattctgttaactcttaacactctcaataatcttactgttaaatctgaaaacttattactgtgaaaaaatgttaaagaggataagaggtggtaacactactattactactgctaagtcactggacgtaaccgcagttaaccagctaaacaccgaacccctcgtaaggaatagaaaaagaaccagagccactcaaacccatacccacaccaatactcacacctctctaaactctctcaatagtgtaaactctaccaacactagtaacattgtcaatagtgtaaactctctcaatagtgtaaactcagtcggtagtgtgagactgggtaaaagtttgaaacccatccccaacaccaaaactactcttaatactcttaacactggtaaaattaacactaacactgttaacactggtaaaattaacactaatactcttaacactggtaaaattaacactaatactcttaacactgttaacactggcgttggtaaggagggcgaggtattgagtaggataaatagtataataagtaagagtaggtttaagaggctgtgtcgggaatacgttggcgacttctggtccagggttgactccaacgaaattccaatccttccacttttgcacattgccaattcctgtagtactgggggcactgtggagactgtagagaatactgtagaaggtactgtaggagctgtggaagctagtgcagagaatgtggaagcaggtaccagcggacctagcgccgtaacggagatacaaaacatatcaataataacaatgagtgtatcggattattcgtataagtcaacgccgtttggtgatgtgtattactcgcccaggttccaagatgacaagtacatttaccgctacgtaatactgaccaagggggtaagaaatgaagcgtatcgactgctaaagcagtcgaaatcgtatctcctcacagaacaccaaattatccgcgaactctgcattgacctgtcgccaggctgggaacactttatgctctttaaaaacagactcgatgaattaattctacgacgcaaactttaatatcttcacatctttacgtaattgttaattgtagttttattctattgtagcgttggtagtgttttgtttggagaggattttgtcaaattattgaaaaattcctttaaatccttaaaaaaatttattttattttatttttattggattcttgtaaatttagtaaattttgtaattttttcgaaaattccgaaaacctgtaaattaaccctcagatctccaaattagcccttagatctgtaaattccttataaactactgtaaacatatgttaacttgagtaaatgagtaaactgtgtgtatattctgatgattcggagtgtggaagagctgttgcggatcttgacaacaggcctggatagaaaattatttatttttaatttggaatctctcgatatttttaagcaactaaggtttgaagagtttatttatcgcaatgttactccaaaatgcactaacaccgcattcctcatactcaaccacttctacaactccagtaactcacacactacactatacctaatactatatagtcaatattatagtatagtatatagttaagtagctccctctaggggtatatagtaaattagctccctctcggggtatatagttaattagctccctctcccctatatagttaattagctccctctcccctatatagttaattagctccctctcggggtacatagttaagttgctccctctaggggtatatagttaatagtatagtacagtataagagtatagtacagttatatggtaaacggtatgttactgtaggtacggtagtatttggattaagtggtgaggtgagtgactttataaaggatttaaactattgtaagcttggtggaattaagttaattcgtcgttttacgggtggcggtactgtgttaattgatgataatattatcacctcgagtatcattgccacgcattcctttgctcctaacctgaaccccaataacatctcacactgggccttcaaattctatcaatcaaccaatctcttcaccaaccatttccacaccgtcgacggtgatttttcctaccacaaccttcttaacactaactccactgtcaactctggtaactccggtgacaccaacgttgatacggagaaccccgtagaatggtgtaaggtcggtggaaatgcgcaggcgtatggtaaatattcgtttgtacatcatacgtcgtttatatggcgagtatcaccggagatagagaagatacttttggtaccaaaaaaggcgccaaagtacagaaataacagaggacacacacagttcctacagtcagtcaccaaagtcctaaaggtctcagataaacatcagttcatacaactgctcatacaatctttatccagcctttactcaaccactttaatactttatcgtgggctggacagtgtcaacgttaaaagtaatgtcagacacttagacgaagaagtaataaataattgtatcaataattttaaatcacacactaattatattcacttctattcttacccattcttacacactatttatagtattttacacactttttacacatttttacacacatttacacattttttacacactatttatagtattttacacattaagttgctgggtgtttggtagaaattaccaaagttcttgaatgagttggttgtgttttatttgttcgaagtttgttatataatttttgaggattagtttaatttcattgcccattcttctgctactaagaaataattaatttatgttccttacccgcaaatgcaaattataccaccacgtgataccaactcaccaatctccctcaaattactctttaccaactcttgcacatacctacgatcctaaaattatcattcatctcaatcaaatagattacaaagttgatcgggttatcttttacagaggaaagtatcctccacattgctgcagtaaccacttatttaccaattttaattagtaaataataaataaataccaataggttgcaaaatagataaacaatggggatgtgtaaataagtgtaaaaactgtgtaagaatacgttttctcttgagagcgcgtatgagatgtggaagttgttgagattttgtagtttttcaagttcttcgtggtataggatgtgattaatcgttctgaaccccaggaatattattactttactttccaatcccttctcctccactgatttatatatcggtcttattccagacattcctacagataaccgaattagttgattaatatattttactccctagtcagttcttgctgcagtaaccacccatttaccaaatttaattagtaaataataaataaataccaaaaggttgcaaattggtaaataatggggataggtaattaaaggataaatagagtaaataactggatatcacaagggtcaaaaagagagtcctagagactaaatatctcatgagtaagctctgtgattggtagcaagcaccgtaacggaatacctgtcccattggcaatgagtagtaaatcacgattgagattaatattagagaaaacagagtctcgaatgaagaatttgacagtatccccgggctttaggtcacataaataattgctgcagttgcccttgtaaattctgcgtttgtacaattcagtccttggcacctcgttaaataaccccaaacgcctcacatttgtcttgtaaaatgttctcaacgaatgtaaattatactccactcgcttcactattatctttatctcattctaaaatatttattgtgtaaaatttgggtaattgtgtaaataatcaagtatctgggtaacaaatcaagagaaaattagtcccatttctgctgctcataactactattaaccacttaactactattaactaattaactactattaactaattaactactattaactaattaactactattaactaattaactactattaactacttaactactattaactaattaactactattaactaattaactactattaactaattaactactattaactaattaaccactattaaccacataaccacttaaccactaaactactattaactacataactctgtaagaatacgttaggggtggatgcgatggtgtatgctttgggaatttgtttggggatgagttgtaggaaccctgcgagattgaacttggtgttggggaagaaaagggtaataaactcgttgaacgtgagtttaacttcttcacgaatgtgtttcatgagtttagagttgttaatcacctgttcgacacgttcaatttcagctttatccctgataaacgtgcagaaatttaatatctcctcatccgctggtaaactcgttaaatcacaatataactccaacacgtcctacacaatagtttactaatttatagttaacatatttaaggaaaaccgcagggataaataacagaataaacagtgatatgagggtataaataacagaataaacagtgatatggagggtataaataacagtaaataagctcttggataagtaacagtaaattaacccaaataacagtaaattaacccaagtaacagtaaattaagctgagaaaactactaggtttgcaagcaccgtaacgcaccttaacagttgctgggatggggaacggcggtgagaaggataatttctgattaacattaccatatcttggaacaaatgtgattactttatccaaatctacgaataatgcaatgaataattttaccatcttccgtcaattctaatctttccatataccaacggacctatcatatatacacaaaggaatatatccaattccttaactatatataatagtatacagtagactgagtagataccacatgtgatgggttacgataaagaacgtagagagtgtcggaaatgttataattctccttgaaatctatggtctacaaaatataattattaagttgattacaatttcatgtgtggattgatcggaattgggaattaaattgtgattttgtaacactttagcatctgtgcattggtactgctgcttacaaattatgtcatttggtaccacttcaaacttgttagacacacttatattctcataccgaagctccaaaccacctatgaacagagttaaagtggtttaataactaattagtgagttacacagatgtctccaggatttgtagtagggcggttcggtattatcttgtgaaatgttaatgtgatagatatttgaaagtgcagtcaaaagctggtttagccatttctcaaactccttaccaacaccattcaactcatcacacaaatatctacaacgattaacattatacaactattagatctaattttaggaaaaaataattgtaaattcggtgttttaaaaataaaatgccaaagttgatcgggttacgagaaataaattttctcacccagtcatttctgctgctgtaactacacatttcggaaaaaacaattgcaaaataaaaataaaataccaaaaaggttgcaaattagtaaataatggggataggtaaaaatgtgtaaaaactgtgtaatgattacattggggtgaattcgtgtgctttgagttgtgtgagtgtggcttgtaatactttagcggcctcattaaagtattcatagtcactactcccaagaccgaaaatacaataattcaaccgtaactcagtgccattcctctccaactttctcaactaaaataatattacaacattgtcgatacgattttctgaaagtttttggtattgtcggggaataatccgtcgtaatgcgttgagactagaaatataaacaccgactcctccacatagaaatcggactcctcaaaatcctatacacattaataacaaaattaactatatagttaagatatatagttaagtagctccctcttggggtatataaagtagctccctctaggggtatataaagtagctccctcttggggtatataaattagctccctctaggggtatagttaagggtatagctaaggaattaaagtctagaaaggaataaataaggagctaaggagggagaaaacagggtaaaaataacataactaagtggaagcaagcaccgtaacggaatacctctaaattaattggttcatgtgaaatattaaattgtgatagtttctcggctaaaagtcttgaaaaacgttcagaagtgccagtttgactcgcgtaatatattctacacctcttataccttttctcatcaacctttaactcaatccccccttcccctaattaaattattatcatattattattattaatattattgttaaattggttaattattgagtgaaaaatgagtgaaaaaacgggtaaaaaagttactgggagaattggtgtgattattattattttgttgagtttggaggttatagtattttctattgtataaataatgtgcaattacagttgagattccaagccctaaattcaataccacactcgatatctcactcaacatcaactctatctcacataatttacaaccttacataatttataatatcttacactatttacaatattttacaaaataaataataatttacaagataattaaatgtgaagataaaattatttttaataattgtaaaatttggagtttgtagtgatttctcatttcactaccattagtactgtagttatatccttgatagtggagtgagtaatacggatcccctatgaaaaccaaagtcaagcgggaattggcccggatagtagtgaggcgggggaccgccacggggagacactctctactcatccacactcacacaacacccacactatcaaaataatatactaaaaattgtattatcccagatcgtattcgagttctccgacgttgatgttgtctaggtctttgaagttgttggctgagagttgttcgaatgttggttcgacgaggtctgaggagttcgtgactctatgttgcagaatgtacattttatacagttctgcgtgtttcctggccatgattggcgtggcgtagcgcttagcgtagaatgatttcgagtgcttggtgccctccttggtcttccactgtgccatgaaacgctgctgtctcttgtcgtaactcacactcgcagagaccacgtggctactgattttaatatcctttgacaagtctgtacccaccgacgcgtatgggatgtcatatctcctcttacgtaccctgcgggcagggtctctgtcacccctggaactgccacccgcgtagtagtcggggtccttgtacttgatcgttctctttttagtcaccggcggaaagtccatgtaattgtacttgttctccatgtatgaatatttattctccatgtacgaatacttgtccatattcctataatcatccctaacacatccactaccatatccacttccataccctctgtcataggaatctctaccataccccctgtcataaaatcctaacctctcatctttataattaaacctctcatccttgtaattgaatctctcatctttgtaaagtctgtcatccttgtagagtctgtcatccttgtaaaatctctcatctttgtagtaattattgagtctgtcatctttgtagagtctgtcgtagtagagtttgtccttgtcgtagtaggctgagagtttggtgaagtctacggaggacaatttactgaaatcgtagggcgtgagtttgttaaagtcgtaggggttaaacttgttcaagtccaccgaggactgacggggcctggacctacgagaatgactcggttgcacagtcttatacagcgataataaacagttgttacactccaaattgtcagactggtaaccatacctctttctacatcatttttataatatttagttagtaaatagttggaatagtctagtggaatatacatatctactatgaactccaaagtcaagcgggaattggcccggatagtagtgaggcgggggactgccaaagggagctaattatacataactaattaaccatataactaattaactatataaataagtagtaaatagctaaataactagggactctggaggggaaagagtccctagaatgggtaaataagaagccctgggacaaaaagagtcccatcggggtggctatctgtggaaaataataataaataactctgtagaaataactaagtggatgcaagcaccgcaacggacttattagttttattgtttaatcttctattgagaacggagaggataatcttttcgatgtcttgatttttcccaaagtagcgttcgtcgacttcttcaacctcctcgggctcctcctcgctcagcactgagaagatattctcgtccaaaattccgtaatccaaagtatcctcattaatattattttccgcagcaccggtgggatcagccgcgagtgagaaattctcctcaaacgtgttattcgtagtgatgtcaacttcactgctgttcacatccgtgtcactacttattaatcgagtgttattgttactactgttactcgtcaggtcctcctccgttacggcgataggtccgccaacaccagcttccacattctccacactctccacagtgtttacactgtttacagtattcccagtgtttacactattaacaccattaacagtattaacagtattaacactattaacactattaagggtattaagagtgtttggacctggcgccgtaacggaaacttgtatggactgtgtgatatcatcgttgtagatatcaagttcatcgaccaggtcattcgtatctaacccgctggataacgtgtaattatcttcactagacattttcatgtacccaggacactcgtccatcgttacggtgcttgctaccacgccactctccacactctccacagtgtttacactgtttacagtattcccagtgtttacagtatcccccgttcccactgcatctccagttcgcacatcactaacaaaattctgtacctcagtgcctaaaacattgtttactctactagtataactatagtatagtaatagtatagtaatagtatagtaatagtatagtaatagtatagtaatagtatagtaatagtatagtattatagttatatagtaaagtagctccctctaggggtatatatttaagtatagtaagatagctccctcttggggtacagtaaattagctccctctaggggtatctagtaatttagctccctctaggggtatatatttaagtatagtaatgttatagtaatgttatactaatagtataataatagtatagtgataatgaggtgactaccggttgtgaggttgactgtgttgatgatcctgtttggtgactgttcgagttcttcgcagtagttgcatttgtttttaaaaatgttcccgcagagtttgcagactttgtccttcttgaggtcgaggtatccgtttaaactgtccagcacgctgactgtgccgttggtgtccagcttactcagtgtgtacctcagaatattatcataggtcatagagttaaacggctgattatatctcacacattcaagcctgtaaataattttaaagtagtcaacgtcttccactttggtccagagtaacttcgggttcccgaaggcgaaccgggcgtaaattgggccgaaaatctcctcatagcgttggaggaccaggagtgaacttgtgctggaaatcaagtcaaagtggaacacgtagtcgttgccgtttggcggcacgccccaaggcctgcaaaccgccctcaccaagtccaaagtattcaacaacttcatctgcaataaaaagaaatacacatcagacactataccactcaacttcccaccattcacactgttcacactgtccacactatttatggtgtttacactatttacactgtttacagtgttagagtttacagagttagtcccagagtttacagtatttacactatttacagtgttagagttcccagagtttacactattaagagagttagagtcccctgattgagtattggtgtccataggattgggaatggagatgggcatagtgtgagaattgagggagtcaaaactaacactagacatcctaaaatttacgtatttatactctccaatttaataccctctcaatattttaaatttgttaacttattaacttattttattaacttattttattattttactaacttattttattattttactaacttattttaacttattttattaacttatttcataataatttcctttgaaaacctctttttgagcgaaaaatttgtattttagcccgtttaaggcatgaaaataattttacggttgtaaattggggaattgagtcagcgaattgagatttcgagttttacattaaaagttaaagagcgaacaacttaggcattggattaaattaataaataaaagaatcaggaacggaatcaaatgatccaccaagagtcaattatcagaattcactcgaaaaattcagaaatcaatcgattcaaataaattaattcagaataaatcaattgattcaaaaaattaattaactcaaaaaaatcaattgattatgaaaaaattaggaaaaaattgaaaatattaaatattatctgaagataaaaattaaatggtggattgtgaataaaatccggaatgttcaacacattaaaaatctaaaaataaaattttacttttgaaaatagttagtaaaaatgataaaaggaataaggagagataatataaattttttatattagtgagaagtttgtgtggcggttatccaatgtgtgtattatccgtgtgtaaagacattattacctcagtctctacacattaaatttcccatactctcacacagtcagcatgattttaatgagttatttcgggtaattttggtaatttggataaaatttgaggcaacggaatgtttaagaatcttgtacagattctgataaaataatgtcaaaacgggaaaaaatcaagttttcgggtcaaatttacgaaaatttgacaagtgctaaaatttgtcacctcacaccaaaagaagaatctaaccattttcccaaacaattatttaacaaatttattcatttatttatttaattatttatttaattatttatttaattatttatttaattatttatttaattatttatttaatattacttgaggttaaaaatttttttaagaatattttttatagttgaaaatttattatttattttatgtaatttttattttatctattataacagcacaattgtgcacctactcatctctgtctactacacattctctatctaacaacgttccacaatactctacaatactctaaaatattctacaatattctactaaataatctgcgaaatgtgtgaattagtgtaaaactgtgttgatagaatgttggatgtggaacagtgtgagagaagtgatcggctactgcgagaatttagtcctgagaatgtactttacagaggcgaagcctttaaaggcggacccgcaggacaactactacacgtacccccccttacatcctaactaattctaacttaccctaacttaccttatatttactccttaacttctaactaaccctttaataccttagtttactcttacttacgatagtttaagctgagtaataatttagggaataattgacttgtatgactctgacggccaaagtataaaggaaccgataaatgatttaatcgcctctttaactctagacaatcaatcactacaatcaaatgttaacctaatcaaacaacccaatggatccatacaagttaatcattactcctaattatataccccaacagggagctacttaactacataagggagagggagcttctttactatatatctagaatacctaaaattatatacccctaaagggagctactttaatatactcttagctatactatactattacttactatttagttatatagttaatactactgggaactgtgtgagaaggctcgaggaccagtcaatggagtagactggtccgagagcgaaatttttcacttttgctgctgttttttctgcgcaactttcaacccagattactctccaatttactcacaattcctatgtaaatagtgtgaataatgggttaggtaaggtatatggcgaggaaaagtggtaattggacattggcggttactgacaccacaaaccagcacattcgaggtaaccacacagttcactaattacccttagttacccttaattaccgttagttaccactaattattgttggttaagttaatattagtgagtaattcttaggttcaccgtttagtgttgaaattgtgcctgcaaatacctcaccgaattattccactctacactgtaatccacaatactattaatccttctacagacattaaacaacacaattacatctccaactacaaagtattctcattccctacttagtcataccgttgacatagttactcatttactcgtttactcagttatagttgatacagttggcacagttgttgtaggagtttgtggtgcaattgagggatatattcagtaacaattctctaaggtgttaacagtgtaataatatgttatagtggtactgagggacttagtgtgtatatcacaggttctggcaaagtcattaacgtgctggatctacataacggcacagtatctgatatactaactttattattagtacaggatcatttgttatatcaacgaatcacatcctctcagtcttctcaacggtatacacactactactgagttattgttgtagtaaagttgtttggtaaggatgtggtgaactcaccctttaatcttactactctttatcatcccaaaacacaagtaatatttaccataccaattattatatagttatatacttagtaatagttaggtaaatagctccctttggcagtcccccacctcactactatccgggccaatttacgcttgacattggttttcacccggattatacatataccactaggctattctaactcaatatagtattaatattatactaaactgtggtatattagttaggtaactggatagttagtgggtaggtcccccaccctactactatccgggccaatccccgcttgactttgcctttcatatgggatgtgtattacacactgtactattctcaatatttactaactaaatattacaataatattgataatgttatagagagagaacacaccggtggacatactgagggactgcaaactggtgttacaagagaataaaagaataaatacccagttacacgcgcaacttgcgtcataccaaagggtaacacacacctgagtaaaccatttgtagatgagagatgaggttgagatatcatatacagcggcaagattaggtgtggtgcattctataccggcggcttttactattactgagcccgatcccttggaacgggagaaacgtgccaaattagtccaacaatacaatgaaatgaatgcggaaattagtgaaatacaggaaaaactaacaaatttacaagaggaaaagagggaattattcgattacctacacaacaaatataaaaattcaaaagactattataaagaaattgttgatgaatataatttcatcattggcaacgtcgtcaaactcaataaacttttgaagtatcccgttacggtgcttggtcacactgcaccagttatttattagttagccaccccaatgggactctttttgtccccaggggtacttatatagcattagtatttgttattcactactcacttatgtagttaatcagttatatagttaattagctccccttggcagtcccccgccttactactatccgggccaattcccgcttgactttggagttcacccggaatgtgtattattcactgtactatttactcccatattactaataatatttacactgtggaaactgttaactgtgtgttttaggactgaccagtggatgaggagacacatgacagacgctgatgtgatgaaaaaatttaatgaaatggcaaaagttaaccaatctttaaaattactccaggaatcaaataacactattaacgccagtgaaaccaccgtcgacgctggtagtgttaacagtaaaaatgtgttagaggaaggaacacattcaacggtgccagataagccaaacacattagcattttggctcgttgaaggcaaattcagaacctaacccccaaaaatccaatactccaaaaatttcacaacctttcccaccttttccacttttcaataattttttttattttattatttatttattatttatttattattattattaattttattttatttttagtatttgtgtatgtggtgtgatgtgcaagaataaaaattatttttttcattttatatagtaaattatattttcatttcccaatttgttagttaaaattagtgtataattttgttaatttaatgtgttgtaattgtgttaatgtgttataatcgtgttaatgtgttgaaagatgagctcaatgtcatataatgcctcgggagtgttatacgactccgactccgaagccgtagactacaacggactctcctacgatgatcttctcaactcaaatttcaacgatccaacgtatcttttcacactctccacacctttacacattttcacacatttctacacattcttacacatattttaattatttaattgatgaattataaaattgtgtgtagttttgttgagagttatttgtgtcgttatattgggaagggtccgggaatggagcgtgtgctgttgataattccgtcggtgtcgcccagggtcatttcgaaccatgacgacgcgctcaggctcatggttaaggttcttgatgaacatcttgatcggaaatactcactcgtcatatgtcaaacatgcgtctcctggacagattcaaattcctactatttcgttaatcaatgttcgttacggtgtcaggtccaacggcaccagttatttacccttatttactcttatttactcttatttactctctctaggactctctttagccccgaagggactactacttatcccttaattacacatccccactaattatctattttgcaaccttattgatatttattttacaatttacaattaaaatttggtaaatgtgttgttgaagcagcaatagttactattattttcctcggtaaatcgtaacccgatcaacttttgcatttatttccaaaatcgtgaaatttacaattatttttcactaattatgaccaatcttagtttactacagttaatacccctggtgtattatgtttctgtagggtacgagatgttacctcgttataagaagaaaaacctggtaaaagtatatttaatccactcgttaatggtgacgaagacctttttaaccctttcaaacccgtttaaaagttcgaaaacgctggacaaagttgaggttttcgatactctttcggacgtcctccagaagcttgagcttaataagaagaacatgttacgtaacttcccctacgttgttcaaagagctgaggagttaaatttaggcatccaaaggccaatttcgccctttggaacggatttgtggattctctcagccaggctgggaaacaagtttaaagagttccaccacatcccgacagtgctcagctttgtcctgcagtacttggaatctaaagaatatgtcatcactcagaatttactacacctgcaactggaatccaataagctctacgacctggtgagtaaagtagaagacatgggcgagaattatgaatttctatcagtggaagaagttgtcgtggtgtttcgactaatcttgggcacgcaaaggtgtggcctattcgggccagaaacacacacaaaattcaccgcaatcgttgtgaaccagggcaccttcgaggaagcccaggaggagctaaggaaacaagttaaacagctgagaagtgaaatgttcgaatgcatcttgtgtataattaagacactaagagtcgtggtgaggaatagttcaaggaacggcatgaacctcaaactcgtctccaaagccatggcacccttcttcttcagacccatgaaacccgatgtctacatttataaactgcttccagtacgttacggagcttgtactcagagtttagttatttattacagagttagccaccccaatgggactccttttgcccctcagtcactagttcctcatatctatactagttacctatttacgcatccccactatttactaatttgcaacctattggtactttatttttattttacaattaaaatttggtaaatgtgttgttgaagcagcagaaatgacatcggagaaaatttatttctcctaacccgatcaacttttgcattttatttttttacccattttttacaattatttttacctcaaattgatcatatttacattactatagtctactatagttaatagtataaacgtataatggtgtagatgtacgaggggttattatcgagtatgatagagaagcctggattatactttgacaaggagcctcaggccaagttagtcaacaaagagccaacagaatcaacaagtgttaacaccagggaaacttctagagaacgagaacgaagcaaagaacgcaaagaaaaagaacactcacgtagcaaacgagaggataattccaaggataacaaatcccgggaacacaactccagagatgaaacttctagggataggtctagagaggatagcaaggacaatagattgagggaggatagtaaggagaggagagagagagggagcagattagtagaagataaaagcccacgaaatgattccatcactctctccgattaaattattttattttatataatttttatatatattaatttttgtattttttgtataatttttatataattttgtataataatttaatatttttatgaagaggcgtcgtttggacaatttccaaatcatttgtaactggctcaaatatgaaacttttctactaaaccaactactctccagagtaaatcaatttatttattaatcaattttattccattagttaatcaaatttattctattaattaaattaaattatgtaatttggggttaaaaattttttagaataaatcaattcacaggggaaatgcgtttatggcctgggctctctcctcccaaagattcctcaaaaaattcaatacacacctacacaaaattaacaacacacatcgtaacaactcacatcttaacaacactaacactcctaagaatacctctgtgaatactgagaacactactgtaaatactgagaatactgggaaaaagagtgtgttgagtgagggggatttggggtattattattataagtcattggattcggttgtgaggacgtgtgtggagttgtcgaggttacacaagcaccggtactttgcgccctttacagtgacactcatggccatcttctccagactcttactacttctcatgaacctcaacaactatataattaattaatctcctaacccttacacaatttttatccgttgtttatcagtcgtttagcagttatttagggataatttacgttattttagaggtattttagaggtattttagaggtattttagaggtattttagaggtattttagaggtattttagaggttatttagaggtaatttggagtattttaagcatattttagggccaattttacatattttaagcttattttaagcttattttggctctattttggtcttatttaagcatattttatggtattttagaggcaatttaggagaattttagggcttatttaaacttattttgaggttatttctaggaaatttagtcttttttagagtattttggtcatattctggcattatttaagcattattttggggttatttctaggaaatttagtctttttttagagtactttaagcatattttagagctaattttacatgtttaaagcatattttagctttattttgacattatttaggcttggattgggtgtatattacgtgggctatactgaggtatcagggtttactgcactcttaactgtgtatatcaacactttaatatagttttctcggctattccttggtattatagtaaggggtactaatacccttaactacatacatataccttaactatatacttaactatataataatactatgtacatgtgtatacgtggtattaagatttatttgagtatatgcaaaagcaagtttttggtgttttccggttgaagatgctgagtagttttttgtggaattgtgtgaattcatgttgatcacgtgagattgttccgtgttctctcctgactacaaagtatctatcctcgcagaagatgacaatttcgccagtttcctggtctactaacatcatgtcaggtaacggttcgcctggtaaatgtttccaaatgagttcgtctccgtagtttacaacttcaggcttccctttaaatacaaacaaaccaaattcctcctcaagacgtttaagctccttttcctctaaatgcttacgatctgtgaacttagtatccaactttctcacaatcccatggtcaaacacaagtaaaaacagattacacaagaggtcaaacaggatgtatttcggataccctgaccagaacccacgataaaaactccaaaccacctcatttttaaataaaatttggcttacatcaaagtttaacagtatttttaccaccaactcgttaattgttacttcacactctgaaattgagtgtgtaacgttatccttgtctttgaaggataaatctgtaatattgaaccttgtggaagtaatgttaacccagggtttattcttgccaaacttacaatataacaccggtaatccatccactaacgtagccttatgctcatactcctttcttaccattttagatactaatttactgtatattgtaataagttagtaaggattggtagggctagtacattcttacacatgcacactgggtgcactgttcagaatttaacttaactcaatatcacgctgtaaagtatattcaagtgattattaacagtattaaacagtattaagagtgttaagtaatgtaatagaatgtaccctagtatactcttactactatacacatacaattatacatatgtatattatatattatatatagtacagtaatattagtagtgtatatagttagtattatagtatagtcttaggtattaagtattaggtataataagtatagtacagtagtataggtattaggtatattaactagtagtttgggagtagattgagggtttagggtctatttatcctacgtgtaaagtatacaattaagagtaccagggtttagagtatatagtataggtaagtatagtaaattagctccctataggggtatagtaatctagctccctctaggggtatatagttgtggatatatagttaaattagctccctctaggggtatacattaagatagctccctctaggggtatatagttgagatatgtaaaaaagtatattgaggattaaagttcgattgctgggtgtagtagcattgactttgttaacttgttcttggcttctactccgcacaacaactccaccaacttcaacgaaaactccaacgccgttccaggcccttgcgaagttactacacatacattactatgtactacagtagttataagtgaataaagtcctagggtactgaataacataactaaggtactaagtgagtaaataactaagttagtgggagtaagctaagtgagttgtacaagccccgtaacggataccacaattatgtgagacgtgaactctgccctttccgacaagtggtaatttactttcaaatcctgggaaagccactgctgaggtcttatcatcaagtaacccgcagtcaccaaacaccaacgccggactcgcacaaatcgccgcatataatctgccactactcttctgatccttcaacatacgcaccaatcccacactattcgcacagttcgtctgaacaatcacgttctcaatatatttactaataactacgtaaactatgtaagaatgtgtaagtgtgtgtaaataagacacgaaagtgtgtaagaatgtataaataagacacgaaaatgtgtaagaatgtgtaaagatgtgtcaatatgagtaagaatgagtaagaatgagtaagaagttgttacggctccaacgagtcctccgggtactgcgatgagatcaaaggtcttttgtgtgagatttgtgactttatcatcggcggtgagtttcgtgccgtgagccaggactaagttcagcgagtcactaacagaggccacaaccaccgaaactccagcacgcctcaacacatccaccaacgtcaccagttcaatatcctccgttccatcaccctaataatattatgtaatatttaactatatagttggagtaatagaataatttagtgagagttaccgcgggaacgagcgcggataaggttgttttattcatgaagagtggccgagtgttaattttaaaggaatttgtaaaattaaccgaaatccagaaaattataattttatacattgtcggggcacagattctacacaaattctacaccattcacacaataaaataaaataatataattaaatattgtaaaataaaaataataaaatattataaaatataaattgttggtgaaagaattatttgggggatttgaatttattggtgtaaaagtgtttaacggtgtaggcgaatgggattcccaagactacttgtaacacaaataccaacacattccacctactcaacaccaactcatcatacgcatatctacaccattattacacaatttatcgtcacaagtatataatttgtcatcatgagtatataatttgttatcatgagtatacactagctgaagacaagtgataaaaattcaccaaatttagacaaaatcagtattctagtagctccctctaggggtatataaagtagctccctttaggggtatactaatttagctccctctaggggtacattaagatagctccctctaggggtatatagttaattaaccaagtatacgcttgttaataaaatgaataaatagctgaaaagaattttattacgttgagagtatggggaaaagaaagatgtaggatgcgatgaggtagtagagttgcttgggagtttgtttgaatttgaggtacatttgaacgaggcagctgttgcagagaaatcccacgacgctcaagttactattgaggcaaaagtaaaaaaaccttaaagagtattcggagcttttaataagcttccaaattattaccaaagagttacccaaactattgaccaacgaccaggataatccaacacaagtcaccctatggtccgatttcgcactcatactcgtcctacacatttttacactaactgtagtaaactaaatatgatcaaatttgggaaaaaataattgtaaaaaatgggattttggaaataaatgccaaaattgatcgggttacgaaataccgaggaaattttcctcaattattgctgcagtaacaacacattcggtaaaaaataattgcaaaaataaaataaataccaaaaaggttgcaaaaactgtaattagtggggatacgtaaataagtaacaaagtaaatagagaactagtaaccaggggacaaagagagagccattggggtggctatctatgtagctaaataactggcgccgttggacctgacaccgtaaaggatactttgaagtgagagcgaatttcataccaacgagtgaaacggtatccagcaacgccaagactaatttctacacaatgagtaaaaattatgaaaatacttctgggagtaggaatttggctaaaagttcaggaatccccgtggccattagtaatatctaaaaagatgaaattatgttaaaaatactttgcaaatgagagagagaagtgaataaaacatcgttgaccgaaatatacgcccattattaaaattctccttcctaatcacattgtcacactttttaccatataactaatttaactaagggaaatagtgtagatagggtaaaaattacagtccgaaggtggtatgtaggaggaagtatggaaaggtaagcatggcaaatcctgaaatgatttgtaaaactctcatctccaaccaaataattataattaaataattttaattaaatgttaattaaatgttaatcatgtttttgtttacatttagtgattatttgtcgtaattgggttccatcagccttctgtagtgttaatctaattattaccctttccaatttacacattaatttttttattcccccaaattctcatttttcatatttttttcaagaatatttaataattttaatatttgaataatttgttaatatttaataattttgattttgatgttgtttaaaatttggatcttgatatttaaaatttggatcttgaaattattaattttttaacccttagatcttgaaattattcattttttaacccttagatcttgaaattattcactaccagatcttctacaataataactcacaattattaacaataattaacgataattaacaataattaacgataattaacaataattggcaataattaacattgagtaccgatggttaggccgatttctagggtttatttgagccgtttgcacttgggaatgactgggaaaatcgaccagagcgggctgaaaacgctgttaaagaggctgaagagtgaggataaatacttatccgaggggttaattctagactccaacgacggatttgtctccgtcatcaagtgcgatcctccctctggatacatcaccacccatacctttgtcttcgtcgaacaatccgtcaaaccactcaaacaattacatctactcctcatacccaacaattctaacactgtaaactccacaaataactatgtcatctccacaaattataacactgtaaactctgtcaacactgtaaactctgtcaataataacacagtaaactctgtaaataatagcacagtgagcggtgtaaaaaatatgttaggctgtgatgagaagttgatggaggaattggtgaattctggacattactacgggccgttctacatcacacaactcaaccaaaccaccaatcacaccctcaatcccatcttcccacctcctaccaacacttctaatcctaacactccaaatggtgtaaaccctataaacaatgtggaaaatgtggaagatgtggtggaggttgcgaggactgattatggtttctataagccggagcctcacattttaacggaggaggttgagtttttctacttatacgacgagaacgggaataacataatcacagagtgcagtggcagaggctacagcttcttcgaacagctcttcaattcgtatcttaaacggctactggaagttcccaggattttctactacgggaataaacacatcatcggcgatcttaactttctaatatcctcactcgaacccagaaataaaccaggctacatcagccccaatactgtaataatttgtcatattaagttattagttaagtaaataagtaattagttaactcgtaattgagtgataaagttgatattgtgtaggagatatactttggcgtggacccgtttgagtgttttgatggagtggtggtgagtccgttgggtgacacgttaccggagacttacagttacgacctgttgaaggaatatgtcaggccttacttcaacttgaacccgttcaaactattcaggctcggtgataattttaccttttcaggcgtacagtttaggatcacagacacttttaaacactccaaactactgcccaaatgccccaaatacgccagaattaaccagaatactaagattactattggaggtgcgttgcggtgcttgtactcacagagttatttattacttaatacaccccaatgggactctttttgtcccttgtttactagttcctcatatctatactagttacctatttacgcatccccactatttacacaatttgcaacctttttggtatttatttacaatttacaattgttttttccgaaataagtggttgaagcagcaatagttacaattattttcctcggtaaatcgtaacccgatcaacttttgcatttatttccaaaatcccatttttagcaattatttttccttaaaatgacataattattactgtaacaatgtgtagaatgtgttgtgccgaaggtgatggacttattgcctgcggagcaggttaacattttacgactcagtgcaccctgctatagagaaaaactactctcacaattcgccgataatctcgatcccatctcactcgaacgtatccaatcaatcaatctcaataataactcactcagcggtgacacaagtgacacagttgtccgactggatagtcttagcggtgacggcggtagcgttagcaccactcccaatcactcctcacacactacttctaacactactattaagcctgtgactactgttaacagtgtgaatattgagactacaattaacggtgtgagcagattgatgagtgagtctgaggtgtgtagtgtgtgttatgagttgttgttatcgagtgagaataacacgatgggtctcctgtgcggccacgtcttccacaaaaactgcgtcttccgatggctcagaaataagaattcttgcccttactgcaggacacccatcaacacacatttcccacattatccaccaagtatacagagtacccagggtaatagtacacagagtagaaatgttgtggagagtactaatgttgtggagggtatggatattgtggagagtacggattatgacacgtcgggaacgataacgagggtagatacgagtgattcggacgaggtggttgatgtattttcagctactgtggctggtgatccgactcacgtagcgcaagtcaccagagatcccagaggcagactccgtttcacactttcccccactgatcctaacactactcctactcccgacacatacaccgacaatacacatttcaaccactgtaacacttttgacaatgttgatatagttgacagagttgacagagtagatagagttgacagtgttggttcaacggttgatagtgttggtgaggaatcgagtgtaatggatgataacatgacagttacaacttatagcagcagagcccattccatacagtctaataatactaccgattctcctaacactatggaatgcgctaatactacagaatgtgctaatgctgtagattatagtaatactaatactatggaatgtgctaatactatggaatttggtaatactacatattctgctaatgctgtatattatagtaatactacggattctcctattactgtaaatactgctaatactgtaaatactgctaatactgtaaatactggtaataccgtaaaatctggtaatactatggaatttgttaatactatggaatttggtaatactgtaaatactgctaacactgtaaatgctccttatactatggaatttgctaatactatggagtctaataatactctaaatactgctaatactatggaatttgctaatactatacagtgtaatactactacagataacgctactactgctaaaagtgtacagtctaataacagtgtaaacactgttagtgctgtagagttaaataatgtggctggatctagaggttatgtgtctggatctagaggttatgtgtctggatctagaggtgatgtgtctggagattcagattccgagactgaacctgtcaccgtaacggatcgtggtccggtaaatatacccgacccaggtatggaggatttaatggaagtgattgccgagatcaataagcgcatgaaaaggggtgaatttggagtaacaaagccacccaaagaagcattcacactctatcaaaaatatctcaaggcccaatacctcacacataaatacatgaaataatattataccactctcttaactatttcttaactatacaatcttaactatataaccttagctatatacccctagagggagctaatttaactatataccccgagagggagctactttactatacttaactaataccccaagaggaagctaatttaagtacatagggagagggagccatcttactgtatacccctagagggagctacttaactatataggggagagggagctactttactatataaatatagaatactatgtaaagtgtatgatattaaggtagtttgtatatgacttcgaatgtctttttggtgttgttggtgatgtaagagattggtttatcgtttggtccattgactaatacgaattctccataggctatttcgtcataattctcatcttcaccaaataaatgcgctgttcttagtccatctttgataacacgaaaggttctgaacttctccagtggtctcccaggcactacccagttattatagtcatagcctctcatattcaaatcctcagtgcctttctccaattttaagctaattttattagtcttaatgttgaagaggagttcgagtgattttccagtaactttactgatacagtaggaccataccagcttgtcacccagcttaatatgataacatatgaagctgaagaatactttgaaaatgaacccttttaactctgatttacaatcttttaccttggttaagttgagatcataatcgtagagttccaaattgtcaagctgatgtctcgtgtgtgtaatgttctcccaagcaccttcagggtttgttctatagtagagaacaggcttaccattgataagttcagctttgaattggccatccgactccatattcagtagtattaagttaatattgagtgattaggaggggtgcacagggagttggtagggccagtacattcttaccaaaacatataaaatactggtttaatgtgttgattaagctgtaaataacttgtaaatatgattactatacttatataaagtgtagtaattgtgtatagttactatagtattgtacctagtatactcctaatactgtacctaatatacatatatataatatatataatatatatagtataatatatagtatagtatattatggtattggtgtgggagtagcaacgaatgtgagtggttggtaattgttaccactactatcttgagtattaattgggaaaacaagtgtaactgtgcactgcggcacttgagcaatacgtgagattggcaatggaccttttttgtactcccaaaacttttcctcatcaacgaccagttgtaataatggttcatcctcaccaaacaactgtactaattttcccttatgagatattactcgttcagtcttgaatctggtaagtggtttcccaggcttcacccagtcagtatggtcatatcccttcatgtccaaattcttcaatctgttaccactaaacactaaagtcatactgtttctcttgagattgaataggatttgaattggtaatccctgaaaaggatctgcacagtaggaccacaataacttatcacccagtttgatgtggtagcagaggaaattcaggaatatcctgaaaataagaccggataactctgttgaacactgggagactttggttaacttgatatccaagtcgtagaattccagattgtcaacgttatgtctagtgtgtgttatgtcgtcccaggcggattcgggggtagttttctggtatagaacaggtctaccattgattaattcagctttatactgtggttccgtagccatattcagtagtattaagttaatatctagtgattgggaggggtcagtaaggcgttggtagggccagtacattcttaccaatacatacaaaatttgtaatttaggctttaattatactgtaaataacttgtaaataggattactatacttatataaagtgtagtatagtatatatagtatagtatactatgtgtctgggtttaagagtatagtacagtatttatctagtattaaagttatacagtaaagtagctctctctcccctatatagtaatattagctccctctaggggtatatagttaaatactataggtaaagtagctccctctcccttagatagtaatatagctccctctcggggtatatagttaatagtatagtacagtgttataatgtggacaaattaatttttaatgagattaacgatgtcattaattttttgtctgagttttttatcatcggtgcttggatgtctgtggtgtgtttccaagtgttttagtattagctttgaacgaccccagctgatgcccgtgttatccctcaaactcatcattaacgtcttcctactgtccaatattaaccccttcaactcccgctgcctacgcatactctccatcgatatacgctgctgcctcttactctccttgtaattcttactctaacaatttttcaattcctcttattagtaatatactattagtgtgtaatatactatagttagtgtgtagaaatgtgtgtaaatgtgtaaaaaagacacgttagtgtgtaagatatgtaaataagacacgttagtgtgtaagtgtgtaaaagtgtgtagaaatgtgtgtaaatgtgtaaataagacacgttagtgtgtaagatgtgtaaataagacacgaaagtgtgtaagtgtgtaaaaatgtgtaagatgtgtaaactagtattagtgtgtgtaagtgtgtaagaatgtgtaagatgagtaaaaaatgtggatacatttttaataccgtaggggatgagtgggacatattttttaatggcggatagaaagtttgacttaatcatcgtagccttcgattaaactatttttcacatgttctccggacttttctcttatttttaccttcaaagttttacttactttatcctccgtaaagtacgaatttcccaaagttttaccctcagataaattcaattcatcgcctgaatcactttgtgaatcactttgtgaatcgctttgtgagttaatttgtgtctgaattttgtttagttctttttggaagatttccctttgtttaattcttcttttccagattttctcctgttttagctcaagttcttcgtagaattcgatgtcctccggcgtcaccgcagaggttatcacagtcctctgctccttctcctcaagctcgtagtccctgtcgccatgcaatccctgctgcaccgggtgattcaatatacccggcaacgactcctccctcacgtaatctctcacagccaactttttttccagatttttcaagtccaatttcaacaaattttctcaagttatttttattcaataattaattatttttattttttattttatttttattttttattttatttttattattttgagataataattttgagaaaattaatttgataattttgggataaattgtgtagatttgttgtttacaccacagattccgtcgaatgaagttaataaactaaaaaatgtgtaaattattaaatgtttaacttgttaatatttttactatttatcaaatttgcaaacagttttatcccaaacactttttctcacaattccctcactctagctccctctcccaattccctcactttagctccctctcacactaactctaacagtaaatttgagggtaaatttgggggtaaattggtgttatggttgaccaagaggagtcagttgcacggattccccaagccccggaaactacacaaacccgtaccaacccgctctaatccacattttacagatattttacacagttaaatagttaattttattgttaggagttaacagattgagaaatgggttagggtttttggagtggtatatttgaggaggatgtggcgcgttgtgagttgggaccgccgtgtaaattattatctgacgacataatcaaagggaaaagaaggcctaggctcacactgaagaagacaaagaaacaaatgtacgccacaatcgtcgacgacgttaccagaaacgtactctgcttcatggccactaacttcaaatacctctcacacatcttcggcacaacaccaaccaaacatcgtatcaactatttacactacttacactgtcatgagttatatttctgagtttacacaattatgtatagtaatgtatagtaatgtatagtaatgtatagtaatgtatagtaatgtatagtaatgtatggtaatgtgagttaatgatgttgattagtgggattggagaggaacaatggcgggacggtgagggcggcgtatgagttggggaagttaattggaagacaagcactctccagaggaatctccaaagtcttcttcgatcgaaatcactacaggtaatatcatcatatattttgttgtcacgagttaacacgaggtgaagacgattgtcaaaaattcacaaaaatacgtgaaaattggcataaaattagtataaaaattagtataaaaatagcataaaaatacataaaaatatccttaaattagcataaaattagcataaaaatagcttaaaatagcctaaaaatatcataaattagcataaattagtataaattagtataaattagtgtaaaatgataattgttagatatcacggaagggtggaggcgttggcgattggcgctaggaaagtcggacttaatttttaatcccaaaaaatttaatataataaattatttatactaaatgtgataacgggaatttgctaaataaatcactcactgtaggctggatagaatccaagggtgcagagaggtgttaaaatattaatactgtgttaaaatattaatacagtgttgaaatagtaaaataggataaataattaaattgagtgtgagggagagatggtaggattgggattaccttataaccgcgacttaccttccaataaaacacaatttaaccaaaagttacattttttcgaaaatatcaacaaatctcaacacaatcccctctttactcaattaaacaattttatacccggagattcacacgatagggtctccggagatattactaacaagtttatccccggaaatacacaggatagggtttctgaggatattactggggagtttatacccggaaattcacaggatagggattctgaagatcttagtgaggagtttccatctgaggattcatctggtgagataaaatttgatgaaattggctcagatttccacacatcaagtgatttttacctgaattttaaccaaaatttcaactccacaaattttcacaaaatcgatccaaatcttcaaaaagttgataaaaatcctgaaatatcgaattcgaatcataaaatactgcgtaaaaatcccaaaatattcgataaaaatcctgaaatatcggatgaaaattctaaactactgaataaaaatcctaatgcggctcaacttggcactgattctggcactggatttaccgattttgaccccgaaaacaactctacagtagagtccagaacttgtgtaaacagtaaacttctttctgttactgccaagggtaatatcaaaatcaatgcagtggacgagatattaactgtgaagcgtaacctgaatgcagtacggagtaattccaatctatcagaaggaaatgcagtaaaaactaagaaaagattaccaattatgtaccaagacgacgtcgaagcgctcctaaccagacaacccaacgccgtacgcaacttcatcaactctctcaactcacaactctcacactactcccactcttttaactcttttaactcttcagacagtgttgatagtatggatagtgtggataatgtggataatgtggaaactatggagaaagagggagatcaaacgtataggacggatgggtataagatgaacatgtttaatcctttttacactactgtaaatgaccccaacgaaggcttagagtacagattaacatgccgtaccgatttcagtccttttaacacctctcacactactgctgacaatgtggataatactgtggatactttggataatatggataatactactgataatatggataatactactgataatacggtcaatagtatggataatgtggaaaatgtggaaagtgtggataagagtttgatggatcgtatatttaataagagttttttgcaatcgtttagtacgttgcctgagggggtaaatttggtaattgacacgcctaccagtgcgccgagcgggtccagtaatcccatcaacgatactgtcaagagctttaacgttattaactccggatgggcatggctacagtctaccaacaccaaggagtggatccccaagtttatcatactcttttacaccaccgacacgggtgtgagtaacaggagtaacccggatatcaataaaatgaagattaatacaggtaattttattaaccatacccccagagggagctatcttatatacccctagagggagctacttaactatatacccttagatatacccctagagggaactatcttactatagttaactatatacccctaaggagagctatcttaactatatacccctagagggagctacttaactatacccctagagggagctacttaactatactatagatatactatagcatataaaatactaatgtcaaatttgttgtagtgaagaagtctgagttgtgtgccgatgaggaaagcttttggaacatctacaacgtttacattaaactaaaccccaatctcaacatcaactctccaaatctcaactctaacacatttaacatcgatctcaacgattccccaaatacacacacacccagtctacacaattcttatacacacacatccaatacacacactaatacacacaattcttatacacacactaataaatctgctaatataaaaaatgtgtgttatggttttgaaagcccatgtgcccagggtttggacggtttaattaagacaaacagtaggatttacttgtgtataatgaactatgagccggagaactactatgaaagcgtgttaaacaggagatacatccagttgtaccgagttgacgacagtgtgccacccaccctgcgtagctttaacaagtgctggttatcaaagttaatcacacaaaatcatttaaacctcagatcactcaactataatctgcaactcattacgatatcactggtggataactacgaatgctcattcataccactctgcgcagcgaaactgaacaacaatgtcaagtttaacctacaaatgcaactcgcattaaagaaccaaattgaacaagaatacaacaactgggtcttcaaactctgggaatacactctcagaaataatcataccagttgtaacactggtttatcaggttccccaggttactctaacacttgtacattgggtaattcaggttacagtagcaattataacagtagcaaaggtacgtttggtaattctggtaccgtatctttgagtacgtcatattcgtcggagcagttggaggtggcaagtttgggcacggatgcagcggattccgaggacacgggatttctcacccgggtttacaagtacatttgtaccctttttgccggaaaaactgaacaacccgatcaaaccatccacgacaaatccaaattcagaacgtaatttttacgcagtctccactttgttatatagttaacacagtagttaaagtaaatagttaataagtagttaaagatgagttaaaatgttgtagacatataataagatcgataaggacgaataggaatttggatgacgtgttggatctggggagtaaggagttggacgtgaggagtggtgagttggatctggggagtggtgagttggacggtcagtgtgacaagatgccgtcgcctcagaactttattaactggattgacaagtacggcttcgacgatctctccatcaaaatgaacatgtacacactcgttaatcgatcctaatcctctctattttacacattcactattatatagtatagtatatatatggtagtatttggtaggtgtctgggtttagtgtttttgggtagtaaattgggtgtataaatactatagtacagcactgtttacagggtttaacatactatttacagtgttaaatagtgttaatttgtatttagtgctgtaataattgtataaatagtgtataatatactaatactgttagtactatagtatactatagtatattatggtatataatatatagtatagtattatatgtgtctgggtttagggtagttaattaagtgtatattacacagcatataacaactctattatacatatttaagcttataataactgtattaaacagtattaagtgttaaatagtactgcaatgagtgttatcttactgtatagtaaagtatataatataccctggtatactcctaatactatacatatacatactatagtatatatagtatggtatatatagtatagtggtatagtaatagttgagtgttataggcagtaaatcagggtataaataccataatacacaggatattagggttataatatggtgtttaccgtgttttacaacggtatacaagagtgtttaggagttgaaagtggtggtttaggtcttaattcagtaccatacttatatactaatatatatactactatattatatactattgtatatactataatatactatagtatgtatattatgtatattggtataggtgtctgggtttaggtgacaggataagtgtatataacatagtataatgactctaatatactatttacagtgtttaatgactttattaaggagtatttacactgtaataattgttatcttactgtatactaaagtgtataatataccctagtatactcctactactatacatatacatagtatatattatatatagtatataatatatggtatataacatatagtatgtatagtattatgtgtctgggttttgctactaaattagctgcatatgaagtagtttataataccatatacataatataatatatagtatataatatatactagtataataggtactatcctaaaatattatgaggttaaaaagtttgtaggagttgtgcgggtatgacaatttcatcccctccaaagtagatttccacatgtcttttattcataatcttgtaaatttccctgcactcgctgaacgtcacaccgcccagcacgtacaccaacaccctccgcctaccgtcatccgctccctcctctcgctccaacaacacatcaaacgtactcaactccattctcacaccctttaccctgtttccactattactattgttaaccgtgttcccaatgttcccactgttcccactatttaccgtgttcccactattaatattgtgtgtgttatagggtgtgatgtgttcgtggtgaaaatcgtgtttgaggtactggtcgagtgtgtaggtgaggtgtgagacgaacctcgaggagtcatattctacactcagcttcttatagtaatttattatcccgtcgtttgccaatttgtgcactggcttaccactcccattgttcattatgggaagagattttagaaccctttgcagcagttctacggctttgtaatcgagttgaatgacctttaacagctcttttaagcccccgaccccaacgttgtagttgcacaagtataacaaaatcagcctcaccttgtcgtcgggcaggagtgatggagtttccgacacatcttcaacattgccaaacttaaaattattctgcagcattaacttcttgtccggacctctcgataactggtagctctggttcatattactactattattagattgattgaggatggagacgagcttgtcgaacagtttggcgtgtgtagtggatttcattttcgagtctagtgacgttgcgatggtttgttcgagttctgagagcctgatcaagtctctcttttgcacctggttaaagcactcattcgtgaggttcaggtgcgcccagtacttttcaatcaggtactgcaagttcggcaaattccgcatctgctccaacatactctgcgcctttccacccggcgtcttcttaaacttgtcaatctcacttaggactagagtgttaacctcttgaatgtgcatgtgtctgtactttgcccagaggacgtccagctcagcgtccaacaacgcaaccctacgctccaccctgtcactcccaaccaccttaaactcataacagttgtccactcgttctccagtagtatccgttgtgttatcattagagttctgtgatctctgggaatcaagtggactatttgttccctggaaacaattcccctgaccccgtacagtagaatagggaatattaagcaaatcgtagacgagtgcttggtatgtaaattcgtgaatgaaaacgggtgtgaaatcagtgctccggtcaaagacaatcaggtcgcacggttttaaattggatttccccctaatggtctcactgatcagttgggtcacactgtggcaaattaactttataacttgtgaatttgcgtcgtggaagcttatgctcggggtcaaattgagtacattacacaggctcacaattttactacttaccgtactgacgtacgaatcatagcatgaaccaccgtaaagactctggagtgagctaatctgtgagtaaaatatgttcgactcgaaggggacgaagttgagaaagagctccacgcacccgagcaccttctcaaagctcatgttttgtgcgatttttctcagggctgagtcgtccctaaggtgacagttaaacatgatgaaaacgcccatgtaatgctcttttccaggcgtaaaatccttcaacaggagatccaaataacccaaatcactcaggatgcagagcacgtttttactctttaaaggctccctacgctttgttaaaacttctaccaagtccacaccctcgtccagaacgtcactcagctgacaacatgatgaaactatcttcaaactcatcggatccaccaacattatcaccctaccaaacggagttaccacctggcggatcgcccacaacagacctacacatgatttaccgagctaatatttaagtatatagttaagtatatagtaagatagctccctctaggggtatatagttaagtatatagtaagatagctccctctaggggtatatagtaaagtagctccctcttggggtatataaattagctccctcttggggtatataaattagctccctctaggggtatataattaagtatatagtaagatagctccctctaggggtatataactaagtatatagtaagatagctccctctaggggtatataattagggtataattaagtatataactaagggtgtaagtatatggctgagtggaaattacgttctttggcggcttgtttgagagacattttgggaactaatttataaaattgaaatcatctgtaaaatcaataaattaagttaaatcaataaattaagttaattttattaaatttagttaattttattaaatttagttaattttattaaatttaattaattatttgaaaaaggttagagatgagtaattttggatctactgtacacttgagtaaaaagattaaaataaattagctcaaattcgtaaaataataattaataaaatttatatataatttgtttacgttatttttagtcccaacacatccatttacgacatatttcacaaatttacattttttccaattttcaccatttttcacctattttacccttatttcacattattaaattatttaaaatatattaaattaattttacaaaattaaattatttacaatatattaaaaattttacaaaattaaattatttttagaatattaaaaattttacaacattaaaatgttaaaataattttacaaattatttacaattgtgtttgttatttggaggtgattatgatcccatcgacgtttggtaccttgtggttaaagctgtctgccatgtccaacggtactcccgggtgactactcgccggtatcacatgtaccatatgcaccatctcctccactttattcacaccatttgtactatttaccgcacttttctcccttttctccctattcaccctactattcactgtgtttactgtactatttgtataatttgtactattagttgtgttgtgtgattgacttagagtgcccctggaattgtagtagagaggcggaataagttccgtgacgagatttctgtagtaccaattcttactcctggtgttcgagtttccactgtgtaagttggagaaatagtatttgtatagaagtactctggtgtatttgggttttgtgccttcaaacgggttatacattaggttttttacctctccagaacccatcaacaacattcgcaacaagtcgaaaatgaatttttccgttacggcgtatggtaattcatcaccgttcactctgtccacactgtccccagtaccctccacagtgtccccagtatcccctgtgtcccctgtagttactacatacttcttcttcctaacactattcctattattcctattactactactattactattactattactattattatactgtagattgaaggattgtactagtatatcatctagaaagtattgataaaagggagtgagatgtgggaactgatcgagttttgagggtttcctcttgaagtaatattcttcccagtgtgtcctcgtggtcactactgactcatttgtcccctcaatcaccaactcgtaccgatccctaccaaccctaaacacatttctatagttactcacactatagaaattgttcatcccactgctaatagtgttaatattactcatagtattaatattactcatagtattaatattactcatagtattaatatttacactacgaatattattggattggggggttaaaatctccgtaacggagtgttgaaagacccgaacactaaacacaatcaagtgtataaagagaaacgactgtatgatcatcttggtgaggtggtgcatgttatccattttcttggaaagattgagttgtaactccgttaacccaatccacagcagaaaactccaggtatttgggccatttttaaccatctcaaatatgagaatagattgtaacaggaacaaagtgtactcaccctgtaacaaagagatcttagtcctaacagcctcacaatgcgatttcagcagaacacacacaaggaacaggattagcgatttgactcccttgtagtgtggaaacaagagtagcaacagtagtaacactaggatcaccgtgagatacaggaggaataacaaatctgtgataatcttcttgaacagctccgagacggataagttgtccaggttcatgaaatcccttaaatactcacgatgcctgttatagctcaaattactcaaaattcgctctatgtacacactaccaaatgtttcttccgtacactcctcactacgcaccgtgttacattctaacacattgtccacattatctacactctctactgtgtctactgggtcctcattttccacattttccacactctctacactgtccccactgttggtaagagattcgatgagatcgatggatactttcttcatgagagtgtcggacttggcgaacgggttaaacttccactgcgtaaaggggtgtaaaaactggtcatccagacaaaacaacgatgtcaacagcagcaaaatataaaaggggccaaaattacccaaaagcgtaaacaccgaaccataaaccatcagcgccattccaccaaaaagcctacaactcctgtgcggagtaactatgaaaacactcagaaccacctcataaaataataatcccaccgtgagtaacgtgttcaagaaagaatacttcgccacggcgcgtgttaaaaaatgggcaaaaaatgtgggcagtggtatggaggttaaaatgtgttgaaaattaagcttaagaaaaatcttatagagccctgagaggagtacgactctgtacgacaggagtctgaagctccacttgacaagcgagggcaaatccaggctcaaatgtttatcaaagaatttaaagggcgaaaagatgaaaattgcgagaaatccaacctcgagtagtagtaaatccgacaccgtcttgggcaaagacctgaacagcgccaccagcgacaacttcagcacccaaagcagcaaaaacgagtacatgcagttgaaccccgttaaaaacattatgaacgaggttaggatcccgacaaaggggacgattcggagtgtgaagtctgagattgggaggatgaggaagaggctggggaactctgtgatcgcctcgtaaaacgatttactggcgatattttggagaaacgaatagctggcagcgtcgtacatcccagcagtgccaaacaggcccaaaacctggttaatattagaaataaacgagaaaaagtaaaccagcgaaagcatgcggcagaagaaactggcgctaatttcatacgtgtgacacctggacctgaggcacttgtcctcattctccaaaatcacaaagccctcactcaactcaaactcgccgctacgcggagtataactcacactcgtcaactgagactcgtcatcaccagaaaacacacactcctccatctacaacaatctatccacggtacataattatcattaaattatcattaaataataattaaataagtatttttattaattgtttatcggtgggactgtggaaattatgtctaactttggtggattgggagataaaagagttaactcgtaattatcagtggctaggggtaaaaattacctttttattcgagggaattgcgatactaaggaaaaatctgatttgaaggccatttaacgcctgagttccagaatgtgcagaaggtgcacatagctaatgcgtaaccagtcaaataagcccaaatttaacaaaatttaaccaaattaagcccaaatttaaccaaattaaggccaaattaaggcaaatttcaggggtaaaattaggcttaaaactggtttttttcggtttttaggaatttttactattccgggatttacacgtggaatctccataatcccaaatttcccccaaatttcactcaataactccaaattaaccacaaataactaaaaaaaattaaataaataaaattaattaaaattaattaaatagttgaaaaaaattatttgaggtgtaaatgtgaagtgtgaattgtgaactgtgaacgggaagttacccgatggaggagttaatttgtgagcttaaaatgtttaattttaaaaggttaaaattgatctcaagtgccgttccgaggatttttttgtcgtcttatttactctttcggcagtctgatttcacccctcactcgctctgttataacatcaacttccatccttccgatcgcacaatttcccttttcaataaatatcccaaccctaacacgagtttacactctcaacactccacttgttattctactcctgtacaactccgtaatcctatggcccgttatgacttggtggttttgggcgggggtccggctggaatggcggcggcaaaggaagccgccaggttaggcaagaggacagtactgtttgactacgtgacaccgtcacccaggggtacgtcttggggtgttggcggtacctgcgtcaacgtcgggtgtatccccaagaaactcatgcactacgccagcctactcaggagcacacaatacgacaggtttcaatatgggatcacaagctcaccggatcaagaacaggtcaactggaccaaactcacacaagtaaatttacacaataataattaacaattaacacaataataataattaattgtagacgatccagaattatgtgaagatgttgaatttttcgtatcgttcgggtttaacgacggctggcgtggattatatcaacgcctacggcactcttaaacataataatactgtagaatatactcacaataatgaaactaaggtaccgttacggtgtcactgcggggcaccagttatttttctacggagttagccaccccaatgggactctttttgtcccttggttactactaactcagttacctatttacgtatccccattatttctcaatttgcaacctttttggtatttatttacaatttacaattgttttttggtaaatgtgttgttgaagcagcaataattcggggtgagaaaatttatttctcctaacccgatcaacttttgcatttatttccaaatttccattttttggaattattttttcctaaatttgatcatatttagtttactatagttaatagtgtaaaaatgtgtagagtgtggtgggtgaaaaggtgataatagcggttggtgagaggccttatgtgccgtcagatgttcaaggtgctctggaatacgccatcacctccgatgatctcttcaaactcaatacctccccaggcaaaacgtattcccactctttcccaactatttacacaattaaactattgcacaattatactattacaacttatttatatagtgtgaatatgttgtagattgatagttggagcgagttatgtagcattagaatgtgccgggttcctcacaggcctaggattcgacgtatactacactattaccattattatactattattacttactatatacctaatgccttaactatacccctagagggagctatcttaatgtatacccctagagggagctatcttactatatacttaattatatacccctagagggagctactttactatactcttaactatactatactattacttactatactaacataatattattataatattgttaataatgtttataggtggatgtatcggtccgtagtatattattgagaggttttgacaggcagtgtgtgcggaaggtggaggagcttatggaagcgtccggcgtctcctttctataccagaaactgccaaccaaaattgaaaaagtcaaccaacgcctcaaagtaaaattcacacattcttactcattcttacacattttttatagtattttacacacattttatcttattttacacattaccgtgtcttatttcgacactaacgtgtcttttttacacacatttacacactaatttacacattttacacactatttacagtattttacacatttctacacactatttatagtaatttacgtactaatggtattgagtaggtaacgtttagtgatgggagtgtgaatgattacgacactgtactatatgccattggacgcattccactacaatacactcagagtaatacactgttctattacttatttactaacctgattacgagttaattgtttacagatttacgggagttgggtctggagtttgatgggaatggtaatataatagcgcctaacgaggagactaatataaaaaatgtgtacgctgttggcgacattgtgtcaaaagtgcccaaactcgcgcccgtagcaattaaatcctcagagttactcattcagcgactttactccaatacaaacacaaaagtacacagttttattaactactgaccagttattgtttacagttaatttattgtaaatttgacttagatgaactatgagaatgtgccgaaatgtgtttatacgccctttgaatattcctcgtgcggtctcaccgaagaagaagccattgtaattttcccatttagccttatttttactctatttttactcgaatttagccttaattagtcttattttagtcttattttagccttaattaccttattttacgtataaattagccttaatttagccttagtttagccttaatttagccttagtttagccttaattattcttaaattacacttatttttctcttattttggctcttaattagtgttattttagccttaaaatagtcatttttacgccttaattagctttattttagtcttattttaccccttaattagctttatttttactctaatttagccttattttacccctaacttagtcttaaaatagttattttttacccttaattagtcatattttacgcttaattacgtattagtggtaaaaaatgtgtaggagcgttttggtgaggagaacctggaaatctacctcaaggaatacaacaacttagaaatctcacccgtccacagaatcaacaaaaaaaccaacgacggtaacaactacacatttttctcatcatctcacccctaattaacccccaattacctcctaattacctcctaattacctcctaattacctcctaattacctcctaattacctcctaatcacctcctaatcacctcaatagtgtaataattgttgtagagtttgactatcctatgacgtgtttgagtaaagtaatttgtttgagggacgggaagatcgttggaatgcattttgtgggcccgaatgcgggtgagattatgcaggggttttcagtcctctttacgctcaatgcgaagaaaagtgacttggataagaccgtcggaattcatccaactgacgctgaaagcttcgttaacctcaccgttaccaaggccagcggcgactcctgggtcgccaccggcggctgcgccggcggtaaatgcggctaaaccctctccatcagttagtgttacactgggtgtaatatggtgtatcctcccgtgtttagtgtacatattttacatattgtataatgagtaaaagtaatgtgagattgtcaaataagaggaaaataattctagaggataaaaatagtaaaaaaatccacttatccggcgatgattctgcaaattcgcggaaccctctcctacaccctgagaatcccgttcccgtccccgaaaattcagattttacccctaataacgcaaatttcaactctgttaacacagaattaaataatcagttgataagtgaaaataataaattatcggagaaaaagttgagaagggacgagttgttattattatttaataattgtgtgacggccctttcaaataataaaatttgtacctacaacgcgtttgacattggaatcatagaccacatcgacgacttgatacaaattaacgaggaggaaagcggtccgggtacagtcggtgaacgtcagcggtcccaggatggcacagaggacattaactactcgatgatctcgaaggtggtggaaagcgcgagtaaagtctacagctacagagtcgaggcgatttataataaaacgttcaacattctgacgaatatcaagagtaaaaataacaacgaaaacgcaaatatcaataaacgcagtaaaaaaaatatcaaactgtacgaattcacaggttaaacttaaattatctagtcattatttagggctattttggctctatttaggtgttatttagtcattatttaggcttaatttaggtgttatttagtcatattttagctctatttagtcatattttagctctatttagtcatattttagtgttattttagcttaaaatagctatttttagccttattttggtcttattttagtgttattttggccatattttggtctatttaggtgttattttggcttaaataggcttattttagtcattttttacgccttaactagtcttattttactttattttaccctaaattagtgttattttaaccaaaatttgggcctatttaccccttaattagtcttatttttctcttattttggctctaaattagtgttattttagtcttaaaatagtcatttttaccctcaaattacctctaatttacccctaaattacctctaaataactctaaattattgttaatttacccctagttttccttattttacgccttagtatactattacttaactgattaaaattgttataggaaagaacacgttactgttgaagaatgaggtaacgctgagtaagttggaggtggacaatgtcctaatggacccgtactttcttaaaatctcctctctcttcaataactctctcaacctcctcatgctcaacattctcatacacaacctactcatctcactcttcaacaccaatacctatactaatccagttaaggattccgtactaagtgtaaatgccacttctaatggtgcagatttacggctgaataagtcgttgttatcggagatagtaaggagtgaccagggtaccaggacgatattacccgaaataaatcaatacatcgaacaattatacggcacaacacacaacccctttgaaattctatccatcaccactcaatctgaaatacctgatgataatcctgatgatatacacttgggagatctgaatatgtcagaattacctgagtctgagatggtcccggaaggcgctaatgaacctcttgatgcagatgacgtggacgctttctatgacgccgttagcactcacgaattcccggaaatttataccgcagacaattcacaaatttcagactttaattctctcacaaacacgcaggacgtgggaacgcagttgacggatttggtaccccgtgaagcatatttatcaaatgtcccggggtcagaaattgcaattgacggcattttagaaaacgtgaccgtgaaacggagaaaggcgcgcgaagttaaaattcgtaccgccaagccggtgacctcactcgtcaaattcgtcctagaaaataacctaagcaccgttttagactctgtagaacttttatcttactataataagaagatcaagttcagtactagtaacaggagcttcaacttgaacctcagtttaaacccgaataagctactggtgaacaacattctcatcagtcagagctctgaccaggtcagtaatctcgactgtgaggtaaaatttgttgaaaatgagcacactgaggacgtgttcgagcctgggatgggcgagtttgactgtggtgacgaagctgaacctgagcctgcagatactaaagtaacagtagtggacataaataagttaaaaaaggccataatgagtatcttcgagtctgagggcaggaacttgtcattttctcagctaatttcaagtgtttacaaaaggtttgacaggaacgtcgtcacagttcatatcatcttcgtgtgcctactacacgtgtcaaacgagcataacctcttcctccatggggattccatcaacttctccatccaggagtaaatcttcataaatcttcataaatcttcataaaatttgataaaatttgattaaatttgattaaatttgattaaatgtgattaaatgtgtaatatatttttatgtttgatttttgcgtattttgttaattgtctaggcaacgggataaaaaatggaatcatacaaaattacacaaacttccaagtatacactctattttggcccttttttagccttatttagccttattttagtgttattttggccttattttaccgttattttacccttaatttggccttattttaccgttatttttactctattttagccttattttactcttattttagtgttattttagccttattttagtgttattttacccttattttagccttattttagtgttatataatattaattaagtgttatgctgtaactgtggtaataatttgtgtagtttagtggtatatttgagggtcgtaacggcgtgatttggtacaataacaataacaagaaaaacggacatcgcataattctagtcaatccaatggttaacacataaattattatttttttttagtatttgattgataagctgaagaatgtgaatgaggttaagttgacgaataatcaaatacacattaggcgaaaacggcctaatttgctacacaaactactcaacaacctaatctaataaaattatgttaataaaattatattaaaattagtagtgcctgcggcatttgttggatttgaagtattttttaattttactgatttttttattgtttgcgtttagcttctgtttgactcttctgctctgcagtgtcattagcagaggcttgtttctgagctttattttattcgttaagctctgccgcttgttattcttactaaacgccagcctcttcttcaacttcttctcctccttcaaactcatcttattctccaatctcctgtctcttctctcaaatatttcatcagactcatctactgtgtcatctacgtctgaattttcatcagatttttcatctgaatctgtgtatgaatctccatcttgctgggagtgtggtccattttcttgcttggggttcgggtgtcttttgaactctttaaacagttttagcgcgcttttgatgttgatattaacgtctaaaaatggttaaaatagctaattcatacttttggacttgtgcttgaactctgacaagtaactcaacaactcctcgctcttcagcaaatccacaactctcctacacatctcacggatctacacatttttacactaattaaccaattaactcaataaataactcagtagttaactaattaactcaataactcaatagttaaatgaacaggtgatacggtggtgattccgatgatgatgacattttcatcgcgatcgtgtgagacgaagttgagtaaaaggttgttaataattggtgtgaggatctgtgagctcagttgttcatgtgttgaggtgattagaacgagaagaatcttcgttatgtgcggttgcttatggttgatgtacttgtttatgagctcgtagaactgcggatacgtgagcttaaatttggatattacggctgccacaagctttaaaattgtgattttattcgcgtaagtcaagttaccgtagctggaatttacacgttgtaaaagattagtcacaagctcaaaaggctcattcaggtccagaattatgttatttggtcctgaaccaactcctaaatcatcttcctcctcctcaaatactattccataatagttctacaacattaatttagagtaactaggcgttaatttagaggtgattaggaggtaatttatagtaatttaagggtaactaggaggtaatttatagtaattaggaggtaatttagaggtaattaggcgttaatttatagtaatttaagggtaatttagtcatattttagagttatttagaagtattttaggggcgaatttcagagggaaaaggaggggttagggaaaaaatttccctgatcacgtaaaatagtcctcaaaacctcttaataactcaatagctaactaactaactaattaactaattgattgttagagtactttggattgtatgaggaagtgtgtgagtagtaggaggagtttagtgttttgttgttttggagcggtgactgtgttgactactgagtttagtatgtaagaattattccagatccttcgacggcacatttcgagtattattgagcagcttaagaggcggatcaccgccgagtttgagctcttgacgttgttgaataaaatagtttcaacctcctttacagctgatttatcagctgatttacttaaaattattaaatctttcaagataaaattaaataactttttcctctgctgacggtcattcaggtccaacaactccaaccactcaattattaccctaaaccatttttcaccactggaaatatattactacagtagatatcaacatataattgtaaatatcaagatataattgtgatttacagaataataatctaatttatttacgtttgaaggttgatttggcgtttggtacgcagattgaaggtcgagtttatgatcaattttctcatcttttcatttaatatattcttattctccttcacatagtttatcaaatttatacataatccactcattcccgtagtatccacagtatctccggagataccattagtaccattagtactactggaggtactactggaggtactgtcggaggcataactggagttattattggcgttattgtagaaggaaatggtctgagaaaagattaaatttatgatagcttacgttgatgatgaaatcaagtagtttgatgaagtctgagttataaatttgcggcgttaatttgacaatttcaaataatgaaatgaattcattatatctgtggtagaaattgtcaaaattagcccccgggtccttctttatattattctgcaatacttccaattctaacattatatcaagtgatttgtaccactggattgtgagattccacacaataatcaacaaattttaacaatatgaataaaattatttattaatgaaaaattgttaaaaaattaaaaattaaatattattccacaattttgccataaaaaatttatttaccctgaaactccctaatcccctttaatcccctttaaaccttgtaataatccttgaaataaaccttgaaatgaaccttggaataaactgagatattaagatttaaagaaggtttccatattgttgagcaagtttttgaaggaaaaggtgcgatcctacgcctttggcgagtaattctctgaggtgttcggcgtataatttaccctttacaaactctaccaaactctccaagtcactgtgatagttatacttccacttgttatctttatgagtggcggaaaagtatttaaaagtgtgaaggtcattgagccaaacacctacgaccactgcatgccacgatttacagtctgaaagaccaactaattcagtcattctctcacccaattgatagtctggagtaagtttactatgaaccaggggatcatggccaggcggaccagatcctaccccgtctctaaaatgcgatacgtgatcgtaagttggtaccaaatataaatatctcagatgaccttctccctcacttcctaagccttcattgtaagtataagaagcgtaatggagcgctgataccataggatgtccctcctttagaagacttctatccagaagaaacggtgcaccggtaacaactttaaatattaaaattactaaacaaattattaaattcatacggaaaattgaggttaaaaattttaataccaaatgagaatcctagaactgtaggaatattcggtaggaatattaggtaggaatattagcaaggaatattaggtaggaaggttagggttgattgaatttggatggggaaattatcttataaaaatgggcaataccatcagaatatatgaaattaagttaatcatttacataattataattttagaaattttattgataaaatttttattttgagtcggaaaatttttagcccattttgactacacattgcttctcttcgtatattttattaaacatttgtttaaagtttttattacttattttgctaggcatcttggaccagtaacaacgttccaggtgttcataccctcggtatggaaacgggaaggtccccttcgcttctattctgttatgtaacctggactttagaactgtaggaatatcataaactgggctccaaagtactgaactggtaccataacttggtaacctcttccacttgtttatgttctatcttgacatcaccagaggggttcttaatgaagaaacagtttgaagcaagacctagtgaaaacgcacttatcgtaggaaactttggatcgtcacctgatttccagacaacttcttgacccagcgtaaccttaacacatttgacaccacttttgaatgtatgactaaatgacatgtctacaatagttacatcgtagtctgtagccttcagcacggtgtctccatcaccgatgaacttcagcttattgacatcgtgtctctctttggtgatgtcggtccattctttaactccctcttggtacaaactgaatgtacgattggtcagtaggactacaaggtaattgacacccttggattccttagtcctaaccagcataccaaaaacattagcagcagatttccaaatttcatgctggccttctgataccttactgaacagaaagccactcttgggagtgtatgtgacaactccattctcgtccttgtagtcatactcgctggtggtctgtttcttctcaatgtcaagagttaccttggtggcctcagtgggtgttggaggaggtaagattggagataccctgggttgagtaattttagcctctattggccctttatattctatcttcttgaactcagatccagtcttatatacaaagaaattattggaaacaagccctagacccatgatggtaatatctttaaatttaggatcatctgtactcttccacaggttatcgtcaccgtacattatcttacgacagtttacaccacttttaaatgtcagttcatatgagtaatcaacaatgtcaactccataatgagttataggttttagaactgcgtcaccctcgccatagaaactcaatgcacctatgtcatatctatctttggtgatatcagtccatttcccagcagtatgtgtgaacaatcttagtgcattgttcgtacagagtattgacaaatatttaacactattgatatccttaatcccaaccctggtaccaaatacttcatcttttgcctggaagatagggttggaaccctgtacgattttctcgaagacatggttaggcttaactacgtacttgtgatattcattatcgacgtaatagttgaactgagctgtagtctgtttcttttcaatatcgagagtaactttggtcggttcagtgggtttggctggagctgtgactactggagttgctttgactggttctaccttctctggagtaggctttggttcataatcaattttcttatactcgcaactattcttcacggcatagaaaatgtttgcaactggatcaaaatcaagcctctggatggtcttataagagcagcatttgttttcatcccagatagtatcttctccgtacatgacggtcttgcacttcattccgcaatcgaacttgtaactgaaggtaaaacatttgcaatgaccgagtatggtaacagtgtagttagatggtgtgagttcatcatctgtaggactatagaacttgagttttgtcacatcacccttctgattggttatatcggtccatttaccaccttcaggctgatggaacaatttgaaatcgtcattttcaagcacaatgatcacgtgcttgccattgtctttagtcctagtcccaacgatagttcctaacaaatttttggaattccagatatctgtagtgccttgtacaaccttgttgaaaaagcggcccgacttaattgtatatctgtgaaacttgcgttttttataatgctcgaagtcacccgtactatcagttttatcgatgtcaagagtaacaagtttcatctcaggtttggtaagttcccttgtctgatccttaagacttgtaataatgaactgatttttacgaagatcgagataaaggcccctcgggtacccaaactcaggatcatccgtgtggctccaaagtaacatatcattgtttgtgatcttgacacacctgacaccttctttaagctcataaccaaatctacactcgaaaactattggctcataatcttccctagtgagttcatggtactttgaggtactctcatccagggaatacaactttactcctgagaagttgtgcttattttgggtgatgtctttccagggctgacccttaccagtcttctgaagaagtacaaatccaccactctggagcagtacggaaagatgtttctcctcctttttagcgcccatgagtactgccttaaggccatgatcctttgggtcagctttccagatcacatgttcatcaattgttccacaacactcagagccacagcacactgaaccacaacatgttgaaacacagcagttagatttgtaatttttgacaatcttctctattgtcaaattggctttaggattaaagtggccaaatcctctggtggacctatagtcgaaaagatcattattcgaattcttatcaatgtcaagaacaaaaggtgtcgttgtaatccaatctccgccaaccttgtggaaatgcttaacctgattattgttctggaatatgttaatattcttaatcgatgactctacgccgtagactatgaccttggttgacaattcttgatcagtttttgcttcccagaaaacatgatctgaaagacatcccgacttacaacaacttgacccacacactagccaggtccaagaacttttgaggatgacggagttgaataggaatccaggttttgcagtgaaagtccttttctcaccatcatgatgaaagtcatagaaaattctgcttgaggtcctgttgagttcaaggcatatcttattaggaatcggattccatgaacctccttcaggcttacgatagtgtaaaatatcaccattcaacaagtatatggtcacgatagttaaacccatactagtaaagaccttggatgcatacttggtgggatcattggtcgtccaagcaactgcttgacccttggccacctggttaaacattgaattacccttggctgtgtatatgttaatatttctgttatgatcggtggtaaaatcgtagtcttcagtactggccttcacattgatgtcaagggtgacaggtttagccttcttaacctcttcacataaccagtaattatcatcatcattcattacactgaacttattcaaagtcacatcgaggaatactcccttcagattgccaaactctttttcctccttcttgtcccaaatagtcttatccttatggctaaccttcacacagcaaacgtcatcaaagaacagacacccatagaatgtaccaaacagggttactgagtagtgacctctgtgtaactccatctgtttattctcctcagccaaggcatacatcctcaggtcagttaacttattcttgctggctgtgacattctgccagggcttacccttaccttccttgaagaagaaaacagcatctccagtctccagtagtattgaaagatgtttctcttcctttttgatacccacaagtaccacctttacggcgttatcttttatggactcccaaataactctttctccacaacagcctgaaccacacttcttgttcttcctaatccttctgattgtataaccaggtttagctgtgaacgtcctacagttatccttcttagagaagtcaactgtgatgttactattggtcgtcctgaggtcaagatcgactagattcggagcctcactccagccaccaaatgttgacttattaaagtgtttatgtgttccattacaaaggtgaacactgaaatttttagtttttgaaaacgtgccaagaccatcaacaagcaccttatcaaaatgctcactttggttcttggcttcccaaataactgtctcagaagcacagcaattggatccacagcagttacttccggttttaataaaaacaacttggttgaatatgaatttgtccttaggagtgtatactttaacatttttcagataatcctcactgaagtcagaggtactagtactttctttaccattgatgttcactggaactgctttcttaggacaagcagaaacctccggagttctcttgggtctagggttacccatcggagtctcaactgttacctttacctttgccggtacaggatcattcgacttgacaacttcagtcttgggagctacagtgggaatgattgcctcagccacaggagcttcagccgttactggtgttacagttgaaggagtaactgctggtccacttacttgaggtgtagtagcagttgtacctgtagtctctggttggctcttaacttgtgtggaatctgcatctgccgttacaggttctaccttagctccctcaactttagtaaccggtttaaattccagtttcttaaaatcagttttattcttcacaaagaaagcgttggaaataagcccgagatcaaacaacgtgatagagtcaaacttaggatcatcactgtgcttccatacatcatcatctccaagtttgatctttttacaattgactccctcattgaacttaaatctgtaagaatattcatggagagtaaccttgtaattagccttggtaatttctttatcattctccccgaaaaacttaagcttgtttatatcatgtttggtagaggttacatctttccatgtattattctccagatggaggagagtgaatgtattattgaccagtaatactgacaaatacttcttatcctcatcgataaatatggccctggtaccgcgaatgttatttttctgctcccatatgggagtgtttccccttacaattttgttgaacgagtgaccagacttaacagtgtaagtatggattttattctcctttttgtaatcgaactcatttgtacctttggtcttgctaatatcaagactcacagacttagtagttgttgcagatgcacttgattgttgttgcgatgcatttatttctggctgactattgggttgacttggtgttgcttgagatggctgagttccttcagtaggactagcactttattatcgttcctatctccattactatggtcttatcttactatctggtccaccactttatcacgtaattagcacttagaaccacaatgtccgccagaactaccattaaaccttgtcatacccatcgtactatctatactatctatactatctatactatactatgtattatgtacacattaatctgataatcttctcaatctccctcattagcaatactaataatgtatctcatattaactattaagaatcttaattaattatttgttaaatataaaataatcgtgtggaaggtttggagaatgtttaaaggggaaattggagcggggcaagagtgtgtgtagcgtcaatggataacgcgtcgccctccggaggcgaagattgtgggttcgactcccatcacacacgatcaagtaatatcactccaaactccagaatctaaaccataatttacacattttaatctcttaaacattaactgagtgtatccatcgttttgaacaccatttcccataaacatccattccgaccgaatccaccaattatttcatttttcaactttgcaattacttaaattattttgtttaaattattttaataaaattattttgtttaaattattttgtttaaattattttaatgaaattattttaatgaaattattttaatgaaattattttaatgaaattactttgtttaaattactttgtttaaattatttaagaaaattattttaatgaaattattttaatgaaattactttgtttaaattactttgtttaaattactttgtttaaattatttaagaaaattattttattaaaattattttaatgaaatttggttgtgatttacgatggtttcagcgttgactgggacgctgttgaaatggtgagtaaaattaaataaattaattctagtgatccgcctacgatggaaatagttaagcaaataaatgaaagtaaacattttattattgagcaaattgacgaaggcgtagcactttgcaaagactccgtcacacaatttctcaaggtaaaaaatttccattattatttctcaggaagaagttaccagacgacttgaaatcgcagaatgctacatcccaccaaatgaacagaaatgatcacacccactcggttactcagttactcaatcactcagctgatcaattgactagtgaatgagtttattggtgttgatatcattgatgagccattcgaggccggtgaggattccattcccttgaacggcgctggtaccgaaaatcatataactcctgtcatttattaccttatccagctccaacatctgataaatttattatttatgttggtttacttggttaatttcctttgttgttagcgaacctttaatatcttgcttatttgcgaatattaacaccgtacttttatacatattctaaaacaattatttattcaatttacttatttaatttacttatttaattaaatatttagtttaataatttgttacatcgttttttaagattttcatgatttcttgtttggatgtgttgagtcttgaggtgtcgacggagtcgatgacccagatgagtgcgtcggtattttcaaagtaattacgccagaacaggcgtatagattcctgtcctccaacatcccaaaaattcagtatatacctggaaaattattttataattattacgaactcgttgtattttacggatttgatgttgaatcctacagtcggctcaatttgagtaatatcttcgttatttatactctttagaattgttgttttcccagcattatccagtcccctgaaataataaattaacataataaattaacataataaattaacataataaattaatataataaattaacataataaattaatataataaattaatataataaattaatataataaattaatataataaattaatataataaattaatataataaattaatataataaattaattaagattcttacaggattaatattctgatttctttatcctttaatttggtcttacgaattaccttcaaaagtcccattttacaaaatttactactattgacacacccaatatctcacccagtactccaatacgtaccatccaacacataattaactttttactacattctaacatattaaaaattatattcaattaaattcataaatcaaccatctaacagtaaataatattattatttgtataatataatttgtataatataatttgtgtataataatttgtgtataataatttgtgtaaaataatttgtgtaaaataatttgtatataataatttgtatataataatttgtatataataatttgtgtataagattaggtattgaatttcatgaaaagtattggttgtaggatgactatgagaatgacgatggttagcattgatttggagattaggaggtgatacttgttgatacactttggaaacacgacgatacgttctgagagtaaccacttgttatttttagtctctgcgagactctcgtcgcttccctttgttacaaacgagtaactaatttcattggtgtaaattaccctcgagggcctgtttatagcgttaaacaagtcatgatttatactatacaaatccttcgaatttcttattatcttaaatgattcataatttatcttctcctccttcaactcgttcccactcatagatttcgatatcgaacctgatacagattttgacacagatttactcatagatttactcatagatttactcattgatttgctcatagatttggtcatagaacttgttatagttttggtcatagaacttgttatggttttggtcatggatctggcaatggagtttgcgatggagttggaggagattgatctggcaattgaagaggcaattgaactacttgacaacgatttcccaagtgaactattcgacaaagacttcatcaatgaactttttgacagggatttcagcagtgaactgtttgacatggatttgagtagagaattcttggaaaaggatttgagtagtgaactgtttgacatggatttgagtagtgaactcctggaaaaggatttgagtagggaatttttggaaaaagacttcactattgaattggttgacgtcattgacaggagtgaaatggtcttgataattctattaattacattccgtttcctctcaaacttttctcccttttccgtctcctcctcattagaaatcaagtataaagttatcggaataatataattacaagtcacgagagtgaacacgttaacgtagctgagaaacccttgaaacaaactattattaagtagtaaaaatgagaataaaaatggcaacacggatgacacgaagaagtgccgttcatatccgagattcctcaaattatacctcatggaaatgcaattaaacacaacgtcaggtataattgtaagcagtacgaataatactatacaagtgttaattaaaggatttctattactgttaatcatgtcgtcaaatattgaccctgtaacagcatacgccttgttaatcccaaataataaataaactaaaaacgagaataaacaggaaatccagacaatttgggttggatttacatcatttctcatctcattagcccaggtcgggagtatactactgatattataattttccacaaatatcaatactatgttcactagactcccggattttccgtttaccttttgagagctagggattgatctagactgtgccccgttatataccgtgaaagtaccaattgacacaagtaatacgaaaaaagataccatatgatatttagtagtttcctgtagtgagctcgaggctaatttaacacaaattagacaacaaattaaatatccaagagtgattccaaagataccaaatttatactccatatccacagcttcataaatatacatgaaaagtttagcgccaatacggcgtacagtaaactcaggatacaactgtaaaattactgtaaaccctgtcaacttaattaacatcagatctattaacttggaaaatgtaattatcccaactattatagtacagaaatctccaacgtagtgaacgattgacactactttaaaggtcacgtctgataggtaataccgtaccaaagtgttatattctatgcgttgttggaagttactgttgttaggaatcagcgtaatagcctttaacagcattagtgatgaaaatgagataaaaacacaggttaacaagttgactaggaatacccttttccaaccattctcctgcacaactgatggaattatatccatacctataaaattatatttcctcatcattaattaattatttattagtattatttatgtaaaatagagaataagttgagtggtaccgtaaccgaaaatttggttgactagaagaacgaaagatgcgataggtgtaatagtttttttatatttccatgtatagactttaaatctctctcgttttcgggtataacgtttatcatcctccatctctaaagtatattttatgaatcatttaccacacattcggacggctttattattattttttttaatcttatgatcaaaaatttaaatatcgatgatattttatttaattccgatctccacgaaattaataataaaattaccagccataaaaaacactcttcacccggactagaggaagaagtcacaaaattcataaatgacacctgtacgatattggaaaaattatcaactaaagaattatcagcaaatgaatgcttagtagtgataaaaaataactttaataagataaagtcctcacgccagagcacagtcacaaatcacatccttaacaacgtttttaaccttttatatgaaaagttcatcctaattatcatttacatttgtaaaaataatttggaccagcaagtaattcagtcgtcttctaacttaatttacaacgttatctcacacatttatcatcaccttttctccctcaacgtattttaatcatatttaaaattttactttagaataaaaatgacactaatcaaaataaccaaaatcgactactcatcgtaatttccacataattattcaaaatttccacaattacacaatttattcttaattacataatttaacagtaattacacaatttattcttaattacataatttacagtaattacataatttacagtaaataatttaaaagtaaatatagattatactgtattgattattgtttagcatgtttgggatatattattattgttgatctatagtaaggataaaaggttaaggacaaacacatgtgtgtttttacatcactttgtttacaactgttgccttgacgaaattgttattaattcagacctgtaccataaacacattaaacacattttaaacttgtttctaaccaatgtaactagtagtggtgttggctcctcgggagccagcagtaaggataaattaaacctgtgtataatattagtcaagttactccagtcattccaggcaagtttaaactaaaataattaactttagagcgatgaggtcatgactatattcctaaccatcgtcaataatacgatagataaacatcaaactggtggtcaaatcacctcagttgacactagtaattccattttggacagtggagagatggaaattgtgtacgcaattttggagattattgacattgttgacattaacgtactacagaggattatcaccttagtctcgtcgaatgttaagttaaatgttgcagtatataaaaagttatattcatacctgaataacattggaatacttaacctgttgtatatattttacaatttcaaacatttgtccaaaaattcaaccaatccaactcttaccaatgttcctaatgacaccagagtacacaacgaattaactttggagtttaataaaatgatgctgaaatgggtgagagaaaatggattcgataagtttataaattatctcctcaatagtactttgcaaattaatattattgtgtttgtactgtataactttttcgaccacgtgactcacgacagtgagaatccagacttgaaaaacttggtaaccaatgagaatgataatttattagtttatttatacggaaatgaccagattgtgaatttgctaatgaagttacaggagaaattggaaaattctcccggaaaatttgactccaactataaactatacattaacgagctgaatttgatattattgtcatttaacacagacactgaattgagcttatttagggataattctcacttgggaaggcttagttttactgaactggtttccaataacctagaaatggcacaagatgtaaagaacattttattccaaactttagcacaaattaacattagttatgtaatgaagtgtttaattgatgaatatgtgcaaatgaattcatcagcccttgatttcatcaccgttacgagtaatctcagcatattcaacaccgataacattgtgtataatatctccaatttgttactacagtcgtttgattataatattacgtcactcctagaatcgcttgacaatttggctgtggatgactcaactcagtcagcaggccctggaaacctgtgcaaacttgttgtgatttacgtttattttaattattataataattccatcgattgtaccgatgtggacacggtaaattatatttttaataattacatcattcacattttgcaacaaataaattctgagaattccacagactcccaactcacaagctccaatcttaactctaagattactaattctcaacttagtgacaaacttaacatgagcaaggaggaagaattcttggttaatgtgatggtaatgaagtgtatttacgtgtacaatattatgatgaacacgtaccatgataaggttatcagcatctactataacattttaaataataatatccaaatgttcaataacggtaacaacgtgttcacatacaaacttgaggttttactaagtataataattgacttgttatataataaaagagatttaagtgaggaaactgacggagtagttaccacgggatctgctactgtgggatcagctactgcgggattgggtgtggagttgaaagtgtacagattaattttgagcattttaacgtatgatttgaggattaattcgtatatacgcaatttaatcttgaccaagttggtgtacaaattgttactagtgctgtccatcaggaatgataacattgtcaaatctgccgatcaaaccaagaagtctcaacttgcactttcatctgttaatgatatgctaaaagattacttcatatgtattttggaaatgatactttttgatgatcagttaaattctaacgcagtttcaatcctatacaccaccatcttcaatctgtacaacaataataccgtgactaatactcatactattgatagtactgacactattgacagtactgttggtagactaacaagaggattagtgatagaatcgataaaatatgtgatatcaaattcgatacaatattttattatgaatgtggactctggcactgtaagtagcttcagtagtataatttccaggttaaaaatactactgattaactgtacggataagatcattcacaatgtaacgattttattaatcctgtttgtaaattataagatgaatgtgatggagatttatgacattatcaagtggactgtaaaacctgagttctcttccgagctcagtgacctctactcattgttgcacttttacagtgttaatattagcggcaataagaagttatacagtcttatctccaccgttaggacactggtgaaccctaaaactaacacagtgccaaatgtaagacacatacaaaccatcactgaaaagtataacatgaacaatgatccctctccattctgcagatttctcttcaaccaataatttactatacaaattatacctcttcaccagtatatatatcttcaatagtatatatattttaatagtatgtatgtatatagtagtatatatacggtagcaagtgtatatacaatagtatgtatgtataagtagtatggaggagattaaatgtagtttaagattatgtgattgataaagtgtttaaatcgttgattgtttttaatattttgttgtattgaattgatgggatcagtagagttagttacactaatcaacaaatcctttatatcttttatataaccctttaaatcctcatcagactttaatctcctctttatctcagggtcaatttcctcggccaagtgaccattcaaatggaatgaattattacagactccattagaatttaaagagctattaatgtcattctcatcattttttacgctatttccagtgttgtttgtgttacatttgtgtaatttatagcaatttaacgagcaaaagtgtaataaacagcatttatagcgatatttagcgtcttcattactacattcgttacagagcatttcgagtctttatttagttaatggatttacttattattattggtgttattattattgaattttaaaagtaaactaataatcttagaaaaggtaacagtgaataagaaaatattcaactttagcaataatcgcgatttctcgttctgcaaattcttcttattaaatacaaacattttatccacagaagttttatatatataataaattaactagagaggacttttgtatataatattaggagcttatgtggtaagtgattgtgacactatgtgaatttatagtttagaatttctttgtattcattaaccgtcacttcaatatcgtcaccttttttattaatttttataatatttccataccttttacttaatcttatatctgattccagtttccatatcaacggtagctggattccatcatttagattctccagtattttcacgtccttctcgttattttttacgacctcagttgtatttgttttatttattactttatttaacagtttaatattttcacttatctgacttattgacttgaatttatcctttaaactgatttctttgttcttggattccagaggataataattgacttcattgaaattaatatacaaactatacattttatctaaaatatttaacattttcagcgggttcttttattttcttcatttttctcctctaaatttttatactaagaatatataaaaaattttatatattaattttaaaggttattaaggtgaggaatgtttctgtgagtcgaatttgtagtttatcagcttgtaatggcaattgacaaggtaatagaggttcaagttactcatgtcaaacttcatctcatttaacattttcagtatttcattcttaaatttcctcaaaatcccagagttgtgcttcagtaaattgtaatttatcaccagcatcaggagttttatgttaccgcaatcaccaatagaataatcagaacttaaattgttatacctcgccagtatgctatactttgttaatatgttataatttgttaatatgtcataatttgttgtgtttaactcggaatcagtcgtagagttagattcagcactatcataaccaatagtacgtctggagctatacaaaattataaactttaaaaggaattgataaatatattcaaatgtgtttgttgacctcgtcataagggtttcattatcattggaacaaatgagtttgtataagaatttaatgtatttgtcgtagtttagtgtcatttgcttgtttgtattattgtacattactttgtatatataatttaaataatggttgaacagcctaagtacattcccagtcacagtgttcatgtcaaaagtataattttcaaaacttaattcgatattattaagttcaaaatcattaacttgcatattaagattcataaaatttaaatctttatcaaaaggattagaatttaaggagtaactggtggtattggtggtcagtattttacttaataacttaacgttgttagatttaaaatacaagtcattacatctgagacggtaacagtagagtaaactagtttccagttgttttttaagagttgaattatttaacctgttgtatatatcacacatgctactgggtattttataagtgttatttcctctcaaattcagtaaagataacttaaataatactatttctatccccttagttacagggtttggttgattgggattgaagtttgagggatactctccagcattctttaagtaattaagaaagttattatgacagtttacgccgtttaataacctttcttcatcatttaaaaatgatttgaatatgttacatttgttattaactcgagttcgggataatttagtcaatttctccaccctaaaatgattttcaccactagagtaattatatttatcactaggttcatcattaggtacgtcactaggtacataatttttactgttggaatggtcgaatggttgcgatttggtggaaactctatgataataagtgtataataaaattggaactagagaagatagaaaaacatcaatgaaaactttataagcttcaatttcatcatcaaccacctcctttgatacctcagggtcactggtttcattatttaaaccatcgtttccaacattcttgtccttatttttgtccttatttttgtctttgtttttatttttatcgttcgtattggttagtgagatgacagattgaggagtttcgtcgatgttagattcttctgatttcagtctactggagactggtgatctgggttgttcctgggcagctttgggcggattactcgtgatgttgattaaaaacaataaaaattgtatcaggggatcagaagaagttccttcacagtggaatataactgtgtaaagatactttagaaatttagcattcctggctttcaacaacagcttcaagcttccggcgttcctatcccttattatttcacgataattatacaatatccacaaattcagacattttctatacacatttaacatagataaatatttactaagtttcacagtcgcacattcatagcctgacaaatactaacacatttatttcattatttctaaaaatgtcatgtttttattaatttttatcatacacattttaatttctgtcaattcttatcatacaaacactaaatccaccgtacattattataaactgaataatttactcgaagataacattaatttacataatgacctttttaaacacactgagttccagttacaccttcctccaacttccaactcactacctttgttcaataaacacttattcagcaataatcgcatcaactcctcagatcctgaactaaacaacgcaatctcttcggattccactccaatttctcatggcaacactgattctaacatttcaaatgatacgattccacgtcggaatgaacctcagaatgtagtagaactgggtaagaatgctggagattctcagggaggagaatccagcgaggtgctggaggagctggacattatgcaaatgctcaagaataaccagataaatgaattccgccacaaaagcactataggcactaatcacatgtttacctttagatttgaacggccttgcgatgtttatattttaaactactcaatcatagatttggacttcatggaatacatttatttaagctgtagagtgcttgaaaaactcaagattttcaaagaagacactgtacttcaagtgctagacgaagttataactgatactaatgtgccagtttggctttcaactcccttttactactccttggctcacaacaatgacatcactgactacgttctcataacttactattaccttaacaaatttaacactaattatcaagataatgaaattggttcacatgatattaaacagcattttaataagccttcagactccaaagagtcttctgagaacactattcagctcatgaataaacttataaaggacgggaatccctttaaaattaaggaatatttgttaaatgatttatataaactaaatatcacttgccatgaactagttaattggaaagtggacggcacttacgagaaccttcttcaaacgttcaaggaacacgatctaaaacaggtattaccatacccttatttaactaattttaccaacaattcaacgaccaattccaccaccattcctaaaactgactaaacgcatttactcattttaattgtaactttagttgtatttgtctgagatggagaaactgaggcgtaacttcaaattatataaaaaattaatatttaataatcgcatttcgtacaacaccggcgtagtccaattaattaattactacaccaacgtatgttagcctactcatttttcatgatttagtactttaagatgcccatttacatcatgaacaccacttctttcccctctgatgacttgaaatttaagctaaaactctttggcctaaaggagaacaatcttctgaacattatcagtgatttcagttgcttcgataaactcgataagcttattcctatacactactttgacaattatttacctaatctcctgaacattgacaaaaatgatttaaagtatttttccacactcatcaccttattcagttacactaaccatttactagactacctgataatcttattttagtgtaagattatactttgttgaatggggacataacagtgactataacgacaagttacaggctctctacactgacaagtactttccatctatttaacttcattttagcataaagtacattaagaattcaatgaaattagtcgagtttatttgtaaatttagcactaaattttctcgggagtggactcacgggtaccggcttcgttaccctaatgaggaacatgccaatttcctcctcaaatggaaagagaagtggagcgatgaatcaacttaacttaaatatcttacaaattcatccactagtacaattattacatgtaaatacatgaatcaaattaatgattaaaaccaaaatcaccagtgaataaaccttaaacctagcattgaacgctgtagaacatgggaaaacttggtaggagtcataaatttaatagcttaaatcaaaatttgttaaaaatttacactgtaaatgactgtttaaccagtacaatctcgtgttcgtgcatctttgggtctccaactgctgttgttgcgcagggataccttccagagtactttactgcagtattaaccttaggacaatggccttcatttttcaatattttcagtacattgtttaacctttctcttaaaaagtagaaacagccgctattttcatgttcctcctggcaccacacgagtgtttctaaattcttaaacttcttcaagtcatccagtatattctgtgctggaaacggtgttatctcctctattctcgctactggaatattcttccactcctcattggagtctctgtactccagtaaatcatagtatatctgtcctgaacacattatcattctcttcactgaatctgggttcctgggcttttcttccttacttaaatcttgcttacctgttgtgaacaggttatctgggatatatcttctaaatctcgttcccgtcaagtattcatcaattgtactaaacgatgaccttaactttagcaatttctttccggttatgcaaatcatcggctttctgtaacttctatgcatttgtcttctcaaaacgtggaagaagttacttgcgacactgcaattaaccaccgagatgttcaccaacttcgcatagtcgtctccgtactttaaattatccaccaaatcctcgttatcattactcaactgcaagaatctctcaattctaaaaaaattcattcaattcaaatataaagtgagtttaaaaaaggggttgtaacaataaaaatgagggttataacttggacagaattatctaattttggttggaattgactaattttggttggaattacctaaatttggctccaaaatgtataaatttagttaaaatcaccaaaataactttaaacttagttataaatatgtttaattataaagattaccttgatgaggagtgatcaggtccttgtccgtcatatccgtgaggtaggaacagtaccaagcctgagaagtagttccacttagtttccgcggaggttacaaatgcgtctatgataacctgagcaccgttcatgaaatctccaaactgtgcctcccaaatatttaaagtttttggtgagtataaactgtatccgtattcaaagcccagagctgcaagctcactcaagtacgagttgtaaatactcacatcaaaccctgaaaatacattaataaaacactcaatacctttgaaaatgttatggtatttaaaagtggtttgacactggacatgagagtgtctatgggaaaatgttcctcttttcgattcctggcctgacaatcttacgtgaaatccttcatttgcaagtgacgaaaatgccaaaatctcactcattgccgtgtcaaagtttgagccagtagataaacattgaagcctggcatcaaaaatcttctttactgagttgtgcatcttaatgtcagatggtactgtaacacacttggtgcccaattctaaaagtaaattcttatccagtccagtttccactggtggatccaatttatcactcaatttcatgtcagtatcaattgttttatccaacaactcaacaacgcttttattctttcttaagtatgtattaatcaggcctgagaaactgtccgcaattggtaaccagttttggttctggatgggtacattagttcttgaaatctccttcgagaggtttaaagagtttagaaagtctgagcctgtgctgttttcaatttcatccagttctcccttgtcaaaaccatgatcttccaggtattttttatagtaaaccatcaaattaggcgtttcatccacctttgcgtacatttctgcgtttgtgaacttgggcatgtccagttcattatgtccaaatcttctgaacccaaccaagttaataaacacgtcattcttaaacttgtaacggtactttgtggccaacttcccagcaaacatcacgctttcaattgagtatgcattcacatgtattataggggcatcaattacctttcccacctaaatcacatttaacccagtaacaaaattgagtaaccaacaaaatcaacccagtaaacataatatgattgattaactaattaattttatacgtctgagggatatcttgatgttgaagcttcaagttggtttgctgtgaatccaatttggttattgacaactgaatgccattattggtattgtgacttactgatgttaattgttcctccaattccaaaaccgtcaatttttgccatttggacaacttcgtagggcattccttgtcctgaaattgctgaatttccgtgtattgctattggcaagatcttgctctgattagtgtcattctcatagtactgcttagccttcaccagtccagtaagtactgggtgtgaaaactgcaagtgacttgaatttgagatcatttgtatttccactccattcttagttgttctgtacccgttatgatattttacatctccacttctgaaatgactatttataaaccagttcgcaccctaaatttcattatacaccagactatcaaggtgttatgtaattattttaattactgataataatgacatacgcgaaactccgcgaatgattcctggagtggtttgtttaaaaagttacacaaaacgttcaatcttccacggtgcgacattgtcatcattattgagttaattccgaaatttcttccgttttcctcaattgactccagaagtaacaagatagactcaattccatccatgccgaatctcttaagtgtagggaaagtcttggcgctaaagaaatttgaaaatcaagtttatggttgaataaatagtgaaattataccaaaactgctcaaatttgactgccttacaaattgacttaaaacacttcaggtggtcgtttttgttgaattttaggaactcgtcgctttcaatctcattgattaggaaggcgacttcttcggagttggcgatatgcccgaactcgaaggagatgttaccacagtaacgctccttaagcttctctgccaactcctccactgttccagtcatgttgaaaacacctccgattcccagatttggaatcttcttagccaagtcatccttgttaaagtatttattaacgttaagctgaacaattgttaaatttaatcttgtaccttatcgtaaattccgtctatatttctgaagaaaggaacttcttttgggagttttaaagggtctaaatttgaaaccaagtgcccaaacgtcctgtaggcgctcgccaactcatttaacttcaaaacctcaagtccaaccactcctacacaattaataattccagatctattaaataccgtttgaaacttttgctaagagttcagtggcctgacttgtggtctgattaccagccaaaggtccggcgaatccattctaaaacaacaataagagggttcgcaggttgaaattctaataaagattaattttgcttacatatttatgtccgagttttctatctatttgtggaagtgtgtaggttttgccttgttctaggagagagaaatagttttgccatgatggctgtaagtgttcggggttggtgcgataaacgtagtaaagatattctagataatttaagctttcgccgtgaaagttctcaacctgcctcagctggcggcagattctaattaggcctaatctcattttaaataataataacttatgattcaacccaacataattttgattcgtattacaaattaaaaattccaacacatttatctctaaatattatatatataaacaattaaaattaaatttatggttgttgaacaaatttatcacgatttattcccaaaagcgccaagtgtgaatacatctcatgtattatgttgtgaatattatcaatccctctatttgagtaataaaaaaataaaaatgaaattaaacaatagtaattgagtgtgttttgaagtactgatcaactgattccagatcatctagatcccaggagttacctctttcgtacatcgccttccctagggccactgaaaccagagccaggcgaaattggattataaccatcagagtgcagaaaaaggaaaaaacgtacttaactatgttaaacaccagggatctttttgacgagaaactcatgcaccaaaagttgaccaaaacgcttatctgaaagaatatttacagctctgaaacttacagacgacacagttagtataaactgcagtaacgttggcattatgacgaatatgtaattgcagtaaacgatggcgagtacgtataagatgaaagaggcagaagaaactatgcttgagcaatagcacaggccgatcacaaagtctgagaacttgcgagagtttaccagaacatatattaatacgttcagtgataggcaacatgtcaatagtgatgtacaaagtgggtaaacaaccagctttagaacctcgcttggtttcgaccctctgctatgccatggaactttataccatttcattttcttttaccctgttttcctccaattttactggcgacttttctttattttgattagttctcaattgatactgcgactaattaatgatctttgatatataaactttaactgaaatttttagaaaacatttttgttaaaagcttcatcctattcattttattgtgatttaatgacatagaattaggtttacttcatttagtattttacagaatttatacttgcatttgggtaaggttgagtttgacggtctatttgaggtgaattaaaactacatttgggtttaagctattttacattaagttgtacaaattagattttgatgtgtttatctatttaacatatgcgttatcagaaaatttacgaaattaaacgaattttccccaaaagatcttaaggaatcctaaattattgttcgagaatctttcggattaaattcatctcatacaagttcagaggattatattacatcattagatctcataatttatcgatatttgaataaatgggaataccctacttcagctaccggctagccggctttcatctttattttatttttttgggctattttgaccccatccatatacttaatttaaaaatgtgtattatatttaatttttagtaaaatgaggactcgtggtttgagggttgcctttactgatgagggtcgccttaccactttcaaaccttccgatccatttgagtatgaaaaaagaaaagtgagaaaagtatacgggactaaaattactcaggccctgctagcctctttacctgatattaactcaaaaatcgacaactcaaccacaccaaaccatgacaattccaacttatccaatcttatctccgtacctacaaatttacagcctgattccaaagcggaaaatacccaaaatgacaaatcgcatcatatagacgagagttatgtgaaaaccatttctgataaaatatgtgactcttgttatgacatgtattcctactgtaaccgtacttttaagcgtaaaatatttgagatttgttcaaacattaagcgtgagagtaattctgagctccgtgagaaaattttaacccgaaaaatgtcaatttctcaactcctaaccactgaaactgtggaacttgctcctgaggacgtacgtgagaaacgtcgtcaagatattgaaaaacactatatcagaaacgttataattaagaatccagacactgttactgctaaatttaaacattttcagtcagaattctcaccttccaatgattcttcctctaataaaacacctgttccaccaactgccgatcaaaaaactgaacctaataactctggcaaattagatactgaggataaggaactacctaaggatgaaagttctcagttaatggccagtctgaataaaataactgagctatacaacatgaacaagaaggctcgaatcatagaagacgatgacataaagttatcgattccaccgaaatcagacttttacaagtttgaaaacgttcatgaacggatttctaagcggttaaactcgcttccgaataatctatctaggccattttgggacccattcaacaccgccaccagacgcgttgaacttttaatggaacgatcatcaattttgaaaaataacttacgttaatatactaactcttgctttatacaatttattaaaatttatgtactttttatgtgtttatatctaattatgtttacacagggttatcaagttttggttaagtatttggcctgtattactagttttttgatttaaatagattttatacatcaattgtgttacgggggcgttgaaattaaggggatcggatccaacaaatcgaggcgtctcggtgtatagcattttcagcagaatttaacagaaatatttttaatgttttttccaaaaataaagcgtttttattgattttaaattttagtttttaaaatttagttgaagtacatttgaggggtttatgatccattttgaggggatagttgcacgaaatctggattcctgaacatggagacggagatgaacgaaatacacagtgatgatgaaatagagctgatatcgtctttaaatctgagggggaactctctggaggtctctcggaaggaactgagcggactagtggagaagctcgatgagataaataattttgataagaataaacgaaggactgtaaacacactggaagattgcattaccaactctactctgagtatttatgaccttattgagaacaataataaaattttagaggacactaaaaattccaataacaccatatcaaccaacaatactatcgagttggaagctaaagaggagccaaaactcacaattgacatttccgacggcgatattaagttaaacatcgacaatgtaaatataaaaataaaatcgcacaagaccaagaaatcaacctctagcacagctgatgaattatctattgccaataatctgaaagacgccattactgatggtaccaagtatcaagtgattctattaatattattagtactgttaaatatattccgcaagtaaactttttaatgtttttcccttttctacattgtatatgcttatgagttctactacgaatccaaaggttacgtggctcgatacgtagttatacaggttcagtgacttgtaaaacaggtatgaatccactccgttataggttctcgcgttattgcagattacttccaatgactccttcaggtgaaacacagatgtgtacctactttccttacttttgttcattatatccaataggcatatcggattttgtattttttcgtaataatctgacaaatactgcttgtttggcaactcattgaattcgacataattttttccttctatcactccttcaactatctcaaatattactctgtttagtatactaaacttcttttcgttatccttcactactaacttcaacatttccttatcgacaaatacttccacatcactactctttttcttacctatctgcgtataatcttccactgaatcttcaccagttatattcttcagacactcaactgggtaattaatgttcagattcgtgataatatggttaatgttaacttcattattaattgtgttaatataacttctagagcactgtgccgtcacttctccgctatacacattataatcattgtatatattaagccaaatctcattttctatcgacaattttttcttttcttcctctactttaattgttaggttgggttggttatttaattctaattaccagataaccaattaagttaaaactaaataaaaaaataaaaatgacagtttaataaaaattataaacaaatgttaattaattggtggaaataaccaaaaactcgtacataacaattacctgagatgtgtaattttttatttgacgttattgacttaaacagaaatggcggaagcactctctgcttaattagcgccagtgggttcatgatgaaatttctataacttactaaatcaaacactttagaatcactttcgttacgcttcaatacattatttaagagtggaacagtgtctattatgtgatcgttatgatccacatcatcacttttctccttgtactcttcgttatttaccatatcatgatcattttccagcagtttaccaggtttctcggatccttcaactgtttcactgggttcattactttgtaaatcattattttgggaataattactttgtaaatcattattttgtgaataattattttgtgcataattattctgtgcataattattttgtggataactattttgtccataactgctttcatctttagtggaactatttcttgaattaatgttatacttaaatctatatatgttatcttcaattgtgtttggcgtaattagtctcaacgtgataacttgatttttttgtcctatcctatgtactcttgattgtgcttgaaggtcgttttgtgggttccaatcagagtcatatattatcactgtatctgcactctgcaaattaatccctaataatcaattattatgaaatattgttttatgatagttatctttaattttacctagtgacccagctttagttgacagtatgaacacgaagtactggctgtctggttcattaaacagatttattctctctagtctcttttcactactcaaatttccatccaatctcaaatatttataacctctataattcaaatatacctacaaaattttattcacccaattattcatatttacctagtaactgtatgtggtatcaatttactctatcaggctattaatttattctatcaaagattaaactattgtctcagtagtgaataatttattacttctaaaatgtctaaaagtgaagtcatttggctaaaaatcaacactcggtggtttacgtaatacagacgagacagtatcatgtccagtatacacatctttccactactattaattatcaaatcattgcctaaaacaaatttaaaacaaatttaaaataaaatttaactaatagtctaaatagttaccacaaaatttaactaataatctaaacaatcttttaaataataataagaatacttacagggaataaagttgctgttgatgtacagaaaggggtgattacagattttccttagctgtaagaacttgttttgtgtatctttcatgtggaagaactcatataatcttgtttgtattccactcattgggcagcttattatgtactcataactgcttggcagttcgtccaacacatcattcttcatcctcttcaaaacgtacggttttagcaactaaacagaattgtataaattactttcaacgattattcactcttaccttgttgaaatagtcttgattgatcatcatactattgttaatagacaactgaggctttacaaaattcaacaacaacctcacttcatttatattgttctgtaacagtgttcctaaagatttgtgaattcggtaataaattttaatatttatcccactataaaccaataaaattaccggtcaacaacaatctgcgttttgatatgaagaggttatttaatattttaaataactttgaattttcactcttgaatttgtggacctcgtctataatcaagtattcccagcatattttcttcaaaaaattcttatctctcagcacaaacgtttcactggtcaacagtacatcgaaattcaacttgtttccgctgtaccatttcattctcaaatttttacggaactctctacaatcaggttaatataaattaaataaagtctgtggataatcagaattctaatagctatatatacaattaaatgtaaactttattgaggttagtgtgtaaaaactaacttggatccttcgtaaacgcataatttaaatgatggataccacaactcgaactccgttttccagttactatgcagtgtcgacaatggagctattactatgtgattaccgcttattccctggaaattattcataaataaataattaaaaatataattaatatcacaattgatatttgtgatttaccttattttctttaaggtatattagtaatgcaatggtttgtattgttttccctagtcccatttcatctgccaagatgccgtttagtttattattgtacagagataccagccagtccaggccgtatagttgatagtttctcaactttccaattagtgcgtttgggatattattaaatatgttctcccttataatatactctacagtttccacttgcggtaaaagctcctcttttttattgggttcttcccccaaagagtcttttgttctgtcctcaataccatctacactgctagcttccagtgcgttaggctcactcggttctggttcggactctatatacttgtttacatacttatttgatagaattattaattttcttttcatcttggagtggtctttatagaactggttatttattttaatatgttctaaaaagtacttcttgttgactgtgttaccagtgctacttagggattccgttcgggttgtatgtgaagatgtgctcgagtggccttcactaaatgagccgcgaaagggaccattgttccgtttatacaatgggtttattagtttagtaaggctcaatatggatctaacgttcttttgtaacaaaagtaggtttattttcttttccaattttaatacttcaatcaacaacttattatagtcatatgtataatcatgtgtttctgtgttatttgtgctagtatcactatatgttgtttcattactcgtttgggtattgtttatactccttgcatgattgtcgttgagtaagtctgttgagttgtttgtttcatctgtttcatcagtattattgggggcggtaattttgtacattgttaaaaggtttttcagtcctatatctttgaacaactgttcgaatttttggataatttgcttattattgttattgttatattgtattatgtgttgtgtcatagttttaacatttgtgattgcccctagaaaaaacgagagtttattttgctccaggttatctttatagtctatccaaaagtgaccaggcccccaaaattgattttttctatgaaaaacatcactcacatcaacgatgtctacactttcaccgttactagtcagattttgattatcatccgaagttgacatatctgaactcgggtcattggatgggtactcataatcgactgtacacttggggttacatcttgacaaaagttgtttgggtatcttcttacattttgatatatatttggtgtacgcctcaatttggctcaaaagtgttttaaattgtaaaggagtgaatggattctgtccctttcctgacaaactgttccattctccttggttatctcctctaattgctctaagtctgtttagagaacacaacaagcggtgatatcttacatcttggtaatccactcccgaattactcaatttatataagctgtatactacatcattataattattaaaatccatctatcagtttaggattggaataataaacattaaacccattgattatccattacaatttattttaaaaaattaaaatgtacaaaataaaaaaatacatgctgtaatatactcaaatgacctacacattacactacatggagaatccgccactatatatgaataaaactagagaaaaatattaaaccgatagattacagattgtattttggcttaaattgtctgttaattaaagttcgggcatgattggtatgtcgaacattttaacatttggcgcttttccaccgtatctctgctcgatttgtgacggcaacgcgacttcgagtaattttttggtatttttacctataaacagttaaatccagttttgaaactacctgatgatataacaattttttcctgggttatttgggggatgacatttttgactatattccacaacaccgatattaggtacggagcgttgataacatacaacttgctcaacctagctctgtagtttaccgacaatgacttggcaatttgttttagaagactagctggtatgttgaagaggttggttccgtccaagtcaattattactttccactgctcaatttgtccgggtatcaagagtttttctatacagagctccaacacaaaatatatagttttgaggatatgctcatgctgggaagtttgcatgttactacaccttataattataatgggcctcatacacttgtcgcggccatgaatatacacgaatccctttgcctagaaatcatgataacaagttatactaataagatattgggtaaactaaagcatatatatgagaacaagtggactattgaatcgtgtattttatcttaccaggtcagattctatatcaactcttttaattgggagtgtagatttgcgccatttaaggtgattgtacatatcgtttagaacgttagaataattatatccattgcttattaaataacgcagaatataaccatcgtttccgaaaacggtatttttaaagcgtcgttggtaggattctactgcagagtttgattctagttgggggccatctagacgctgagttgcgaaaattttaaagtttcgaatatgctcgttttcaaaatccgaaaaatcaacgttactaaatataaatctaacttttgtaccgccctttgacgtctatatataaaattagtcatatgtatagtggttgttaattttttgcaaaatatttaaacatctgatttaaattcaaaattataataattttaattaaaagtatattagatatatgcttaaaaaattaccgattgaatcacatctggagtaggtttgaacttttttacatactctggtataaatatggaatctaatataggatcgtcatattcgtgattttttttcgattccaataaatctacagatgtaactaccattttaaaattataaatataggtttaacaaaataaatggaattacattcaactgcaccatattggtttagtacatttcatattgtgttgtttatacattaaatcaaattcacttttaattaaaatatctgcactttttcaattattttttaaaaactattttcaaattcagttactttttaaccatctttgtacctttaatatctcaccaattacgtctccattgggccattttatataatgtacaagttatttcaaaaacatttcacacgattaaaatatttagttgtttctcaacgtatagtttctatagtctggatatatcacctgtgattccatcaatttttttactcgctgattttcaaaaaaatatccatttctatttatttttatatttatataaattaaataatttattacatattaattattaatatttgctctctaataatcttagttttactgtcaatttgattattttcgataaactgtttaaatataaatttacaaattttaattaacgtttttctttataatttcttacatatttttattctatatcattttaaaccaaatatttggttaattagaagcggtttcgtagtgtagtggctatcaccatggactctgaatccattaacccgggttcgaatcccggcgaaacctttttctgacccagtcaactattttaccttataattatgtttaatcattctcaattaaactgtagtattaaatgttcaatactagtacttaattacagtattactgatattaagtaatttacacatatggaaatttatgaatttaaattcatttttataaaaaattataatgtatgaaaataaaataattcttgaaagttaaaaaattatcataaattacaaatatccatctggatatctccaccttttcatcaattctttataactaaacattatcaagttatatatagtgttaacattagaaaatatttattataattatatgtaattctaaaaatgaacttgaaaggcttaggtttgaggccgttttgtactctacaggaattttcagccatttgtaaccatcccattaacatccttctattatccactctaaacatagttaaatttgtattaaatattaatttttactttggaggaaaattagctagaaattgtgtataacatttatttgtacaaaggtcaggaattgatttataaaaaacttccaaactttttttttgttgttcggtaggattctcatcagcataagcaccaaacatccataactaaaacattttcaatatgaaaaaacattactagtatccactgtgagctgcaaggatcgatggctttattattatccactgcttccaaacattcctcaaaagtatacttctttgccattattttattttcatccctttactatttaaagaaatagtcgacataacgccatataatacattctacacatcttattcactccccatcagttacacattttattgatatttatctatgcttctttacaatagattcttattaagcaaatttgagcctgatgttgtaaaaattaatttttctaagaccattttaaacaacattctatcaaactcaataggtaattgttccttcctttatttagtcattttattttttatcatttccctatagaataagttatatttcacaaactacactgttttcaggaaatccaactacaagagatgaaataattcattataaaagagcccgaaagttgaataaactgtcgcctcttatttttaacagatataaacctaaggttaagctattggcgtccactctgagttctgattcctttcctcgaaaccagattcctgaggttttagatttatttattaactttttatttagatttgcatattcggtgcttctaagtctggcaaatctagccttttgaatgccattttaaacaaaccaaatttatcaaaagttcaattcaagactaacaaattacacttctttcaggtacgattttctcttttatttatttcactttcttattcctaatctaggttggaggaagtaatggtattgtgatgttggttgatatgccaaactgtattaaacagaacaaacccgacgagaatttaaagaatgagaagatattggaaatttgcttaaattacttaaagtaccgagaaaacttggtattgaccattatcataatcgactcgtgagtattttcatattaacttttatttttagtttaaaagggatcactagtgaggatctacacattataaacttctgcaaccataaccgattaaactttttagttgtcttaaacaagtctgacttattcaaacctgtagaactaactaagaaaatacaaacgatggaaactcaactaaactcgtttaaatacaagataaataacattgtcccagtatcctcaactaaactccaaaatattaaccaattacatcaaattttgactgatttcataaataacaccaagagcaacaccgactcccaaatcgccactcccaaaggcactcggctccctaaaattaagaacattaacactcctactaataacttgttggatcaagccaattccgttgaaaatgatttggtacctagtaaagaagatgacggttttcccaatgagatgtgtgtcaacactcaaatcaaacctatcaacttgcctaataacgacaacgtattcattaaattgaacataaatatcaacgatttggtcaaggccagtgatgattccatttccaataccagtagtttagtgacttctaccagtccttcacctgccagtgaagtggatgaaatgaagtctttatttgatgccaagtgtatgaatgccttaactaccaagtatagagtaaacaaattaaaactgaacacgagttataagagaatattcaagctatacaggtcaaaacaactttaagtttaataattaacacaactaataatatttttaatgtataatacgtgaactatattaataaatacgctcaggaacgatattatgatgaaattaggtaatagcccattgttaagagtacgaatgagaaaattgtagtaaaaaaagatgtgattttagaagtcgtttttagagaatcgaggaataccgtgttggtggtgaaggaagtaaagattaggggcctcaaaatagctgagtaaacaaccaaaacaaaaaatataagataaattaaaagccataatttacaccttagagcaaatttcattaaatttatactaacaggaatcaacacaaccacacattacatttataagttatctgttgcaaaaaattcagcctaaaataacacgcgatgggttatatttatagaaaatataatggaatactggctaacaagttcttatcgcactcttctttcttcacttagtaaagccaattcaagacaacaaagtacaattttacttatttatctcccctttgtttatttattgttgattatgaatccttttacttaatttttaattaaattctagttaaatgactaaataattaaatgtgtttatatttaattggtagatatgctgttgttgaacgagataaatgagactttcccggatttaatggtcgaagcctatgacataatagcaggagatcgagtgacaaagtatcagctgagttttgactctgaatcagacgaagcggataaaaacccaaacaaacacaatccacacttttacgtcgtttttgacaggcaaaagtcctaccttgcaatcaatgggttttgtaattgtaagataaacaatttccaagtttttataattaatgttcaggtagcagatatgtggatcaagttttgattaaagacaatgaatttacggtataataataaaaattattatatactaataaactctatttttagtgtgttcatgaaatcgttacctttattttaaactactgtgatccgaattcggacgaatttgtcaataaggctgttcaaaagactgtttatctctcagattcagagtattacaaaaagttggcacaaatgaggaaattttaagaattcaaactagtttaccagctccgttattacaaggattattttttatgatttaaattgttatttttcaaacttttcaatttacgttcgtttaactccacctattgaatagatttaaaattattgtttaaatgttaaggactaaatataaccttggtaaataatgtttgatttaaaaaattagataaggtttcgccgggattcgaacccgggttagtggattcaaagtccacggtgatagccactacactacgaaaccttgtggtagaccttaatttgtacattcaaatgtttaatattggtaaaaaattaaaaaatgtagtttgaaattattttagtagattttgaaagttgaaaataaaatttaactaataggttggacaactctgagtgtgggctggccttggcaactctaatttcaaaattttaccatttaaattaggaaggttcaagattctattgaaaatgcttacacactttaacagaacagcatttatcgttaaaattaaccataattacaatatgttatgtccttaatcaagatttctagcaggaaaaaattgggacctgcaagcatttaatttgctgcagtgaacttgcaatcaatttatgtaatccatattggctatctatttatatcattttatattataaacaattttccgctaaattgatcaagtagctatcttccataacaatttgttaatcaatcaatctagaaacttaacgtttaaagttcataaaatttgtaatagatactaactaaggttgacttgaaatcattactgtaaaatatatttaaataaaagaaaaatgcaattcatcggttttgttgttttaatatccacactgctggtaggggtgaaatgtaagaaggatgtaaatttcaatcccaaagtattcaagcatttatgccgaactttcacaaacacgctagcagttttaacaacacacattggtcaaaaactatatttacacgagttgggggagggtactggaggcaaattaatgttgctacatcataggcttctcgaatgtgatacggcttgtaaatcgattgaagctattgtagtcccagatgacataggaaatcaaccatttatagttgatgctgcattgggtccatacagaaaagtaagcgaaagtgaacgcgaacaaaatgacgtattgattttcaattttatagaaacggcttttgacgcggttgttcctcttattgaacttagtaaagtagttgcagcaatagcttttgtctcaggcgatatagcgggagcagaaaaatatatggaatccttcttagcgagaagaagtggattcaaaatgaatactacaatcatatcaatttccatcactttaattctcgtaatatcaaattacttatttggataggattaaaacctaaaactaatgttgtattaccaaaatttgaaacggcaaattttcaaatacttgctactaaaaatacatattatttagctctaaataacaaattagacagggaaattagccataattatagttagttattggctgagagaaaattctattgagaaaacttggagatgcagatactcaattagaagcaaccagcttccatacgaacttcgtgatctattacgttaaaaagaaaaaatataaagtttaaaaaatttaaaataaataataattaaacttgatttaaagctattattgtgaaatacatttactggaaaaatgaaggtaatcggtttcgttgttttaatatccacactactgttaaaggtaaaatgtgaaagaccacacttgaatcctgtattatttaaaacactttgtactgtattggttcaaaaagttagtggattgttgtttgatgttgaaagtaggggggatccaagtgtgatggaccagaaacttgtggatagtgtatcagtgtttaaagaaaagcttaaaacttgtgaaatcgcatgtagagagattgacgatgttgtactaccactaaggttggaagaggaaatatttataaatgatgcaatgatgagcggatatggattaaagggcagaattgatcttgataaaaccgacaggaaaatttactattttatagatactgctttcacagcagctgttccacttcttgaaataataaaacaaggactttttgtgtgtatttttacaggtgatttttcagcgtttcaagaaataataaagaccattgcgccaaatcaaagtggattcaaaatgaatactacaatcatatcaatttccatcactttaattctcgtaatatcaaattacttatttggataggattaaaacctcaaattaatgttgtattaccaaaatttgaaagggcaaatttccaaatacttgctactaaaaatacatattatttagctctaaataacaaattagatatatatttattttgaaagtatatgaaacaatgtacttaactatgtcgggctgtaatgttgatgatttttgaaattcggctacacatttcattggggatttaatctttggatttgacttattttatttagttattacacaatgtgagaatttttggtgttgcttctaaatcgggaacgaggcaggttctgcgtaagcagaaatctcagactgagggaaagaaggacgtctcattattataggaggatgttgtacaactaaaaggatgaggaaacaagggagttgtttaggagataaaggggcgactttacagggtagtatagggaaaaagaggctagagacgagatgcaatacctttctgtacttgttcgtactcgacgatgtgtcgtctacgattaagtacagatcactaaatatatttaccatttccacataattgaattacaaattattacaaaatgaaatacactccagttgttttaagtttattaaccatgggcttagtaaaagccgcaggtaaagataatttgaaagtcgtaaagtctgacggcgaatacctcgaatggaaaaaggctgcagagaaggcaaagactgttggtgaagccaagaagactgaatttgatgagcttttagaaaagataccaaaggactcacaagatacccccaaacttgaggttactaagatcaccgaagccctcaaaaaggtcactgataaggtagccgaaatcactgctcttgaagcaaaagaattcaaggaagccactgatgaaaagaaaaaggaagcattaggagccaaggtcggaaaaatgggagttgagttggctgatcacatcattgaattagacggcataaacaagaaggcacattcagttgcctataaggaattagtaaaagtccacggccacgtcaagatgcttgagttcttgaagggaaagatcgagagcttggagaaagacggatttatggccgcctcccttctttcagctttggctctttctgctttggctgtcggtgcatccttcaattagaccatctaatttattcacaacaccatatacattattatttattctgcaaactatatgttaacaaggaaatacttatctcgttgaatagaagataatttaaattctatattctaatgtgtaaatgttgtattcataacccccataggcataagtgttatcgatcctctaccatatttatccttttatttatatatatcatttattctgaaaacctatcgcataatacatataaatggattatccattctgttgatggtttataataaatggctcatcatttattaatactaaatgattcaaacgaatcacaattgtgtagatttttgttgaaaacttgggaaccttcttttcctttggttgtattatatggaccaaaaattcctgacaaattgtcagatttatacatagaatcctcggagctcgaccatcttaaagattctgcaacggattccaataattataaatacacggttttatacaaagaactaaataaattaaattcattaacacaacaaggtattttaataaacacaaatctttgtataattaactatcattacagaatttgaggagttgtataataacttactaaagcatctaaaaacggtactatttagaccacttttattgttatttaaaaaaacaaacaatttcttacctaacgtcctctttaattttaagccaatattgcttcatttctatccactatataacttccccaaggttgatggcagcaacaacacgtacagggaagataaaaatttactgtattggtaccttgaatttgattataacttaaacagtattgggactaacaacaggttactggaacttctggatgagctggaaaacaccatagaagagtataacttggataacaaatttgttcaatcactactatctttactgaacatgtactttgctactatttaaataatttagtttattattttgtttcttttataatggatcactttaggtatttcgacaggcttttgtttagaaacatttctttaaccaagtacacaaaagtattaaaatattcaaagctatactactctcttttgaatacccacttgtcatcaactagtacctacactccccctaaaggttccagtacccctagtactcaagatacaggttcaaagatgagtgaaaacccagaagttggccctgaagagttggataaatccagtggagctcccgacaagttaagcctggttgattacagaaagttgttcctggaaaataagaaaccataccacctggccagcgcaatagcttacacaaacggcctaccacatgttggtcacgcatacgaggcagtgatctgcgatgtcataagccgctactacagaatgttcggaaggagagtcatcttctcaacaggaacggatgaacatggaatcaaggttttaaccactgcaaaacaacagaacaaaactccaattgaggtgtgcgactattactccaacgagtttaagaaattctacgagaggttgctggttgaatacgacaggttcataaggacaaccagcgagtcacacatgaaagctgctaaaaccatctggagaacagttttcaaaaagggtgacatatatctgggtgaatacaacggctattactcaatgagagaggaacgttttatcccgaatacggaagccaaattaactgacttcaaggacccagtttcagggaaaccatacgatttaatgtcagagagtagttatttctttactatggaacgttatcgcactcctctcgttgagtatattagcacaaaccaggatttcatataccctaaaaaagtcagaaacgagattttaaccagacttaaggaccaactggacgacttgagcatttctagaacctcatttgactggggaattgaggtgccatccacagacgacatagtcataacggaatacgttaacaacgacgttaatcttgggtataaccacgacaataagttgtttaacgagtctaaattctataatgaagttaataaaggagacttaaccaagaaggttaaagcttcacactcagatgatcagtctgacggtgataagtctgatcaaagcaaagtacctgtcagctccaatcaacatcaaaattccagtaacaacgttggtgctacaggtgttagtcccactagcaaaaaaacagagcgtgaaaaacacgttatgtatgtttggtttgacgcattgtcgttttatatgacgtcatctggactaggtgagtctttaagcgaaatgacgtattggcctacagatttgcaagttattgggaaggatatttcttggttccagtccgtgatacttgccacgatgtgcttctcaatgggcctacccctgacgagaaaaatactggcgcacggctttattcaagggtcagacggtcgaaaaatgtcaaagtcgctgggtaacgtccttaatttggacgagttactccaggaggttggggtggaaagttttaggtattatttgttaaagagtacggttatgggatcagatgttaactttgaccaaaaccagcttaaggaaatgcataactcagatttagcagacaatgtaggaaatctggtgcacagacttacaagtctggtaacaaagtacaatgaaggtgttttgccatcatataagtccaaagttaaatcaccatttgattttgtggaattcatgaaagagtgttcagactacgtcttgaagttggacatatataacgtattaatgctaactaatatgaagtttaaggatctgaacaattacttgacggttactactccatgggctgaaaagaaccaggacaaaagagactcggttttacgagttttacttgaatctgtttactttttggctcactttctatatccagtgctgccgcaatcaatggagcgcctatttttgaagttgggaacaccaaaaaagcagaatgtttgggagttatctcttaacctggataaccttgagaaggattctaatgtttcagtaggggatattttgtaccaaaagtttaatttgccagaaaagtcaaaggcttaaacctctaaattatttaaatgtcagttttaatgattatattgacaccaaaatctatatatcattgttaatcattatatattagactcagtactataaattaatgtcagtgctgtatattgatgcgtactatctagagcggatgtattttctaaaataggcccagatgcaagctaagtgagtattaaaattaacgagatgttaaaataaatatttttaaataaaaagatggctggaattttttacggggaaaatttgaggtaaaaaaggcgcggaatttttgcaatcacaattaggagaaaatttcagggttgaaattacaattaatatatttacgaaagaccctttaaatatacttaagtaaatttaatgtttaaaaaacaagcaaaggcaaaacaaaagaaatagatcaacaggaaagcaagaccaacaacaagtcacatctttaaaactaaatatggatgattatgaagatgtgtcagataaaaaacacatatttgaaatatatgtaaaacaactggagttagaagtggaaagcaagaaaacaatcagattatcatgggaatcaggtaaccttccacacatttagaaattttgattaaagtttgttgcgatattgcagcagtaacttttgaattagcacatattggttaataaattcaatttaggaaaacagaagtctaccagtgggaatgtgttggtttatccaggactctcaaagcaccgagttgaagaaagattaattctgaataagctttttgacccaaatgagcaaaatttaaccaacttgaaggtaaccttattagttcatataattattagtccttagttatgtagtacgctaaagtgaataaggatttttaaaaattttaactaactttctaataggttcatgaggttactggaaaatcatccgacagtttattgggacagaaagaactggatttggcctatcttgcaaatgtgactaacccggtgcgaatgaaactaacaaatcaatttggagaacacataaagctttacacctatgtcacggtaaccccgccatcgacctcagttctatctctcaaatccttttcggcacaacgtaattacttataataccttacatataaacccttatttacaataaaattgcttataaacaattatttataacattaattataagcaagtaccataaatgacgttataatgttttattttagaccatgaagggtctgactttttaaagaagcacttaagggatgacttgtcagatgacgtagcttttgacgaaatatcggtatgtttcttacaatttaattaatttattaggacacaagtcttagtgatcacaagatttatggcaaaatcaccaaaatgtcagagaaacttagtaacatcgaggacgaaatactcaaaaagacctataagttgaacaagctgaacaaggagaacgtagctgaaatgaccaagatcaaaaacaagcttgaaagggatatagccaagaaggatgctcagattaaggttttactatcgcagcttgatgagttacacactgttctttcactgtcccatcaaagagaattggagttgactgagaaaatacgattcaacgagtccataccaccaagatcagtcttaggagaaagccaactcttatccgaaaatggatgcgggacattctcaacccgaactggaccaaaaaggactaaaaagggggacttgaactacactatgtcatcttgcaacagatccattttgggtaagttttcacttttaaataatattttagatgatattgaaaccaacatgaaagacttgcagcgttttagaagtgtaagttttacaattcatagtcctttcttaggaatttgagagtataaatgaccctggacagaaggttaccagatgtagggagttaattgaaaacttgaacagaataaagaaaatccccaagcgtttgactaccaagtcatcactgaacaaccagacttttaaccatactttaactagcagacactcacatgtttcaaacaatttcaacgcaaacagtggcaccggatatagcatgaacgaccagcacagcattaaggggaacggggttttgaggcacaagatacctgcaactaacacaaacgtaaacagactgggaatgagccatttcgactccaaaaattccgccatgaaggtaaatttaacgataattaacactagaaactagataaacagatacacacggtctctaagtactactagtgtgactttaataatgttatttacagctaaatgatttgaaggggaacactggtaaagctgaatttaagcataactcaggactctctgttccaagattagttgaaggcggtggattgaagggtaagataaagggaggaggcatattcattccaaaaacccaggattttgaaagttagtttacctttattaaatacctaaaaatatttatttttaaagaaaacaattgaataacaaaattttaattattaaatcaatgaatgaaagtcgggataataaaatttctttagattgcggagatggtagaagtatcagtgctctagagagagaattggctgaaactaagatcaagttggcagattcggaaacaaccaatgatgtgtatttaaaacaaatcctatcaacaaagaaataatttaatattttataattttatgatacttcgcctaaatactaacctcataatgttccataaatatctacgcagtgatctaaatcacataaattattttaagggatgcggataagttaatatgaattattactggccactcggtagtgacactagtggaggttcaaggccattaaaactcaagttagaatccaaaacagaatcctctataatcagattaaaggagaatcacattaagttgatttcatcaagaatctcaggcaatcttgataaaattatagattctttgagtgaacatgaattaaatcgactatactcagagataggaccgattcctacaactgcaaatgagttttttacttttcttggatcctttatcccatctttctctgatcaggatagaccaacaatattgatcgataagttaaaaaattattgtaaaaaagaagcacaactcgatcatttggaacatatcagaaaggattgggaacttataactcggataacaaattcaaataaacttgagtcatatataccccttgtaaaattagaaggaaagactctagagcctttattgagtcagttagaaaggaagaatcaccttttaaatgacaaagaacatgattttaaattactatttccctcctctggtccagtcaggttgaaaaactttgtaaaaattcatcaagttggtcaaggagcttatggagacgtttggttggcagaggatattgtaaataagaagccggtagctttaaagaagctgaaactgaacgaggagagggaggggtttccaaaaaatgccattcgcgagatcttgttgctgaactcactaaaacataaaaacattgtaaatttactaggtatttgctattctaaatcttacagcacctcattgttatctgatggattgagcagtagcaaagaagaactaaacgaagatgaccataagtctaaattcaaccctaagaatcctgataaatcaaagtcagcgtacggccatactccaagttacagccgtaggggcagtcacgataaagggagggattttcataggagtcacagggaagccaggaacaaaccatctaatgccgaccaaaacaagaatgatgaggataagaacaagaataagaatagagataaggataagaaaaatgatagggaaaacgtgtggatggtttttgaatacttgccatttgatttaagtggatatatagaggcacttagggacccacatgagaagtatgataaactcgcaaggccttcagtttggctgagtatcggggaaattaagactataatgcgtcagttatttagggctttgaattattgtcataaaaataatgttctgcacagagatttaaaaactgcaaatctactcatggatcaagatggagtgataaaactggctgattttggtctagccagattcttgcctcatgggaagggcttgttaaccaatagggttgttactctgtggtacagatcgcctgaactcctacttggaagtgaaagttatgatttctcagttgatttatggagtgctgggtgcataatgagtgagttggtttcaggatcacatatttttgcagctgataaggagtctctaattttaaaactgatttgtgaatacttgggattacctgacgaggcagatttaaaatatttacgtacgcttccactttggaacgataagaattcaaaccctctgcaccctgaaaggataggctccataataactcgtcaaagggagtttgaaaagatttttaccaaggttaatcagctcggaaaagatggctgggatttgcttaaaactctcttttcgtggtctccttccactagaatcactgccaaacaagcacttcttcatccctggtttacaaacgagcctcttccgaaattattgacaaaccgtcataacatcaaggcagctcacaacttcatgaccaagaatcaacgcaagcgtgaaaatcttaggccttctcaaaaaaggcacgaatatgtaaaatatgcaaatactggtgatataagaaaagtcttaaagaaacagctctcgatatctttgtaaagttatttagaagaccggaatcccaacgattttaattttaagtttgggatgaactcattaaatttgaaaaactgcttctttccagtacattaaatgtaatatatgatttcactgtaaatttaatttttatatttttaactgtattttaaatatttcattttttatagtaaaaatgatcaatggttccatgctaagccttcctaatggaatgaatggctccagactccagaaattccaagaatatttatcaataaaattttattacaattaatcagacggaattttgcttaaatgtgtaaagttggaacaaaaaattcgggccagcactgtctaagggccgaagggtgcaagagtaagttgacgaagggaatatttattgtagtcaagggatttgaatacttgaaaaatgggaaacaactgttgctttggaagatatgttagtctacatatttactaattaacattcctatatgttatgagataaaacctgaatttttttaaaaaatatttttatgtgttaaattagtgatcagaattagattaaacactaatgaaaattcttaggagcattataagagcaagtatctgaggatggaatccgatgtaattgatactttggcttcgtacaaaccgatttcggacattctaggactagatgaggacgatgaatgccatgtttacaagtttaacaaggctttccagaacggagatattgcgaaattagtagagttatgctattcaacaactccagtaatcttatttgttatttgtgacagataaatgaattaatccattgtttaacattcaaaataataaaattcacaaaaatatatagattcaaaaattggaaaataaattacacacttgggctgaaaatcccaggactattggagccttatcagctactcagctttccgtctacgccagcaaagaaagtatctttattagtctatttattagagtatttcaacttatttaagattatttaactcattttattatttcagatgagcctgaatttaagaatgatatactagctgctaatggaattgaggcacttgctgacttactcaaaagtgaagtgagtttactattaccttagtttgtgttttctttatttatatttaatatatagtattttaaaacagttttcaacttaatttttaggatgatgatcgagttcatgctgctgtcattaccttttcatttctttcctccggaagtacgctctaactacaatacactcagttatttaaattataataaaaattaacaaataaaaatttagatgccagatgttgtgaagaaatgtacgaacaggatgttttcccttacttaatcaagggaatgaaatcatcgttggatccttttagggctgcttgtgctcaaacctgtcgtaacatttattatctgggtatttagttttattttctctatctcacttcagatattaaatatcgtaaagaatttatgagacttggtggattagtcgccttagtttcacttttaaatttatctgatgactctggcgagatgtacttgacgcagctggaggctatatatcatttggaagatttttgcatggttagattcataatatactaacttgcttttcgaatttcttctcaacggattttatattcttgtaggatggaattgaagaaatacctgaacttgttgaatacgttaaagcttctaacgctctatctaaacttcaatcccttgaaaaggtttattttcattttaataaaacttttaacaataatttagagtaaaattaatgagttatcggaggctgctaaatctctagctgctcgtttaatagactagtactaaagttaatatacatctattgtaccaacatatattttacattgtataatagcagtgtatattattttcgtatacatattttgagtagtatattatgggcttagtatattatactataaattaggaatctgggattggtgaatgttttagtaaagcctttgaaaactcctttattgcttcacttcctctaacttcatacttgtactgtttgattgcgactaaatttatatttctggatgtatttgttcttaccgatattaaagaagccttcgtataattgtttaatatcttctatatattttctttgtatgcttaatctgccatttaggttattttgttgttccaacacctaaaaattctaataaattagataaatttacaagttcaaaaaagcagtctagcacttttttattttctggtgataggttttccagagagttttgggtattttttacatgttcttccaagttaatataactcaacacttggtttacaataatatacgaacagtctatatcagttttggctaaactttggatgagcctctcggtctcgtagacgcttaagaattcagggatgcagacgcaaacaaaagttgttcggttctattaaaatatgtttcataatttttaaatattagtttacagtagataccggatccttcatttggttcattattagtgtcaagttgctcttgaaccttttaagtttctggaatatttcttccttaggtaaggagttatttaatgccgaaaacagcttcattgcgactccgcacagtgattccacctttagaaaactctcaagaagcttatccaaggtatcaggtaggttcaaaaacttgagtgtatggcctgttggcgctgtatcaaacacaattacagaatacttcatggattggacagatctatttggaattacattaataagagatgaataaagtttactagttgaaacaaactgtaaaagctcagaaaaagataaagcctcgtcaatgccagggagcatttggaacagctctggtatagtttgaaggaacatttttgtttcatttaatccgaaacctgtatctgcaactcttgtaacgtccaactcctgtcaattattttgggaattttttactaaatttagaaaaataattaattttaactagctatttaagaaaatttgtattatataccatggcgtataaattttcgtatccgtttactagagttggtgtgtcggtaaacttttggttgaaagcatcgctcaggctgtgggctggatctgttgataagagaagaacctaataaatttaaaaattctaaaactaacggattctcttctttctgataggattgacgataatgaacatgaaattgtagtttttcctacacctcccttccctcctacaaatatccatttataagtctcttgctcaacaagattcttaacatcgttcctcaaattcaatccattatcagactccatagaagattcttccattttttgtaattataaaatacaaataatacaagtttaatgccatccaccacatattgaattccactattctataaacagttctctgtattttttaaacattttccaaaattaacaataaaaaatgtaatgctaatacctcgtagaattagtgataaaaaatgcaggttcaccgcgaagaaaattaccttcctagaatatcagcgtataaagaggtcagaattgaccaaaaatataacagaaaggaagcgattaggctcaattctttttttaccagaaggtaaagtatagaaactagattcttctatttagttatataaattatactactcttttatctgatgtgtaagataaataaatttagtttccgatgaactcaattacttatcgcatgaatcagtccagagaatattacaccagggaagtctatttcattctgtaacaactaaattaaacggagtcgatactcttccaaacaaccatgtaaattttaaccaacttcttgggactatagagaatcccactaaaattgatgatggtcaagattcgttgcacgatctactgtacggcaggatatttaatgttcgttgtctaaataaccacgacttgtgcctgttgctgacttatttagttgatgtatctgagttttctgacattgactcatcactattactcagggttctaactcaaatcaacttcacattcgaaacactatcgatttcagaaatatctcacatcctgtactgcataacaaaattggaggatttaaaaactaattttgctcctttcacagaaataactcttcaaatatcatcgaacacattaaaatttctttccactcctgagtcggtaaatgaccttaactttaactcaccttcgagcatttctaagttactctactcacttacattttcaaaatcgttaagtgttttttacacatcaaattttaagttaatgtccgaagagctcttgagtgtgtatttaaaggcctatgaaactgggcccattcattccagaacagactctagggatttcagtttaatctgtaaatctatggtcaagttaaaactgtgtaactatgagttattgtctttattttctgattactaccaccatcaattggaagcattcaattctattatttcagaatttgacaaatccctggaattatctggtctggaaaatgtctccactaacctaaaccacaacatggaaaagttaaattttttggaacgagttgatgaaaagataaatctaggccacttgtttgatttattggatgccagtgaatatttcggatttaatcacaggaaactgcttgaggcattgaatgaatatatctcatcatacctcagactatttcttactgactgtacatttataaaaaactattttaatatttacacaattaacaggaatgcaaggaggaataagctagtaagtttacttaaaaataataattattttaaaaataataaattaaacctccaaaaaatatactctgaagtacctaaagttgaccagactaatcagtttttggaccctgaaatcataagtagaatgcaaaaatacgtcagcaaaaggttcttattccagaaatttgtggaagaagcgtctaaatatgttgaggtaaaacttcctgaagaaagtatccaaggttctaattgtccggatggcagttatgatgagccagagttaattgagaagtttatggagtctacaaaacaacttcctagggtgttaaattttaacaatatttggaaagttttgaagcttatcaacgtagaaaagagaactttcattatacccatggcatatagttacttacaggaatcaagtataatatttgaagaattagagggaccctctgaggacctgtttgggatattcaggaatattttggagaataaatgccagaaccacctggtggtcattgataatttttctaaaatagtgcaaatgttcatagaagctgatcttaagagagattatgtaggactagttatgttttcaaacatgtttaaaatacttaatgaaagttataaaataacgcctgaacaatttgaggatttgaatcagtgcggaagtatttcatttcttagggaaattttagaagattattttaaaagttataagaaacggaaaatattagagtttagtgagattccagagaggaaggaattggaatcaatgtttgaatacctaacaaagggacaagtattaggagatggagaaaaatgtgcagaagtggaggttggtaaaatgatggaaaatatgatttatgttctggatagtttaggagatctggatgaaaacgtgaagaaggtggtagatttaaacgaagatgtgttcaagtttgtaatatataacgggttcatggcccaaatggccaaatgaaattaattttattataaaatttatttaaataatattgctgtgtaaatatacgaaatatataaataaaatgtttgcataattctaaattaatttgctggctacttgtagggtcagtagaagagattaaacaaaaaagttataaattatatttcactgatgtaccatagataatgtcggttcgtttagttcgtccaaaaacggcaactttggacgagttgctctcacatgaattctacaagaggctcgttacgtcaatagaagatgttttaccggaaatgaaaaatgttaaagaccccaaaaaactaataaactcaaaattcagtaaagaaattgtggaaatttatgaaataatgtttttggggtcctttaataagctggatatggcctctttggaacactcagactacctttctcacctgttgccttgtttgtcaatggattcttttccactaatcgcaaacctggataaaaaatcacaagaaaattttaaaaagattagattctgtacagtaatgacctgtgtatggtcgttcgtggaactacactcaagcggacgatcggaatatgtagatgtactatcgaacctatcatcaagtaaattttagcttattttatgtatatttatttaactttgtgtagctatgattattaaatgtaactaataatgaatttatagaacacaaagactcctttgagacgctcttctttaactcagctcagctactgatgctagaatcgtggaaggacgatttgtgtgagtcacgggaatttgagtctgttgataggataacagtactggagcagagagcactgttacgtttctttgttatatgctttcagagaattgagctttcggaggtgcgtcgctgttgtatgtctctgctgtcgcctcaggtttggatccatattccagaggagttgagggaacataacttcttcaagaataacaaggtatcaaaggcgttatttttgaaggcatttgaaacttataagttgaggcataaagcatgtaactttgaccttttattgaaagacccaaaggcctcagtcagagatttatacgaattggttccaaataaagataatatggagcatttaaacctgagttacaagttagtcttggcaagagacttcatgaattctttgattaaccagttcatatacatactggaggaccatttgtcattttcagaattaaaaccagaccaacagtcagaagaagaccctgagatgatgagactaatgtacattgaaaattatttggagttgtttgttgatttgcttagccagttgcacttgaggagagtaataaaacccataattgagtacaagttactgttggtaaggtgcaaaaaccacccactgtatgagccagtagataataaaacagatcatgcctgtaacagagaagacgcaaacatattcatagaattggttaatatattggaatactacttgaattttaatataaacgaggagctagggacaagcatggagtacaacgttatacttgaagactactacaaaaggttcaataagttccagagagtttgttacttaaactacaaagatgatgaaaacctgaagaatatacacctggtcaacaattacgcacttaataataacctgtcaaaaatacttggaagcctggatataggagtattggtacggttaaaccaggagttatatctaattcagtcaaccaagagtaattccaaggaagataaggaattaaatgggaagtcaggagatcacttgtggccctacagcgtagaactattgccaaagaaaaagaagtccaaaaaattggtcaagaagttgttaataagtaacctgaccaactacctaaagaagccaataaatgagttgatgctgataaacaacaataacttctacttaaatcccttctcttcactgttcaataacatcacaacagtgacgtccaacgaccttctacagccaaaggaagcaaacagaagagaagttactgaattaggggagatggaaggagacattagctacattaagctatgcaccttatcgctgttcaagttaaacttgcagtacctgacgatgttcgattacctttataggaactttatcctctaccaatttgaagttatttaccaaattaagcagtatgttcaccaacaaatattctacttgtcgtacctgacaagccattcaaatcgctcaaacaagttaaaccacaaacgcactgagggaaaaaataagctggtgtctgttgaacagctggagaagagagactgggtggggaggatgttcatttgcatagataacctggaaatgaaaatcgatcaaaaccgaattgagatgatgctgacagttgacttatccatgatccaagattacaaaatacgccaggagtggcaacaactgacaaaatacgacatactattcttggttcagttaaacagcgtgtattcctacaaccttagtgggcctgagggcaaaacagcagaagatatggaagatgaagttgaacttttgggcaaaattgtcaagaggataaggttcggtgaaatactggaggtttatgacgaggaaaacaacaatgttttggacttcaaccccctggataacaagagttttgtagggtttaagatgaggattaaactgttactggactaccagcagtacatgaaagacatgctcgaagatttggactattatagcagtttcaacttgataataaggagaagtaagaggcaaaacaattttaaatccattttatccaatgtgcaaaatgttgtaaaccacaagttcaagatgccaagctggctacaagtgattcttttgggatacttttcataccattcggtgagacccaatgcctcaaacactagtcatttctccactgttagcgcctcattaaatcaagcgatcaccactgaaagagacgaaataattaaaaaaagaaaaaaggagcaatatacaagggtcaaaataggagtggtttatctaaacacttttaaaagtaaggatcatttgttaagttcaacttctttcatctcaattaagctggtaccctgtttgaaccccaataacacaatgaatcaacataattttaagcgaactttaggttcaccctcaagtttgcaggaaattagagagaataggatacacattgactcaatagacactagtgtaaacgagtatgtttataacaataaaggttcactgaataaggctgagttggcagaaaaattaaaatcagcattggaaactgataagaatattaatttgtttgtcaaaaatcatatctatgaccatgattttggaaatgagagcggtgagttagagaaagaacatcttgacgagcgctcggaatatgtagtattaaatggagtgaagtttgaattacacgttgagaacaattacctaaatgacctgacaaaagtgaacaatgattatcatatcaacagccagttgccaaagtttttaataaccaattttaatcacccgtatgatatttcaccatataattcaagttcaacaaatgctcaagatggggatcacctagagaataattcagttaaccatcttgttaaaaatgttaatgatggtaatcaagggactcagagaggggtaaaatttgtgtcaaggcaagttgagagtataattggaggcacaatggaagggctgacggtgattatgggaccaccaggcacagggaaaacggatgtagtctctcaaataatctcgattctgtttaacaattatgagcatgagaaaatcgtgatttgcacgcacagcaattttgcactcaacgatatattcacgaagttggtgaaaaatgaactgattgacgaacattacatggtgaggttggggcactcggatcttgaagtggataacatgggtcatttctcaaagttcagcagagttaactacattctgcagagaaggcttgaccttcttgaagttattaaaacactaaaagaacaaatcaaggttgttggtgactacgaatgctcaatacaatattccttaacatttctgcagtactttttaactaataaccaagactcgaataattgttacttaaatagcgcccaaattgggcatgaaaaagttaatgaagatgttgtaaataatgtgaatgatgctgaggatgagtcaggaatgttggaagtattagatagaactaagcttactcaagaaggattggataactttttcaagttggggatagagtttccatacacacttaaggatgtaaagaaattatataaccaggtacaaaagtgttacgctcttgaaactaattgtagtaatgaagttaacggagaagagtttaaacattccggtgatgaggctgataaagaatcatgtaaggaggatttgaatggacaattgtcacaactgaagaaaaaattcattgaaaggttgtatgaaatgctctttgagttgttgccatttgaaatcttgaggaataatagagataggatgaagtacctggtggaaaactacagcaggattgtagcaatgacctgtacccatgcctcaatatcccaggaggaattatcgacgttgaactacaagactttggtttttgaggaagcagcacagatactggaaattgaaagttttataccaatttgtaataatattaagaggttaattctgtgtggagaccaccttcagctttcgccaattatacaaaactcgtcacttttgaggtattccaatttgaaccagagtctatttctgaggttgatcaggttaaactacccctatattcagttgaatgtacaggctaggtcaaggccagaaatattgagtgtttacagtcacttttaccctcaccaaatattcacacttgatgggctattcccagaaggccctgaagtttcttccaccaaaactaaggataaagtgtcacaaactaaagatatgttggatgtaaaacagttattgtgtaagggtaaccttaaggaaatgatggcaagtaacctctcgagattaagtttgaagtacgtagttcaattcattgatgttgaaggagaggagactagtcctatcaagtatttctatcagaatttaggggaggcaacgtattgtgtgctgttatacatgcttatgagattaatgggattagaagatatagtgatactgacggcgtacaatggccaaaagtgtctgattgaggatattgtcaagaagaggtgtagttggaacaataaaataggttcaccatttgtttcaacaatagataaattccaaggaagacaagcagactacgtaatagtatcaatggtgagaactaagaatattggctatttgagagacccaaggagatttgtggtagcaacaagtcgttcgaggctaggactttggatagtagggagtaagaatttggtgcaaaatataaaggagctttcgaactttaacgaacagttgaaccgatatccaaatgaactgtacttgaattttactagtttaaatgaagttaataacgcagattccaccaaatcggtaaagattaaaaataactctgatcttgaggagttagtaaaggcgttgttgtaatatactgttttaattttttaaattaattattagtatttgttagtaaatttatagagggaatgtgcgatgttcttatattacaatgtttggattggaaggtggagagaaaagaggctaatgtgtaagttgaaaaaattggttaatagctgtgagtgaatcgcatttttaataacagatatttttaaagtcaaagaagtataaaaaaagtaaaataacggatgtatagatccttggtgtggacggagagtgtaacatattgggtgtacattgaaccatcattagtgtataaattcttgaaatgaaaataaatatataatttattgtgctatgtcgacgatactctactctttcatagcccaaaatgattcagttatcgcagattacgcaacgccacaaatatataactcagacaaatcggtaaatctagacttgattgcaaggtaactgaaatatgtaataaaattaattgcagaaataatttatcaaagatccccaaaaacaattccaacggtttcaacgtaattcttggacactactttttccacgtatgttattactccttaaaaaatttcagcatgttaaaaacggccttgtattatcatgtgtaacatcatcggacgaaaacaccgatcttccaaaaaaatttctggtatttattacagataagaataattatgtaggcggagttggattcaaagattaatagtaatgtgttcaacaacaccagtaacaggagcagaactctgactaaaatgatgtctaaactagtggtaggtggaaagatttcataattctgctcagaatgagtacaataacacgaatatgaagctgaaatctatcgagtcttcattgatttatacaactgacacactcagggaaaacataagttagtttgaatattttaaactctgtatagctaatataatggaaagaggagagctaatcgactcaatagtaacaaagtcagataacttgaagagggagagcaggctgtttagagattcagtaaagtactcaaactcatcattcataacaaagtttataataaataacataaaaaataaaagactatatataattttaacagtaagtaataaaaatgtgtatattgattcctaggtcagcttcgttattatattcttctacttctttatcgtttcagaatcggactgattaacacctagcataaaaattcattgaaaaaattggattaggatttaatagttttagatatgaatgatcttgatccgggaacttcatgtaccttctgaggcatacggcgagattcaagaaactcacaaaaattcagatggaagagcaattataataaaatgtataaaataacaaatgttttaatgatgaaaaatcttactccgacgtaaattgtaaaaataaatctaattctgcgatgctacatcaccactaccagcatcaattgtaacttaacatcacaattattttaagtaataaaaatacactttatatttttatatatttcatataatgaattcaattttcatgacaaccttctccttaaggcacattgtttgtgcacagtttaaatttatttgataaataaccacctggagccaaatgaagggacaatacgtgcgtggattggtaaaatttataacagatatcagaaacttgaaaacagatgaagataaggaaacaaggatcaaggaagaggtggctaagatcagagtcagcttctctagtcccagattgaccgactatgacaagaaaaaacacttgttgaagctattatatgtccaaatgcttggatatgacatagatttgggatatctggagtctgtacagttgatggcctcaccaaagttggcagataaagcaacaggatacatgggttgtgagattttgctgagggagtacgaagaagttatgagactgtgtataaatacaacactggaggacatgaataacccctgtgaacacgtttgttcactggcactgatctttttagcaaacacccattcactagaaatcaacgaacgactttcaggtgaagttgtcagattgagtatgaattcctcatcagacaatgattaccttcgtaagaagctttatatgtgcctcctgagaacttataaactaaaccctcaactgtataacattaacgaatggtatagcatggtataccagatattggaatctgaaagtacagtttcatgcctactgccaatctgtaatttattgcatcccattttgagccagaagccaaaaaactgggaattatcagtagaccgactcgcgtcatttttatctgagttatctaaggatgaagtaccggtggagcactgctacttcacaatatcagcaccctggcttactgttaagattttaagcatctttgcctcagtagaacctcatccaaattatgactttctccccatgttgtcaaattcacttaagaccttgctggataagacaagtaacctggtattaacacgtctaggaaacaagcacagcaacagggctaagaagttaatgaacctgagtatatacatgacaaaaacaggaattctaagggaaaccataagagcagtggttaattggttcccatacctcagtaacatatcagcccagttcgtttgcaattgcatacgacacttgtacacgtctgttatgtcgcaaatcagactcgttgcacttgaaataatagaggacgtgattaagattaaggagacttatgaatacattaaaaatgacgctgaatatattttacactttttaaacgactcggatccaacgattaagaaaagggtaacacatttgttatttattaagtgttttagtattaattatattttgcgtaataattaatgttaatttagtcctgcttgatactgtgcggactctgtgatgtgacaaactgggagctgatagtcccggagttaatctcaacgctgagatattcggaaatctcaatccaggaatacatggtcccactcatttgcaaaacaatagataaacatcttcctaaaaacacactctatatcgatttaatttttaaaatcataacacacgcacccttggtgtccaatatttcaatttcaacactgttattgactaccttgtataaggaaaactcagttaaatttcaggtacggatcactcagttttataagtaatactgtcaaattatggtaataaaacttggtttaggaaaagtttgttgataagtgcttatattaccttcaagacgaaactgagattactgaaggattattaaggtttgaattaaaacgttcattttatttattgtttatatactcccatattatatatgtgtttaggatatgcgcacatgttcttggtgattacgggcacttgtcaactgaggttggaatgaaggatcagttaaagctatttgagaagtattttgttatagcctcaccagagtgcaagtgcgtaattgtaacaactctgggcaagttcgcatcaagagataattcactggttgataaagtgggagacttcctggagacacaagtgaactcaactgacgttaatctacaaataaggtcttgtgaactccttaagatgctcaggactaatgtgtcactgttcaacagagtaatgacaataatctcagacaagaagccttcgtcgagattgaaacactctgacaggagtccaaccaaagaaagttacagagaatcatccagagaagtttacagaaatagtcatagggtaagtgatggatcaagtcttaaggactcatttgacaaacctgtcccaagagactcttttgatagaaatctttcgagagattcttttgacagaaacgtttcaagagactcttttgatagaaccagtcagagagtatcttctgaaagaactagtcttaaagaatcagcaaggagtgataatctggcttcagccagggatagagatgttaggagaacgtctgcaagagaaggaagttctggattattcagtaacgaaagttgtgtgctgttattgaatgaatattttaccgttgagttggaacaagcctacagaaaccagcattcaaaactgttagtcaggttaaagaatgtttctaacgaggatttatatgtacacaaatgtgctttaaaatcaccaccagaactccacggacaagagcacaatcaactcagagatgttaaactaaagcctggacaagtagctaaccacaaactttcattcatgctaatggactatgctcttgaacttccgaactatttcctagatctgggactagaatcgaaaatagagccactcaaccacaccttgaatttgcctgtatgtgttcacaagtttatgaaaccgctggaacttgacccgccctccttcacaaaactctggaacacactcacacaaacacagccattcatgttcaaattcaagaataatatcagcgttttggcaaactcactcacggcgctcaatttcgacgttgttaaggtacgcattatggacacattaacccagttctatggtgttaaataggtatttatgtaatttattgtgtaagtaaacatgtaattcagacgggagataatgtatacgtatcggcttctggactggtttcaacggaatccagtgaatttttctgcctgggaatgttcacagcggacaggtaagtatggaggagattattatgtattaggggaggcttggtggcaagttacagggcgagtacggcacttttggcacaatgtatcataaatataaccaaaactcttctaaaagagctttaattgcgcttcaaaagcaattttaatttcatttttgagtatatgtgatagatgtgttggctccacacaacaggaaccagatgttgtaagtagtttgacaattttaaagtaattttaaatctacagttatacgacgagtcgccaatcaaggtgtacctcagtatgtgtgacttgtcaactccccacatcagacggagaaggtcgaggacgttgttaatctattactataatctctactttataggtagttttttcaatttccgaatattttccctaatacttaaatatgctgaaatatatacgataatacctcccgcaaatttacctttttaaatacatgtcttgaatattagatctacatagataaatgtcggcactagtttcatcagaaaacgtgcccaatggcacaatgaacaataatcttaacggaaaacttgaaagaagaggaggccccgcaaggggatccggaagaaagcctcgtcagctgcgccctgaggaggttccattcaaaatccagattgacgaaaaaagcaggataatagccaagcttcaaaatgagttgtcatccataaataaccatattaacagcaacagaggcggaatgtctgcaaacgatgagcgcagcctcataaaaagtaggcttgacgatatacagagcagaattaacacattggatataaagcgctcagccttccttgacgaattagataacaagcaacgtgatataagaaagaaaaacaagactctttcagagttaaagaccgcctcgggatacaaaagcgaacatgaaatagatcatcagatcaagttcctggaaggtttgatgatgacctcctcccttagccttaaggaggaaaagtccatgatgtctcaacttcagcagctaagaaataccaaggcctccctcgagcgccttaaaatggagtcactcaacaccagagaatctgtggacggtttgatcatggatgtcaagagcaatcttgataaccttagggatgaacttaatcttttgagaaaggccaaacgtgaggagagtcagaagttgtttaatttgaacgagagtaagaagaaaaccatggattctatgaaggagtatttcacggagaagagtcgcttgatgagtgagattcaggaacacattaatgacaagaggaacttgatgaagcagttggaagagctaaacaacgagtattacacaaaacagaagctcttgcaacagcagaagttgaagaagcaacaggaagaaagagaacgtagagcactggagaacgaggtcagacagctccaatcccagcttgacaattgcgactttttgccatatgacaaggaggttaggctactgcagcaagttttaacatttttatcaacacttgaaaacacaaacgcaagtaaagaaccctcaacaacgactaaggaagcggctactgttgaacacaatggaacctctccaagcctagtcaaggacgaatatggaatgcgactggtgcctaagaaagacagagatgaatatttcatttcaccaaaggctaagaaggagaagaccaagaataaggacaagtcctcgaagtttaaaattgacatggctactttgagctactttgaaagctgcggtgtcgacccgccaacatgcctggattctctcccaagttgtcgtgaaaagctacagcagaaactcgaccactataacaatttgaggagtgaatgcaatgtagacgatatgaggaatcaaattgctcagaaacttgaattagccaacaagaagcttgaagccttttctaaatcacctaagactgccaatcaaggcccattacccgacgcctcaaatccacaggtcaaccctgaagttcctcaggaatcttagaaattttatctaaatattatgttccatgtatttttatatgttaatacgtattaaaatggtctatgtgtgcttttgctatggatttcatgagttcttacacactttaaaaatttaaggtaatatagagttaaaacacttttaaatttggttaaatcaatagaaacttaattatattgggaaataagtcatggaggagagcacttaatgcagtttccccaaaatgtgttgtttgtatgttattttccccatacctgtctgaaaattttacacttcaccttttgtcaatttctgtggatatgtgtaataatgtacatgaataaaatatttctgtttacattattccttgcaaatattcaggaaatatttgctacaggcgaagttcaagctggaacaaagcaagatgttaatgttgatcttagaagattcaaagaacattgccgacatgacgaaaatgattcaaagattcatttgaaagcctatgtttgtgaacctggcgatacaaaaacattcctaaaggtgttttatgaagataccgatttgtggaattcttcaaccactgatgggaaaacctttaaaaaattggtcgtttatgttaagcaaaattttcttcagcttttgcatttgacattaacaaaggatggcagagatgaggatctttactacaagaaaaacaaattggagtttccgacacttgttcccgacgagttcacaaaacaaaagaccgaattagaaaaaactaaatactatttggaccagtggttccttcttgatatgggcaacaaggatttttatctcaatcacgtagcagaaacagaatcattactcgatggagtagagaaaaaactgtttagtgtttctaaaggcaaaccatcattccttagagaaggtacccaaaaggtttgggaggataatggccatgccaaaggactaactagtgctgaactttatgattttggtaaccataaacttctacttcttaatcttggaggtgaaaataaattttttgtcaaatcaaattcaactcaacctcaatctcaatggacatctctggatgatcgatccgcatttgacacaaaggtttcccaattcaaatctcggtatttctcaaacaacatggagtacgatcttgctcaaaaacccgatcttaacaaactatcattacgcagatcatcatttcccggtaatttgaatgagcttactcttactccaacaagagaataccttttaaacaaagttaaatacaaccaaaccgatttatggactccgggtggtacacaaaagagagtgttcatgatgcgactaactcttttgggttttgaagttagagcggctgctctttttgttacggattctcgcaccaaactaacgccagttgaaaacctccattattattacaaggaaaatgggacttttagagaagttaatagggatgaatacaaaagattagtaaaagtcgttaagtctctatccgataagacaagcacgttcacgtacaatagtgactgggttcacagagctggtagattagatgcaactctctacaatgatgccgaacttaacgttcataaacaagaagatgcttctaagggtctagttacaacaacacttacacccaaagataattttgaattcacatcactgtcatatggaactcttcctttgtggcctactgcagttcgtgccactaccggtgtcgtaaaaaatgtagaagttgtcgccaaagactctctagttcaattggtccgtttaactcttagactgccatccaattatacactacacctaaagaaagatgaagatgaatttacatcagtggattctagtgcatacgattcatacaaagaattactcaaagatcccaattattatgttgacaataaagtccatttggatgtaaatgatgagagtcttaatcctaaattttataaagttgtcaaaagtagtgcagacggcgtatccaagaaagtagttactgtagaaaacttaaaagtacacaatgtcaaagccttcggtcattctctttggaatcaaagagacgataagcatgaatttgctaaaaagtacgagtttttctcagttggcgattcaaaccttttgctcctacatctagaaaccaaaggtcgaagacagactaaaaaatttttcaagaaacaagaccctaatactcaatgggtagagatgggcagcgaatctcagttcaatagcacactagcttcatttaaattggcaaatcgaccagtaaaggttgatttagatctatctactaagcctttgacgaccgattacagtgtcgacgtcacttctctttctgggagtagaactatgcttgttctcactccagtcaaaggcaaagttgtcggtaaactaaagttcaaagaaactaatttatggacatccgatgccaccagcagaggagtcaaggttcacgtctaccttgaagattatgatgttaagtttgccaagcttgatgtattgacaactcagaacaatcaagatcaacaatccgaggtaaagagaaagtggacatctgatactgaatgggtcgagaccaactttgatactgatttggaccgatttaaaacagaagacaaccacaaaccattcaaatataactctaattggcaattaccatctaacaaatttgatacaaagtcattcttgccggaaaacttcacagtttccgacgtgacgtctgacctcgttaagacaacgacatacactccacaaacctggatgcgggttaatgaggtgttggttgatgaattaaaagtctggccactcggatcagatgctgtcgatgaaacgaaaaggctaaaattactagaggtattgtccaaagatcatatggtccaacttgttcgtcttcagaatgtactacttacaactccagaaacgacagaagatctttactacaaaaaggaagccttagcttttgtgaaacttgatgacgtgactaagtttgatgagttgaagaaaaaattgtctcaggatggccagtatgttgacgacaaagtcaaattggacctgtcctcggaagttcccactacaatgttctcttctgaaactgtactagaagatgggctcgagaagactgttgtagaagtcaaagttggtaagttgtatcaagtacaagccagtccacctttgtggacatccgaaaatggagaatatgtcactaaactcgagaaatattcaaaaggcgatagacaatttttggttcttcatcttgagaaagatggccaaccttttggtaaaaagtatttcgaaaagccaacaacacaacaaccgcaagatgctgcttctcagcgagaagggcagggacaaggtacggagcaagcacgacaagaaacacaagtggctgctgcacgtccatcatttcagcaagtccagtctaataccgatttctaccgaaagttgaaggaagtaaaggccactgtaagatatacagaagtttctcttgaccttaattcatatcaggatcaaaaattcttgcttaaggaatctaccgtacaaatggctaggctttacgaattatatccaaaagctgaataccgcgttaagtccttggtctttggctcaaaggaattgtggacgaaaactaaagatgacgaaaggctagttgaggcaaaactctatgttcatgattcgaaaaccaaattagttaaagctgttgtttgggagggggatcaaagtgatgataccacttctacttctaagtattttcaattaaacgaacaaggagattcttatgatactaaagaaaaggaggagtttgataaagcactggaaaaagttcttacgaccgagcccacaccacttccaccttctactgtcgctgttttgccaacagagccactttgtttcaataagttgttattatcagataccttcgattctcaactttttagtacccaaactcagaaaaagggggcttatacagtcaaaaccgtgtcaccctcaggggatgacacctttgtaaacctagttgaaactgatagtaccgtattatggaaggcacaacaaacagatcaattgtggaaattggcaaccatggcactttccacagacgttggccttttggatttagtatttactgaaaactcaaaagatgttcattcttactttatgttccaaaaaaatgagtggaagaaggttgaaagtgctgcctacctgaaagaattagcaaaagtaccaggtcatcaagttcaacaaactctacagtctgcacgtccaggtcaagtagctacagaagctccaccaggtccagtagctacagaagctccaccagttcaacaacaaggccaaacagcagcttcaccaggtctatcagccacagaatctacaacatctcaattaacatctcaaacccctgcaatgggtacagcgcctccagaaggttcaacgggtaaaacacctcaagttacatcagctcaaccatcatcatcaacatctgaatcaggtcaacaatcaggtgaagcatcatctcaatcgcctcaagcatcataaaacacacattcactagaatttcatttggttttaaacacattacacataaattggcatatgatccccaaataatatatacacactaatattctcaattgatttacgtactctttattttattaacatcgtttgtaggaatatataaaatctaataagttataggtagaatttatgaaaaaataagtataaaatgaatataaaatagaaaaattatgtaaaaatgaaactaataggttagtaggaggaatatgaaaatttgtttttttattgagtaataatggaatagaaattacacattaaagtagaaataaaaaaaatttgaaaatttatatataaagtgaattaagtagatatgaatatttactgttgtatgataataacatacacaccataaacagaactaaaaaaatgttattccttccataatgtgtattttacacacctagagaaaattttaattttaatgattgattataaactaagtatttagatgctttattacatcttaattttcatatgtaatatacgggtttcacatggtgtagatctgttttatccactagggcttagagacgaaataggggttgtgaatattccagcaggaagtaacccaagatataacgtaaatgacccacataacctagtaattgatatattatccaacaacaaccctaatgtatataaggtaacaacaaagtcaggatatactagcacagtgaggtattcctcagaagatggatacgtaataagaaaggtagtttatggaaacaaggcagtttgggaatgtacaacaaaatttgaagtagcgaaaacggtagaagcagtacgcaagaaagggatgctccagctggtttcagttaaaaatggccagctggagtccttttttagaagggaaaaatgtagttttgtgactgtagagacaggacaagagtattcgaaactgaaaaggtctctggataatgagagttatttcttagatacctgggttgaaatggacttgagcatgtcagacccggtgagtatatttttctcgagagatatttattatgaggagggagtagcaacttttaaactgatgactttgaaaccatttaagctattcagagtttttgacagtgaaactttacttaaagtgaaagcagggaatcagaaaactgagaccctgtgggagtatgacgaaaatttaatgtgtgaatgggttctagtccacaattttcaaaatggaacactgcttaaattacttctttctgatggaaagattaaagtaaaagaagattttaaattttacaagaaaatggatggaaattggcatcccctggaaaaaaatgagtttgagtctgaatataaactcctaaagtcaaacgttacaagcagggatataaccctggacctaggagtgaaaacaaaagatgaaaggttttacaggaaacatgaaaaggtggggaaaaattcccgcttatcgacattgtttcccaaaacaggatataatctaaaaagattattttatgacggacaggaagtcgtttcgcttagtggagaacaaagattctcttcagttctaatacactgtgaaaacaacgggattgcgtttgtaaacgcacttgctcatgataatgatcaagaggttaaattgctttattttttaaaggacgagaaaggacttgtttctgtagataaggagaagtatgagtctgaactaagtaacctaagacttaaagggcctgaagttgatagtttggatttagactactcagatgataacttagacgaagattcattggatgaatctcgtgaagttgacgaccctagattggagtcattggttagggtgaagtttaacgttttgtacgatatcgacgagaactactttaccaaaagaataactaaggaaggtgaattcgaactccatacagtgcttccaaaggataaatttataattaacttggtagattctcacagtggagtggtttggaagagtgttaaacacaacattagggtcgagtggctagtcatttattttaaatctcggactcctcaaggacttaaattactcatattaggaggaaaagtcagtggaaacaagtactttgtcatgtcagacaaaaaatgggattctgtaccggtggatacattttataaagctctaaacaaaaatcaagcatagtttgatttgacctgattttgatcaaataagatcatgattttattatttagatgaatttcaataatttggaaaacattttaagacttttttttgggaggttcccaaaaaatctccaatatttttatttttattattcctagcctgtggtcaggactagtgagaaagcattttactcatagaagtatatgtattttaacacttaatttttaattacttttacaagttagtgttattaaaacccagttgatgatttttgtgttttttatcagattcttactcgaatagattgtgggaactactagatattataaaagtaattatcccaaccaaatgatgaagaaataattttagtgttataatactatataaaaatccatatttaataatttattttcaatgctcctaatatatcgtgttgactcaggagtgtgtatataatttcaagttattaatgactgatgtatcttctgtatcaactgtaagtcaatacacattatagaataatttaaaaatataatattaaatattcaaaatcgataatttaatcatgattgaacagccatcgggattcgatccaggctcgacagtggttttgaagggctttccctcaagttttggaaagaacgaatgcagaaattttttctcatggtttgggcccgtcatttacgtggataaagtcaaggataattcaggagaatcctgtttcgtggttgttttcgcctctaattaccactcagaggttctcaatactacttacaacctgctatttatactattaatactgtattagcaagttctaaacatgaagactataaatttgaaggaaaatggagatcgtgttacagttcattcccccaaagagatggagtcactctggaattccattggcggcatggttcaaaatgccacatcggtatacattatttagcattaatacttactttaaattcctgaagttttcaataacaagaaattatgtatacaataaaaaactgttaaataattccagaatcataattttttagactgctcaggataaaataagtggtgcctttgatgggtttaaaatcaatctcgggggttacttcggaacatagaattattttaaaatgtttctaatttacattgtacaataatttaatattttatagtatattccataaggtaatatatgaactaaaagtgtgtagataaaaatatttgtatgttgatttataaattgaatgaacagcgaaagatttgccaagattaatgttagtaaactgagtaaaattgaaggtgctatcaaattctaatatgaaaggaacgaaggattcatccagtgattctggattctatacaagttattaaattaataacaatttggaggaaaatatttaacaaactaattttaaacaatttaaaacaaatttgtataagaattaactattatatggctctaaacggaactataatcggttttattatccccacgcctatgttcttcttattccccataggtgaactgaggaattattcctaatatttaacttttaatcccaaatattcttgataaacacttatttattgattctttgagtcaataatttcccgataactggacattcttatactaattacttggtagtaattcgttataataattttataacttaaaaatgaatacctttacctatttatttgccatattcggcatttttggattaaattttacttattctaaaacatttaacttttttgaaccagacgacagtttggggaagatggaagtccatgaacaccgaggccttcgggtttatttcttcaaccccttgtacgactctggtgttgataaggttgtagttggaaatcagaatatatgggcagcaagaccgggacaaaagcttacgaggttagtgggattctttaggtgcatgggatttggcctctctcacgtgtcctacttcaactctaacggtgacaataaggaacttcttctaggatactcccatggctctgatttccttgaggttgttgataaagagaagttctataataagcttttgagctacacaaataaagaggataaatacaaccctgaaattccagctcatcccgttctccacgagcttgaacatctgctcagccctaaagaagaggaagtccccaaggaatctgtccctgaaaaggaaagagttgaggtacctgttggagaacatgctgaactttaacatcaaacacacggctggaatcgcataagaactttggcactaattttttccataccataccatgctataattaacactatttaaacatgtatttatttcacattgtgattccagaattaccgtgtgaatagttggcaaaaggatggaatgatgaaatatactaatagcctaataaatagaaattacatattaaaaattcgtaaaaaagaatataaacatgaaaaattaaataaaaatgatatatataaagtgaatagggtagtttataggctaatgatgttgaaaaggtaaaagtaatgaaaattttggaaaaatgagtgaatgtgttcttaatatgtaattaataattttttcaaattgaaataaatatggaatcagggggaaaatgtgtgcgaaagctcaggttcagcctagtctccttcattagtgtgtcgtaaccaatactggggctatgccacatattagttttgtgcgtaaaagtgaaagatcttattattatcaattttttacgaatttaattactgctaatctttccccctgtttattgcaaatataaggccctttaatatcaagttcgcctacatattttaccattaagtttacctcgggattgttagtatcatctgataatccatcatagatctgtaaataagagtaaatatttttgaacatcggatttcaaaattattttgttcgattttaccagtgatttaaataaccgaaaaaattttgatccagatcactgacgtactataaccatactaatatttcacaactgcattcatctccaatcaaagagtataacaactttacaacatggctaggactaagcagactgcaagaaaatcaactggtggtaaagcaccccgcaaacaactagcaaccaaggctgcaaggaaaaccgctcccgtcaccggtggtgtcaagaaaccacataggtatcgcccaggtactgtagctctcagggaaattaggaagttccagaagtcaaccgagctcttgatcaggaagttgccgttccaaagacttgttcgcgaaatcgcccaggactacaaaacggatttaaggttccaatcacaggctgttttggcactccaagaagcggctgaggcttacctcgttggactttttgaggacaccaacttgtgcgcaatccacgccaagagagtcaccatcatgcccaaggatgttcatctggccaggaggatcaggggtgaaagagcttaatgtaatcactttttgtacactgattcttagtcacctttcttttaacactgtatcctttgttattcgctgttgattcaattgagtcattgttttaccataactataaaattttaatccacattatacattacttaaaacactttttccatatatttccatttatttattttgtttacatatatatttaaacatttttatggtttattgtggctagactctgtggtcttaatttttgttatcgggaaatgaatcacgaatgttctttctcgctcgtaatttatttttccccagggaaattggcagattcggaacactatttgataatataagcaaaatctgtaaaatgtgtataccctaaattttagaaaaaaagtcggctcacaataactagaaattgtatggcggaaatcggctagcttaaaggccaaggaatcaataacacatttaacatataatcaaaatattttaagttgaagtaattttattttataaaagggattttttatacaaataaaaaggtaataacaaaaaacttatggaatcgttcgacggattaaccgaaagtaaatttgaagacgatatgagtcaattagacacaaacaaagacgaaaataaaccagaaaatttcgaaatatcgtctttcgaaggaatctcatcctatgatgagaataccaaggtcagtgagagaattacgggcagcagtagttcgatggtagggggaataagtgaagaatccctcaaaatcgaaccaatggcgggagattatcaatttgatgataatcaaggctgtgattggtcatttggcatcagcccgaacgttaacacaaccagaacccatgaagaaggcagcggttatacacttggaactgaagatgaggaaactcttaagggaacctcagatagtcccgacctggcaaatttaacaccagatccagaaaaaatctggccggattttaaaaattcgacaccagatgaggagagatctgaaaatgagtcagaatctgaaatgaagaaattaatagtttcagaatattcagggtcggaaatatccaaatcaaagccagaaagtggtattgaggatcttagtagtgaaaatgaggaaaaaaagttgacaatctcaaatcaggaggatgaacaggaaagttacggaaatgttgaagttgaagaggagtctgaagtaagcagttcaaatggaagttggatcaatgaagatgaggaaattttagatgatgaggaaatatcaaattatcaagatgcccaatctttggcaacctataacgacagtaacatcgaaaacaaagaattcaatgtggttgaggtcacagaaaggacctctcctgcaagtcaaattggtgatagtaacggatcaaaaactaaaacgcaaccagaggtgacagtttcaagccctgcagtaacttatcacagccctgaaaacgaattttcaagtccagttgatgaagattacgagaagactagctcattcaactcataccagtataatgcatttgatccagaattggagatagttgatccgaaaccagatgtccttcaacctgatgctgatatggacgatgatatgaaatcagctaaaaatggcccattgaacaggaatattgtgtgttacaagagagaaaattcaatttccgtcatttccagtaacaactcatgcaagcacatggataaggactgtaaatgtaatggtaaaaagggagataaatgggaggaaagtgaggttaattccagtactacaattgagattgaggagggagaagttgatacaaagcttactagaggaaggaaggcaattcagaagttcaacaagttcttttcagccatcaagtgggctctgatcagaagttctttgatattgctgcttttcttctggctcatatcgatgatttatgggtcacttagtctcagttccaatgactggttggtgaacacggttgcctacaaatgcggtgaaatctcaggccacagttacacattcttagggccttatggactcagtagaaaggacattgcatatctgaaggatggagctaaattaacactcaccaggggtctagtgtactacaatgaaatcattaacaagggttacaaagacccagaaggagacacttcatgccctgaagatggagacgataaaccaaaacctacaacatcaactccagctcatggtggtaaaaagcttgaggatgatgcatgtgaacttccagcagacctaacattgaccagagatggcgatcacgtgttatcatcagatgaagagaaggctaggaagataataacgagcactaacgagaagattaacatctacagccagtgcgggcatgaaaggaaattcattaggaagtcgtgctgtttcagagacatgtgcgctgtagggaacttaaacgagagtgacacgagctacttcaagtcgctgtacgggccaacagtgtacgacatccactacagtgagtttgagaactttgacaagggcggaaagacgctttggtacacgggaatcgtatctatggtgtttctgtttctcgccattattatggtctcagaaagaataatgaccaacaaagtcgaactcacaataagactcgccatgagaaacatggccaacatcctgtggataatcagcgtcttcctctccgtcaccgccttcttcctctggcggtatttctctggtggctcagtctgcgtcgatgaactcggaaaatctaggccctgccaatactactatgcaacctacttttacattgtacacatcctgtcaagcttactaggactggtttcatacgctgctaattgcatcgctggctcacgcagaatcaacgaaatccaccgaatctaagtttctgggttccttcacggtgatttcttcttttcaaattatccacaccattatctattcaggttaatttccacgggattttaaagaactttcaacaatcaaatttatatacaatcaatttatatattattattttatatactattagtttattttgagtaatttgtgactggttaggtagaatttgagtatttcacacgtgataggaatccgccacacaccggtaataaatcataatttgtggaataattattaattacatgctatctcctaatgtaaaggctctttttgagagggttaaggcccgtgtgaactgtaaaaatgtaaaatttagcaaaccgcctttaacacctgaaacaagcgttcacactcctagcaagtattcagtgggaggactcagggaacatggagaatggctttcaacattttcagaggtaaaaaggacttttgaaagggaaaatttggatattaacttgttttttgcaactaaaaccggtgaatcctttctcaagagtctctcagaccgagtttattcactcaaaccaaatgatattttcgagattctcctttcattacatatatttaaggtaagacaataagtttaatgttttctaaggctaatttgatgaattttgaggctattcttttgagtgaattaaaggattctctggatgaactcagtactctccagttattggagctcccaactctaattacacacatggatgaagatttttctcaaaaacttgaacaggtacaagtttatacatttatcactagtttccataataacatatgtaatctacacattttatcatggtgtaggcgataaagaagagggtggaatctgacgatgaatttaaggaatctcaagtgtataaaagaatgttgaataaattacagggcagatttaaagcaatcttgtctcaaagtcactcgtagtaaaattcatcatcctaaaattaaggattgaactttgtaaaatagttgaaccaacctcgtcggtgtcgctaagttcaccgtatagcatgtcgagctcgtcctggtagttcttactagttccaacgtctattaatattttgaatcattagtatgtaataatattttataataatatgtgtatattttgggtatgagttaccgttaggcttctttttatttagagatttgtcccgatgagcgttttccttattcttgataaagttctcaaccttgcgtttgtaagtctgtaggtccttaagttccattttcttttcacaggactgtaaaagaatgtccaaaaactgaagccaaactgcgctcttggcctaaatcacaaatttaaaaaatatacataaaattttatgagtaaatatagtgaacaaaagggtacaggactagtttctatcttttgtgagagtttttttgaaagcgtttcacaatctttcaaacatttgagctcaatttgagaatagggatcagcaagtgctaaatgtgtgtcaaaatgtggtttaaaagtacccatttgctttatattagttgagaataaattatccgacgattcatccttaactttgctatatccagcaaacaaatcatttgtaaaatgaagatcagaatcctcacttaacctgaaggtttaaattaatgtaaaaataaaaaaataatgtaaaacaaacttctgtgattttaatctgtctgatatttcgtctaggttgttgtcattttcaggtgctaaactgaaattagttgaatgaaaaatagagaaatgtaaaatgaaaaattaccgaaaacatcgtcgtcggaatccttgtaagaatcccagtggtcgaggtcgtcgcccatttattatataatggaataaatctgtttagaattcttttggggtttaaaaaataataaaaaatatgttaatttattaatgtacattgaacattattaataatatgattgataaagaagtatatttttgcggatggggatcactcaacattaaaatataaattgtaacaatatatatttgttaattttgtagtttatatatttaaaatttatttattctgcaaggtagtttgtactactttgtcagtaatatttagttttttatttaattaatgccagtgtgttaaattattctgtaacttatcccaatgaactttataaagctcttaattcttcatttctgtccaattaacctcttccggttgaatatgcacgagaagtaccctcatatcttcaagttctccttgatagaagtcttcaacaaggctttggccaaggatgaaaagggatacaacgttaagtttcgggaattctacgagattccagataaagatgatgttcatatctttaattattatcgctttgaacattattttaaccataatctcaaggacaaggagttgtcgtactctactttgattcagatgaataaacatggctgcgtctataaaactgacgttccagtttacagagcacttaacttatttgtggaagggaaagtcttggaacaccactacctatatcatactattataattatcatagtcacaactgtaagtccatcgcttaccacctgttaaataccatttatatcataatataataattatttcagttatcatgtttgctgagttccgttcaaatatccaagaatagaggtctacaatttttattcacgtctctggtcatcatagttccgcacctatttgttatgtacctattaaacggaatatacgtggcacttgtgactgtcctactgtaagatttctattaattttaaccatttcaactaatttaaactattatttttatttcaaattgtttaaattactttttttgagatgattcataggttttcatacttttttgtaaaatatatatggaaaaagtcttggaaaaattctattgacgactatgaaagaaacgggtaactttgtgaaactaaagttgttcatcagatttgtaccatacgttcacttttcaagaggatccctaatagttgcgattattataggtacattactattcaaattactatattacacataattgtagtcatctagtttgtaataatgctttaatacatttttagcaattcttgccgttgataacatatcatttaaccaattcatgaggaaaacatactatgatggattcagcgcagtatgttacgcgttctgcttataaacttttcagatggacattggggctgggttctttatagcacaaacgggcgcatcaatcgctttaagtagacgtaagtctcaaattcttaatttatcatacattaaatttaggtcaaaagaccctctggactattattaagaagaacatcatcattttagtaattgcagttgtacgaacgatatctgttgcactactgggctacggtgtggatgaaagggaatacggtatacattggaactttttctatacacttgcaatcacaagaattggtaattttaattaaatctatgttgatttagccgtggatattattaatcaatattgccacgaatatgttaagtacgcattgccattcctgatttcaatagtgtacgagattatcctcgtttcaacaggagcaatcaacaagttgcccaatttagatcgctcaagttggttttaaaattaattaacctaatgaataaatgaattaatgctgttttagactttatatacgccaacagagaaggtcttttgagcatcccaaactctattagtgcttcgctgtttgttttattagtgaccaaagcgtcaatttactattacaaaagagggaaaatattcaaaacattaatatcatacttcttgtaagttcaccataaaccgcctttaattcataatttagctcttgttttctctttttcaccgtagccaacgttctctactttgcaaagttaaagtcatcaagatctctggtaatctattagcactaaataataatcggctttttgttcattttaatttagggcaatttccgctacttgatgtacgtaatgttcttatacacctttggactcggttctgtggtttcatttgagattgtttaccgtgagtatttatataaaattacttttttatctttttcataatttttcacaaaattttcataattctcatgatatgttagcgaggtacaaggagaatgatctcatcaacactatcggaagatatccgctggtggtttatctcgttgcaaatctcattacaggatttgtcaacatgatttttaaaccctacctcatgccactccccctcttcatcattatcctctttgtttacttctacctctcaatatcccccgcatacttcttcaagaagatgaaatttaagtctatgtcccaatggatttaatattttggtaccacgcaccttaatatactatatgttatactgtggtatatgaatattagtgctagtatatgtattactgctgtgtatacatgattgtatattatattatgtataatacatgtattatacaatgtatagtataagatgtataatttaatatgcttaacagcatacttagtataccatttaaatattatgaattaagttaaaagttagttaatttgcttgaaataagggattgtacaaatttgatggagtcctgcttgttgaatttatgaagttcctctaaattcaaggcttgatgattaacaaaggagttgaatttctcaaacacctaaggtataattggaagtgaatatgtaaaaataaatatgaacaaaccttgttctcaaagtcagttagaaatgattcgtcaacttcataattgtaacacaggtcctgcttgagaagccggtggttaaccaccctctcatctttgggattgcttctaagggtctggttagtctcagaaaactcgtttctatgggctggcgtagaccagtactcatctctactattgtgatggtactccttaagggcaaactaaacaatagtgtatattgatgatgatataccttaacagtgttttttaaatcctgttcatacttaaggcatgcattataggcagttgaataagctttttgacactcctctttacaccttttctgttcatccctagctgcattaacagcatcgatagcaagttgtcgatattttctaatcgattaattaattgtagtgatattgaattattaaaataagaaatttatggttaataccttacaagctgttccacttgaaccataaggttcttcttatattcagagtcattttgggatttaagattgccaaactcatcatttgtagagtttaaataagtgttatttctcccataatgactaaaaatacaaaataaattattaaaatcgcttactgagaagtgacaaggctagttcccctaacctataaaccattttgtaggtaggaataaatgtataaaccatgttataaaacatattaatacatgtataataaaagtataaatatgttgctagtaataccttggggtttcggttattagttcttacatttgaaaggttatagtcccttggagtatggtgatccctagatttagagtataatgatttatcagatagaggtttggaagcctttattgcaacaaaacctcctttaagttccttcactgcactccgatcgaaggacatcagtgaatttttcactgaattgcatggcctaaagtttgattgactgttagtaaagtcgagaaacagattactggactcaagattatcctccaaatggttttttggagtgttcggaaactcagtttttaaaccattaccgcaccttacccatccttcaggtaacttttcatcttcattattcatattcaataaaacatcaggttcgctgtcatctttatcctgatattcagtatcaatcttatcatcaaaattaccgtctttagtgttgaaattagtatcatcactagtgtcatttttagtatcataagcattctcaaaagtaggataatccttagcatcaaaattagtatcataattattctcaaaattggtatcatttttagtggcaaaactggtatgattctcaacatgttggtgttgatgtgaatttaggttacacattaggagatttgaagaattatcaagattagaatcatttttaggatttacgttaaagttttcaggaacttgtccggattcgtcaaattcattatataaagatgaatctgagcccatagttgaaaagtcagcctcgtaaacgtcttggtcggaggctgattttgattcatttccctttaaattaccggggaattcttgtaaattttgagaatcatctgacactgggaaatttgtcacattattactctccttttgtctgactgtatccacttccagctccattttagaaatcaattacacatcaggttgaaaaatcgatcatataaatagaattaaaagtattttctaaaatagggtttgaagaaagaaaaattcatcttaaggtgaaaatataacaatttaattatagggtactaagaatacaaaggtttataaatgatcaattattaccaacttatatataaaattttaattaataataaatgtgtaatttttatatgttaaaaattcacaatatttaaaaatttagagtggctattttttaaaaactttgtttagtagcttttgaactttgtaccaaggtaccaggaaccatttgtttgattctttgagcataagttcagttcttttctccagtttgaaagttggtggaacaaattcaagggtatatccccaaaatggttctgaactgtgtacctttttgtaaatcttctcaaggcttgtgactctcagttcaggcctgaatggaggtgagtttgaccagaacttgtaagttttaccagttttttcatccttataactgtaccccttactccatctgacatttttgtagaactccttggcctcagttggagtgaaaaatactaaaagcctgtcacctttgttgaacctatccagtttatcactttcttcacttcctccctttttatccgatttagttgtgacgtaaatgggaggattagtggtgaacactggtgtcccgtggaacgagttaccgccctggttagtggcgtagactagagattctgatggtggaatcaggatatgaacagttttatcatcgagatagaagctaagtccgggctcaaatgcttctagaacctcatttaacttcatttttgagagttttgcctccttttcctgcttattcagctccaatacgtagttagagcaggcgttcggatccatgaaaacctcaactgcgtttgggaggtttgcgttcagttcatccacattgtacttccagtcttctttgcactcttcttgagtgaataatgaaaggaagtctccaacaagtgtaaaatagtttggtctcttcactttaaataacacatttgaagtaagcttgggcctactaggtttatttgtctcatccgggtagtatgataacactggtgaatttgaatagtctacagcgtagtacaagtcaacctcctcgaattgtaaatccagttctatcactccttttatacgctcacagttatcaagaaaactagataaaatagtagcataagagccatttgggaatcttttgccaagtggtactaatcttcctagtttaaatttaaaattattattttctccattttttaaattattcttttctttatttgaagtaatgtttggtttattttcaggtgttacatcagcctttctatgttttggtacgaaattaggcttgttagatacaggaaggaccgttctgttgtgtatgattgctagtggcggtagcttatgtgttctattacatcttggtgatgttgtctctgaaaaattaatagaatcaaacaggattaatagaaatattaatcccgaatccagtccaaacattattataaatatacttccaagttggattccacacaccacaaacgtccttaaacacacactaaactaatcctggagtataatactctggttaagtaaatagaaataaaaaattagtacttataatcttcatgtttgtatggaccgtctttatcaattcctagaaattcacattgtctgtctgttaggactgtaagtttagcgccaatggcttccaaatgataccttgctaccatttcatccagttttttaggcattttgtgtattttattatcgaatgtatccttattttccaaaagctgggaaagagcgaaaaactgtgtggtaaaggacattgacatgactagcgaggggtggccattagcgcaacccaagttatacaatcttccgtaggaaaggataattactcccttgttaaggtccttaaacttatagtggtgtacgtttttcctaacttcagtaatctccaagtgtgggtccttaagtatttcatggattaatatttccctatctccttgtccaatattgcccaaaatagctccatctttcattctcctaacatggtgaagtcttataacctcaatacatccagttgctgtaacaaatatatctgctgtttcaaccacatcttccagaaggaccacctggtaaccgtccataacacattggagagcacagattgggtcagcttcacacacctttactatggctcctgcacctctgaatcccatgcaaaccccctttcctgtgtttccgtaccctaccactaccacttgacggcctcccaaaagcactccttcaactcctctgtgcattccgtcaattgagctatatcttgccccgtagttattatcaaatttagtcttgcaaactacatcatttgttgagtatattggaaacagtaacccgtggcttttgtacagttttctcatctcagttaggccactcgttgtctcttccgacaatcccacagttctttttactaaattagtgaagaaatctggctttttagtgaccaaatggttcaaaaagttcagcagtgccctggtatcattatcacttggttccaaaactgaaaggtcgtacaattggcccttctctctatacatatcctccaaccttttcccataatgaatcatgttatatgaacaacatccatcatccaccaataacaatggcattgaggtgtctggccaatttagtgattgatacatacaccaaaaatactcttcaatggtctcacctattattaatattatacactatctaacttattaatgtaccaataatatactaaattatactatgatcacaatataacagtataatacctttgtaaccgaaaagagtaactttgcctttgaacattctgtctgcagtaaaaatggcttgattattagaggagtttgggtttgaagaacaccatctcaccactgctcctagttctaccagagtacgtgcaaatgtcattgtttccttcgtcatgtgaagacaacctgaaatttgaactcccttgaacggcttcaaatgggcgtgatttttcatcacattaaccagtccagggcattccttcaagcacaaatcaaggacaaaaatccctgtatctccatagtcatcccccttgtagtaggttttactccagggttccaagtcattccaaagctcaagcatattccctcaatatcaaatgttaaaacttcactgaaagtacagaaagtattattaatgtaacaaatctaccaaaaaacaaaaattaaaccaaaaaatattaaaaatattacagaaaaatgtgaaaagatggtacaaacacaagtaaacgaattaattagtggaaattgccatattaaatcttaattaagggatagttaattaatatacaaaagtatataggcccacaatatgcgaaataatggaattatctcagataataacaacatcgatactaaatggggtcttgagaataatagaatagaataacaaagaaaattgagtggtaatacacaaattttctttattcctataattacatattacattatcattatgttttttgattagaccacaaagaaggctttttatcagactccattttaacaactcatttttatagttcactatttttagttaacatacctatttaataatatttgttacatataattagttttattttgtaacttatttttcacttatataatattattccaatcttcctcctatttttaaggtctattgactgattcttatttattttctattctagattccttattcatgtacattataaactattataccaaatacactttaacttatgaacatttttataattattttaacgtttttctttaatgtgtaggatggaactttcaataatggcattaattactcatgataatgaaaattttcattcttaagaaaattctgcgctaattttcaaattattcatgtcaattaattcatttattacatttaaacactacatgattagttatatgtgaataaccaagtaatgtgagttggtacagagaggtatagacatgccgcggcgcacctggatgcatttctctctgtacaaaggagaggaaatagatatattatggaaatcgtgagtatattctgagccttgcacaatgtcgagcgtttataaaaatgaaggggaaattcataatgtgttggaccaggaatgtgttaacgggtgtaatcctctggacaaaagtgagattagactaagggttttcgattcctctcataacatttcacaaatcttaaaatttattcccttttatgaaaggttaatgctaaggattgtgaattctaagtggaatctcagtttttatttttccggttgttgggaaaacctggactaccggttttacgacctgaaaaaacacgaattttacctaaagcatttgaaaaggtttatagtttcaataaagaagcttgaaatttgcattgaccagatttcagatttaaacaagcttttaaaatcaatagaaaatgaagatttatatccccagtgtgtaggccttaaagaggattgtaaaatagataatgtatccaactgcagtattgagactccagactttatcgaaactgatacggagtctaattatgatgataacttgagttttatcaattactccactaatgatcccagtccagactacatttcagatgtagactttgataatcattatttcaatgaagacgttgaaactaatttaaatcctgaggaaacagcaaattctactggttcccctagatctgacgatgcttgttctattgatgactgtattgatgagcttaaaacacttctatcgtctttaaagaacctcaacaacttatacgttagtgataggcttaggaaacacaatttggtttattctaggatcagtccagttatacttgaatttattgactctaattctctttctatcaactctttgaaaaactcaatcaacacttctccatacccttcactatcttctaactatttcagtttaaccaacttggttttagactgtcctgtgaacttaaactttattttagaacttgttcccctaataaagaatgtcagaaacctagtgatctccagagttgctcaggaggattctgacttatcaatttgttctgtcgtttctgaacttctggaacatattcccaaatctcagctggaatcaattcaaatcggcaagaccatccagaatgttaaaagcctgaagaaacctagcttttccagtgaagctagggctagacacgtcaacagacttagtatggcctctggtcttttccatacctctgatgattctgaggaaggagatgaactagtctatcttctactgtcaaaccattcaaattctctaaaaattattatcgtaacttctattcttaatctatttttactaataacttgctaataatttgtttagttggaggatatagaaatttcattttctgcttttgataaaattaggaatttagagttagttttcgttaaatttattatttttaggaatttaagatactacagaatccctgtttggagtagtttaagtgagttcttccctcctaatttcgttatatgatgatactttccaattagtataaagtagttaaaatatttttcaaatgctttcttatttgcgattcctcaaatttgaaattcctgttgggcaccacttgtttactgggcaggttggacatcccggtccagctgctgtacaaaatgtttgtccaaatccaaccagcagtgggttaatcttactccacaagtctctaaaataatatttatgagttatttaaatactttggtaacaattcttgtagttttaggcttgtttcctccggtgtttttgtctttacccatcccagtctatttgttattctgtgcacgtgtatatccactgcaactccatccaccatgttaaatgcctaaatattgttaattaaaacaaaattgtgttaatgagataccacttgcagtatcaagtttgccatcttcggtcctattcctggcaatgattccaagtcttttttattcgatggtactttccctccatattggtcctttaatatttgtgcagcttttttaatatttttagcctttgttttatgaaatcccactttacttattattgaatctagttcttcttcatccattttcagtatgttatccaatgttaaccctcttttcttcaaattcttcatagtcaatgcggttatttcgtccttagtttggctactcagcatacaacccactagggtttgaaattcaaaatgttctcctgggtctgccacacagtgacacccatacaaatcaactggcgctatttcctacacatttttaattacacactaagatttttataataccttgtttcttttgtttgcgatacagttccagacctttgtaaagttgggtattgaacatactccctcctctactatgggaaagttattaactttctcgtcttcagttttactatccaattgttcatgttcgaccttttcatgtttagccttatcagagctctctgattttgcacttttaatgatctcctccacgttaaaatcatcggttttactatctcgtttagttttagttaatcttttctcaggcaaatcatcctcgtatgatatctttagtgttcttttgtgtttaaatatattctttagttcagattttgtattcaggatgttatccaggtgatctttagctgttaaattttctaactccttttgatgtttttgtgttttcagcccttggatcttagttttacttgaggtttcactcttagcaggtttcttaacggccatatcaacgtctttgccgaaataaccgaatatatcaacaacgtaattgcggctaaaaaatctcggagcaacccagcctaaattaagttttaatttttagaccaaaccaactaacattcataaataaaattttagtatatgttaaatatgttataattaaactattttaacagagaagattcttatataatatcaatataataaattaatgaataaagaaatatgtatggaggtaccgtaattccacctgggtgtaaacttcaaaaaactcaatgctttgacaaacgactgcagtgttaataagaagagggcgagaattttcaggaaaaattttaaaaaacaaatcttcatgatacattacacatcaaagggggtgaagggaacttacatcaggtcacgtaaacctgaggaatatgaccataagtggaatgtgtagaattaattatgcctaagagcaaatgtaaactgggatataagaataaagcagaatcttaatacccatggggaatacacagtcaccaccccataggccgttaactatttcacctattaattaatagtttttagtttattatcggtatattttaattcactaatttaaatattagatctgcctttggtagcaaagatggtaagcttttatttaactttattttattcttatcgattggttgaatcatccttctatgaatttaaaacttcaaacttatttcttttaaaaaattttaattgaacatataaccgatttttcagttatattttatttgtttgacgttttaatcttttctggtgatcatcccactatttcccctattatactttactttatcttactttgcgctaaatttcttatattaaagtctaatattatttttcagatgcttcgtttgcagaaaagacttgccgcttccgtgcttcgctgcggaaagggccgtgtttggctcgacccaaacgaatccagcgagattgccatggccaactcccgtttcagtgttagaaaacttattagtgacggcttaataataaagaagggagttgctcctcatagcagatccaggatcaggctttatcaccttgctaaaaggatgggtagacataccggtattggtaaaaggaagggttccaagggtgttagacagcctccaaagctcctttggatgagacgccaacgtgttttaagacgtttattgaggaaacttagggactctaagaaaatcgactcccatatgtaccacaacttttatatgaggtgtaaaggtaaccaattcaagaacaagcgtgtccttctcgaggccatacatgctcagaagaacgcttgggtcaaacagaaggctgaaaacgaacttgtagaggcgctcagggccaagtccaagatgctgaaggagaagaggaaagccagactttcagctatgtaattttttaacctctacataccttttaatgtaatatgaagtaaccgaacatgaattttacgtttatatataataaattatattaaaaatttaaatttatatattacaaggtcgctcaccacttaaggttcattgtgtttttctgagaactaaggtttaaattaaaatcaaacctcgactgaaccaactttaataaatttgaaaaatattggcacacttgatcttgggtactaatatattcagtttcacttaaaaatccctcaaaagccgaggcacttgtagtttgattatcaacttgagtttttaataaatttaaattcttgaaatactttttacgaacacaatcaggaaaaaatggaagaatatttaataaaatagactttttagaatctggattgctctgaggggactgaagtgcctggccggcaccgttgaaacagcctccaggacaggacattaattctatgtaatcacatacaaagtcgcttccatttgaactccccgaactatcagacttattttgataataatttccgctagaatcaccggtgttcttgcgggatttaagcaacttgattatgttctgaatatttctaaaaccgtaggctattataaatctcaaaagcacattgttattactgtccaaaagtgtacattcctaaaaaaattaaaaatattagaaaaataagataaaaacgaaccttgaagtcattgttaatggtttccatgaactttaagttactgttatccacatctacgttgaataactgtttacaagaatgtttaaatatctcctcagcaaaacctccactttgagaatatagcccagagcatctaattagtttcatcaagtgattaaaatctctactttcataattaggtaaggtcaggttgtggttaatatttaggtcggctattgagttaatcttgttgaaataatacagaaaattaaccagatgatcgggcggctcctctttcaattgagtaaactttaaacccaaactattcaatatattctcaatgtcagaagttgaaagtatatcatcaaccaaaggctcagtttctaaggcttgagagtcatctgggtcaccagaagtgttcggatttgaatcagattgataaagtgaaaagagagatttaatatcgaactgaaactcctttcttattgtttcgaactttttatcatagcacggaacaattgatatgtgatatactttcgtgttgttagtgaccttgaaattatttattatattattttcactattagaattacagttgacgtttgttagaaaactattcagaaaacagttagaactaaatagttttaagtagttaatatggtaaatggtgttgtaataattgattgtatgggataaaatctttactagcaagccttgtatgacttggctgcttggtaccttacttatcaaatttaacaaatcctggtccagagtcttctcagcgtataatgtccacccaggacagtgactagttattattggtaaattaaatcttctctctttgtaattttgattgtttaaatccttattaataccattaaccattctgttagtatcatcgaggtcacttgaatgggttgaggaaacagtgttattgttgtacttatagatgaactcttctttactttgagttaaagctagcaattcagccaacccgatatcaaatatcaatttagcacctagaaaccgaaacagataagataactttctcagcgccttttctgccttcatgttatagtgacttgaaagcataaaaatagtctgaggagatattgaaatgacgcagaaatcactatttttcattttttcaataactttcaagtggttttcatcctttaaaagtatctcctctgatgaggttaggcatccagagcaggagaggcagtcactcagtccaactgttatctttttattcttatcaacggttgtaacatttagtttattatctttgtatatgtcattatttagcaaatcattaggtaaattacttttattttgtgtatttgagtctgaaattttatcatttagccttatttcatacttgttatcactctttaacagaggcaaaacgcattcttctccaggattaaggtaatcattcaagccggaaatcttcacggcatttgaatacatcttaaaagtaaagaaaggtctatttttattgcagaaaaatcaaacataatgattgaaaataaaacatggaacaaaacaatagaaaagttcaataaattgtaaaagtagattataaatataaattacatatatgttgtacaaaaaataaaactaaatcagattaattgagccggattccattatataaggcgtatgttaaatatagtgaatacgctcaattgaataattttaaaaatctttcacattccagttttttatattatattatttatcttttttccctttagacctagccattatgttttttatagcgatttcaaccttttttgccagaaccgtgactttatttgattcatctttattttccatagttttatctccagtcatgaccatactcattacacattaataattttatttatttaaaatcatccgatttgttaaaacgtgcaaaaacataaaaaattttgtgaaagacggttagactcaaaatgtacaaagcgatctatactagatttttgcctaaaataatttattatctcagaaatatatatttaagtctagttattttataaatctaataaatttacccgcaaacacttctgtatggaatcgagatttttacacatatgtttttaagttttaaaattttctaatttaaaacatttgaatatataaaaatataatatttcgcaaatttatgatctagtcgagcagataaaataatattaaaaataattttaatgggtagctgcttcatccaaaaatgtgatgttgtaacataattgacgacataaaaaaccataacagataatgataatatttctagatctgtgtaaattcgtaaagtttttggaatcctttttatgtctgagttatattctataatgaaaaaattaattacaaattaaaataaacgtaaacaaaatactgctgttgcttttgggaatagatattttgaattattttaatatttgttaatagaaaactcaagaatataacagattgtagttggattatctgaaatatagataaaatagagaatggaaacgagccaaaaacaacaattttatagtttataagttagacaaaatctgcaatcgcaaaactttttaccagagtatgaaacaatgaataaagatacctgcgtagaaaataatacagattctagtaattggtaccaatctgggaaagatgtggagtttgatgacccatacggtagtgagtcagaaataaaatctgataatgaagatgcagaaaagggaactgaaacattacctgatgataccacagaagtccaggatgaaacggaaaaggaaggacccaaaaggaaaaagaagtacttaaactatagccagagtacaggaatcagtttctttttcttctcatggatgacagattggataaaacttgcaagtaaaggagaactcaaacacgaagatttcccagatataccagactcagattttgatcaatacgcaacagcagagttcggaagttgtttggataagtatagagattatgaaaagtgtaacaaactagttaaactggtagggcgaagtagactgtgtgtgttaaaggtatttagaagaagttttgtgttcatattctgtttctcaatttttaatgacatattcgaagtgttcaactcatacctactgaggcacgtgatgaaacaaaaaatgccaaccacgatgaaagagcttttaagatgtaaatccattatttataaaatacttatggcagtgttattaattattgtttgtagattttggactggtgtttttggtgttgatagtcaacttggtggatatagtgacggatggacaccattatttctactaccggagactagtgttaagaatagagaatctcttattttcattcttgtttagtagaatactgtctaaaaatcactttagcatagaaaatggatctcatagatctgagcccaggtctgactcattcctaataccattagacccgaataatagctttaacatatcagcattgcctaggtaccaccataaaagtagtgggatagtggatagtcaagcaaacttcaagctcgaaaagattaacaagaaaaataaaaagagctcgagattctcaaaaagaccgaaaaacgtgaggtttgacgaggaggaaataagcttgttaaatctggccctgtttgacatttcagagattgcatggggaattcttaagttaattgaccttctgaccatcccgctgaagattttaataataggttgctggctttactaccaagtaggaacaacagcaataaaagcagtgagctttataatcatctcgagtgtactgatggtcctgtctgaataccagtcggcgaaattagtcaaggggtatgtggcaaggatagattacagaatctctaaaaccctgatcattctggaaaaccttacaaactttaaaatgttcagatggttgaacctctgtaagcaatcagtattgatgagtaggatcatagaactacaactgtgcctgaaaagaactatactcagctccatcgggtcatggcttggaataagcctacccagtattctaggactggcggttttccttatttattcaacaagtcagaaaagagtggcgaatttagacccgtcgttcacaatcccactcctgcatactcttaaccattttattaagccctttaaggacctcccatcagatttaagtgaccatctggaaaccacaatatcatgtgtccgtatagagacttttctgttctccaagcagttaaagtcgtatattgacactaatttcacaggttctggaactagccctaactctacaacgccatcaccttcatttgaaagcacaccgaagaaggcgcaggatctgacaacaatggtgaaaacaatatacgaagaggaaatagaaacaggaagaagcactttgatagatgaaagcgataatatcttcgacaatggaggcttttttacagacgataaggtgaatttccagattggtaaacaggaggaggagcaaaccgaagaagataaatacgtcgtctatatgaaaaatgcaaccttttgtagaggagagaagaagatattcagtggaattagtttcaagttacgccaaagagataaagttgtaatctcaggatcaaacattactgagaagtttttatttagcatgtgcctgatagatgaattacgacacactgacggtttgttatctatgataaatgattagtatgtagtaaaactagatcgtaacatatgtttatagttaaattaattgtatattaacaatgatttagggatatactttaaccactacattaataagaatatgtgcacgggaatagtgagccagagcccgtggataccaatggggacaatcagggaaataatactgtttggaaaccagtacaacaggaagctttacgaaaaaatcattgaaatctgccaacttagccatgactttgcaaactggaagatgaacgatatgcggttcatagatgaaggtggacaaaatctatcaacggggcagaaagtaagaatatcactagcaagaacattgtacacactgtatgcaaattactttgaacttgataatttcaaatccatgagcagtaatggagcagtgagtacaaataacaatggaggaaaaaagaacaagatgggaaatttggttatactggatgagatctttacagtccttgacccacaaatagccacgaaaatttttagtaacctgtttggaagggacggaatactgaataacttcacatgcatcataacaatacaagatagtttcttgccaacgttaaaggataccaagtataacaattactttaaattttataccttgacgacggcatatattcagccaataacattctactctcatgaagaaattttagaagttgaaaatactgaggaggaggaatcagatgaaaatacgttaccactagaaagaaaaagttcaagtgaaagtgcgaaagaggataagtttaaagaatttgaggaagaaccgcaagaacctgtaacaagaagtgaaaccggaccgcaaggcagtgaactggaagttaacaagaaggacaaggagttggatgaaaaggagaagctttttggaagcaacgaactctttagtaacggtaaccagaatatatgccttgtcaagctggaaaatttcatatggtacctcaagaaggtaggactcagactagtaatactcgtggtctcagtctcatttacagcaatgatgctaaacgttggaagcgatattgtagtatcaaaatggtcaccaccaaaatctaaagccgaagcaatggcaggttaataacataagtattaattaaatttaaccaatcaaattaactaatttatttaaataatttatttagctaatgaggaaaacaaaatgttaacattgatttaggcaaagtaagtcaagtaatgcagatgaaaaggactagttatttgatgaagttgaactatttgtacatcttcacgtttttgacctcttgtacaattgtactgtttttgtggagatcacttttggaagtccaaggaacactgagcgcagcacacaaggtctactcaagtgcactaaacggtatactgaattgtcctatagtgatattcaacaagataccaatagcaaacataaacaacagacttagcgcagaccaaagttacgtggattacagcgtgtttcgaagattttcacacttcatgtcatcattcatatatacatttctgacagtgagtttttaaaaattacgtagatattcttgaaactattgtattaaatagaattaatatacttaaaatgtaaataatattgtaggctgcatcactgtgttatttgaacccatggtcagcactcctaatacccctgttgatattgttatcatatttgttcgtgttcaaaatgtacataccaatgtcaatgtaagttcaataaaggattatttatttattaaatagcttaaattaatataataatataagaaattaaattaataatataagaaattgaatgaataatatcttaaattaatttatttaagcaaaattttattaatttttagatttaacatgaggagcagtttggaaactagaggatatatctgcagtcagttctcccaagtcatatcaggctcctacgtaataaagtgcctcaacaacgaaaattacatcatgaacaactttttaaagtacctgaaaatacatcaaaacaccaagttcttctgccatgcctcgtccagctggaccatgatcaggcttaaaatactgacgtacccgctgattgtaattaacttgctgaaacccctaattccgatcataagcgacgctaagtttaactccgcagagagccgcaaaatagcagaaatgccaagtgccaccagaatggcacaggaagagaagaaaaatgagatggtagatgggaacataggcctggcgctaacatattcatataagttcgcaaagctattaaagtcaacactcaataaaatcgtggaactagaaactgaaatgtgtgcatcacaacgtttacaagtttgtttccatatgtttatagtcattatttgtattcattactatattatgggtagttactacatatataatgcctaattattaaacgatttgttttatgtatgaggtgtaatttctgactgcaggaattggcaaagctggacccagattatgatatagcagaagaaaagatattcacattcaagagaagaagtaaagtgaataaaaacttggttactactaagattaatcacattaacagtaaagtgtcaatatcaccggggagcctaacaccctcgctcaccagcttgggatcctttgatgaacctgaagataccctttctgaaggcttgtcagttagcaatgtggtagttaagtacgatagcaagatttgcttaaaccaaattaacttcaaaactgataaaaatgaacacgttggattaataggaagaacaggggcaggtaattcttagttcatagaatctttagtccactaaaacagatggatatataaataaatactcaattaatacagatatataaacaaatactcaattaatacagatatataaataaatactttttagggaaaagcactttattacaaagtctagcaggcttaattaagctcgattcagggactataaggatcgacggagttgatatatcgaaaatttcgaatgagaagatgaaaaacttggtaggaatcctgccacatacaccaccgctattaccaggatggacagtgaggaggtacattgacccggaagacaagcacacagacgaggaaatttacaaggcagccaagatgtgcaactacacaaagtttatcggatacctgttaaggtgcgactttgaaaacaagaacaagaaggacggagatggtacaaaattaactgatgaacaaagcgagttcggagattacgctgaaagcgagataaacgacgagttgatcataggaggagatacctttgagaacttaataaaggccctggacattagaattgcgaaacaaaaggaaaataaatgcatcacagtctcagatgtcgatcttcagtatttgacgctactgaaactataccttgacagaaacaagttaaggctcattttaattgacgaatgttacacagtggagcaggataataagcacaagctggaacagataactgtcatcattaataggctatttaaggagaatattgtcataatagtggctcaccaacacgaatctctaaggtaagtcttaattttcacattttttaagcctatgtaaccgagtgctactattggaaggcgggaagattggagaaatccaacacgaaaattaacatttttaaattaattattttatataaattaaatgtggttcatattttttacaaatgtaatatcaatttatcaaattatgaagtaaatgtgtttttaaaattaatttttaaaaattatcatgtacacgagtttcgattaatgagttacgggtggcttacagagagtactttagggccaaaaaaacctaaagaaattactgttccaaaaggttcaattgcgtcgttaaataacattataaagaggcatatacagaaggataatgagaaacatgaacaaaaacgaaaatataagaaggtatggattaaatttatttacacatttcagactgaccttttcgaacttagtaatccaggagtggaactgagaaataaaatcgacaggaaggaatctacaataaatcgcagggataggaggaaaaagatggaagaaaaggctaaattatataatcaaatgagtaagaatataatttatataatatttgttaaattatactataattattaagttaaaaaaggaagataaatggttaaataacgcacataagtaaaatgaataaatgtgttcagaggaagggaagctggatcccggtgaaaacagtgaattcttggtagatttcaagagaaaaattcaaactgaccaagaggatttaaaagaaggggaagaaggttgaaaataattacaaatatccattcgcatagattcaaagaataatttgcatgtataggtgttgaggatgtaaagtcggataaaatcaataaagaagaagagggatgattttgaagggaataagtgttcgtttcaataaaaaaatctcatttgccatctattcatgccattaatgtgtggaatcttcgatggggtcgtgagatccttccaacataataatttaatataatctttgatttttatttgtataaattatgagagatagactccttttagaaaatctagatgaggggaaaccagcaatttggcatcgcaatacattatcccttattaacgagaataaatttgataatctaaaaaaaagcactccaacacaaattgtatacccaaattcctcatttaatatcggattacccgttgattccattaatcttcaggaatcttcaaacacgaactacgatggtaattccatattcattttttattcccatgatatactttgtactatatatacttataatttatcacttttaatcaattctttaatatgttttagaccctttatatgacgaagacgggaatgataagccgttaattgtctacgcttctaataaaccaggtaagctttgtgcctcatattgattcgcagaaaacgccaaaaatttcagaagctacctacttttggtgtgtttaatgatcttttataccatttttgtcctctattttgggcatttgatgaaatcgcacgttgattttacgaggtcaagcgtggtatacctgaagattaccaaggtctcaattttcctctatttgaccgttttggttcttttatccttcgggtattctcaagttttaaggtttaatagtctaatgacgactgtattaatggcacttggactcttttacatcgaaaagtaagcgccttacacacttgtgcctagatcatacacatagttacacctagttagctaataacgcagattccaacgcgtttggccttctagtacctgaaataaagcgatctgcgcttggaagtcacgtttacatctgcatgcacgtagatctaataattactgtagcatctacggagtcctactgtcttcggtacagctctcggtcctcgtttgcaactatcactcgatttataaaaatacacctaaggtttttatggtatcttccgtccagtaatgtccttttcaagccacttatacgcctacgtatacctcaactcacgagtggggggagcccatatcactcggcccgttatatacactattcagaaactatattctagatctttatcaaaatgttttctaaaattctcgttttcgctctacttaacgtttttagcgccctttgcaatttttcactagtgccttctcaggttttactaccgagaacctccgtttacacatctaagcggactcatcaaccaataacggtgaacacccagatcccgttaaaaatcgagcccactttatgtgtaatctggaaaatccaagatcctcagctcctcgcctttgataagagcaactacactcaccccaaatcgaaggtcccaggagattcccaggattttgaaccatacacccctcacgaactcaaaaattgcttaccttctgttgttattaacactgtacctcttaattttaaaaccgacacattatacaatttggaaaaaaacataaaaaatataaaaaatgaaaaaaatgaaaaaaaaattaacaccggctcgaaatctgggctggaaaatgtacaaacaatttctgaccttagaacgtttgtttttgcatacgactctaagttcagattccacggtgtgactgaagtcgtgatctccaagcttgaccaccttacccttgagacggcttatcgcaagatttcaaaaaaccaaacctttaccctgaaattaaggggctttgacaaggttggaaacacattcacatccctagaaggcctacccttctacctatccttttcgggctccagaatcttcgacgttttggacaatgaaggggagttatactcggaaaagagagcctcggtactatcgcaggcagaacactttgatttgccagaaaacacaacacttgtaaccgatgttttgatgttaaaaggagctaaagtcggcaaaactacgctcacttttggccttttcctcgacgaatactccgacgtggcgacaccgccagtggagtttgtggtaaacgactcagtggttctatcccaccaacagctttacctacttgataacacgtcattccagctaacactcaagtatccatcatcagaatacgtataccagtaccctaacgggaacggggatatcaatttgtcaaactatgagtggtcaactgatgcagatgcggataaattaaccctagataaaggacttgtacaagtacatttacactcagagtccaaagaaacgcctccatccgacaaaccctctaccaatgaatacaaatgtgtagtgtactgtaaggataaaaggaccgaccaggttctaaagacctacgtcaatgtcatgaagccacactcagtggtaataaagcacaactcactaggcaatttccacacctgcttaatgaacaaggacttattagcgttaaaagatttcaaaatgacaaaattggctgatacccagtatgaagattatttgaatattttatcgcaatcgggtggtgaactttctgactgttataaccagaaacaggaagaaaggggagatgtgattaacctcttcgagggtaaccactatctgttcaagctaaacctgctaacatataataagaatgttttcgactcaattgacgctaacgcagtttcattcaattcaacctcagccgatgaggatgggttgttgacgctgatgaagcagaaagataattattatgtattcaaggctagtaatctgggttgtcagtactacaacgtcagttatgacttgtcgcgttcagaaaacccagaaaaactctccaataagtatcaaatttgtgtactagagcaagtcaaactacaaggctttagtacgaccaaggctaaacttaaaggtatttcacttgtacatctatttttccaattaattattccacatatttataaatatagtattaaggtatttatgtgtaaatacgataaactaatgtgtatttagacgggtatccatgtgccgagagacctttggtggtattggttggagatgaatttgaacttaatccaaaaggtggctcaggacgatacagatatgaactggataactgccacgtggaaaataacaagtgtgtctgcaacaaaaaaggctcataccagttgaagattgttgattctaataatgaagaaaatggtctcctagtacaggtgatatcaaccacaattaagtcttccaagttcctccacgtatctggtaatacaacagtgccagaactacataaccaagttaatgtgagactgaaccaatcattctcactgaggctaagcctgtttggtgatttgcagggattcaagcccatgtttaaggagaagtttgagcccgaagactcgatactgtactcattcaactatttaactaaaccaagttacctgataccatttaatgagcgggaaaaggaaatgtttggtgaagatttctcagaaaacatgccgagaatgctgaattacgataagaatgtgctagagtttaaaggcgttgaaaaggacccaggtggcttcctgctcctaaacttccacacactagcctgtaacacaactaaactttaccttaacctggagttgataaagtcattgacagacactccaaaacgactagatatacttcaggatcaggcaggagcaaagtttgcggagttggtggtcaatgtgtacagagacccggtgctctacgttagcgagaagcaccagctaccagtgcttaacttgacaactgttactccacactcagaagtactggcgaatataccacttggaggcatgctcgagctgaactataagtatggtgtaccaaacgttaagcctaaactgttgagtactggcggaggtggagctaacagcgtgctacacatagaacctcttacaccaagtgataaggactcaggaaatgggttcatggtctactgtttgaatttgggctcagaagacgtttcatttgagtttttggattataagaaggagtacagaatcaagtgcagcatgcctaaatataaccgaatttacccactaaacaagctgaccagtgatttgtacgagctggttcaaacaagttatgaagaagaccagaatccttcagaaaaggatcaggaggttgaaagaagatatacagttaacaagaataaggttaatcgatatgttaacctattattcgactcggataataacctactgttgccatcgaaactgtatagaccacacttcaacttatacactcaaaatgacgaagaattatctagttcacaatttgaagagatatcaggttctcaacttgaagaagtgggtaaggatggagaaatgatggtgtttaagttgaatgattcatttaaaggaagtgggatgaaggtggttggagtttacagatatgaaaactaccctgaaaactattctgaaacattcaatagactacataaatacaaacgatttaaccagcaactgctcaacgccttgaagaatagccagtgggataggaagaataaaacatacatcttccaggacacacttcacttaaacaccgtatcaaatccatcagtggtactggttgactcggatagtcctgaagtctatcaaaaggacctggatgtgatgtataataggaaattcgagtacagactatacgtgcatggagggtcgggaaaatattccctgacaacacatacacccaatgtcaagtattcattctccaaactatacgcatttgatactgaagattccaaacgtagtttctaccatgaagactctatccccgatgaatctttgccggtttcggtcaaagatacacatctggttgttaacctgttcgacaatgataagttaagaggtagtggaagattcctaacattttcatcaggtacttttcaaattcttcatattaatgatattgtatttataacacagttagtcataaaacttatatacgtaaaacactcgacagcctatatttaatgtgtagacgaatccggagatgtaatcctcggaatcaaagacgacgatttgttatggcaagacacactgaaactcaacgttcacttgagaagaccaaataacctgaagatgtatattcacccaatatcaccggcaggaagtgataggaagaatccgaaagtacaattaatgaaggaaggagaacagttggtgtttttggacgaaaagtataaactgggcttggaatgctatcacaacactcgaaagctgctggcaaagacaacgatgctgtcattccaacttctagatgataacatcctcatgaaaatacaaagtaaaggaggacacagaagtaaggttgataaggaagaattgagaagtgaattgatggttagaggagaagaagaagtggaaatgaagacagtggagttgggaacaagtacattattggtgagagacttggaaggaaccatgaaagtgccattcaagtttaaagtgtcaaataagccgttattgagctttgaacagttgacagtgttgccaggaacgaagtttgatgtctcgtttgagaatataatcagttatagtaacttggtggtgaagacgacatgcacaagtggtcactgccaaggacaagaacccgacaaagaaaacccatattcactaaagtttgaaaaccttggaacatataatcatgatgtggaagtgatgtactcagataatgaactaacaagactgagtcacaagttgacaacgaatgtttcaagaccggtaagcatggaattgaacctgccaagcctaagcgaatcagtgaatagtggaacagaagaaaacaagtcagaatacttagtggaaagaaactcagtgcataacttgaatgtgctggtgtttgacgataagaataacctgttcacaccgctgtacttgaacagcccaagcctcaaattcgactacaagttcacaaacacatgtaaactactcaacgacccaatgaatagtacccagcttgaagaagaaagcaatagaaacaacgtgcaactgctggtcacggaagaatgtgagctggaagtgctccttaagtataataactcagtggtccaatctaagaaagttgaattcaaaatcaagccagtggaaacgctattcggagacacagaaacagatgaagttgaagaatcagactacagatgtggaagcatggatatggaggaaagcctaagctatggaggagtgtatgaaatcagtaaaagcttcaagagttacccagaaaataagctcaaacacctcggaaacaacctctacaaagtcacatctgaaggaagtgtaatgctaacaacagattctaacgtgtataatctaaagctgctaaggccaacacacttctcactatcaccagtgagatcagaattttcatcagaaacatcagaaagtagaagtagcagagatacgttggaacacgatatcatgagtagtaataccagtaaactcagcttcaatcttaacctgtactccaatagaagtagattgagaatgccgttgaattcaaagttcacactcagattcaaagacctttcagtcttcacatacacactcgagaaacaactactaacacttacaccgagtaagataggagaaacaacgatggaaatactattcaacttgggaagtggagtcaccggaggagtcagtgccggaagtagtagaagcagtggaagagtcagtggagaaacgagaagaagtacaggactggaagaaagattgaatagaatctaccacttgaagaacacagtcacagattacagcagtgaactcacagcgattcaaggagcaggagtgtacttggcgggaagagcgatcaacacagttgtggcaaacatagacgtcaacacacacgagttcagcaaactactcaagaataagttcacagtcaagacattcagaccgagcttcggaacagaaagtgaaatgacacatattaacctaacagaaatcttgaataccgaaaccaaactcaagagtaaactaagcagtaatagaggaacgtacaaagtgttcctgaacatggtcacagactcactaaacatgctattcacgacatcaagactgggaacaaataatagcagcagtagagatagtggaagactgtttagtgtcaacgcgctcaaagacgcatatcactgcacaggatgccagtgcagactacaactcaaatacaagctggagtcaccggtcacattgaatgatcttcaggcagctaacgcactaatgtacgagtactacacaagacgacggagggatgagaatatggaggatttgatgaggatgctcagcagtcccctgtacggtttagacgatagcatgtggaataaagaacttggagcagtaagagattcaagtgttaaagttagtttgccaggaaaacagacattcaagaattcaaccaatgatcagtttgcagtcagcacagtgccgttcaacccctcaaatttcaagttcaagcaagtcaacggttcgacaattttactattaccaaattccgccaagggcttcaaggaagacgtagtgctggggaacacaatgaatgttgagtattataactatgaacttaagtataagttcagtgaccaaatattggataaactcttttacctcaagccgtcatacagaccatacactggtagcgaagccaatgaaacaggtgacaccagcttaatacacagattgggctacgacatggttttaattaacacgtataacagagattggaacattcttaagaattacttaagaactatgtcaaatgacctattaaaggggaaacacaaagtaacactaacgttattaaacgttcttaccactgatggcgggaaggatagtgtaaaattgttagaacaagagctggaagttcacctaccagagataatgttattcgttgatgggaatggacatatactgaatgaaatcaatgagagtaacttcaacaatctgattcacgcatacccactcaacacctcatataagttacacttgacaagtgataggttcttgttaaaaactatcgagaaatcaggccaactcacaacctttatagtctattgcaacgcatcaccggagttgattcaaagagcaaaagaggaaacaggagatgaacaactgggagattatctcatggtgttggatgcaaatgataatatcgtggctaagatcaagatcaacactgacctatcatcaataccaactggaggattaaagttatctcaattgaacatacttaacagggcgaaattttcggacttgctacacatctcggtggttgtggccattctactcttcatcctattcgtacacaacaccatcaagaacagtcagttccgtgaaccaatggtacccatcaaactcgatcgcacattaccaaagtcgtttcaacatctttatcaaactaactacaattacagaagttatggatgatttaatcaatgaaaggagaaggctaaagttttcactcaccccttttttgtatcacattttaaatctctcaagttaccaagcattaactctcattaccaatctttaactcattaccaagctttaaatttcacatcgcaaagtttaaacacacagttgcaatttttcatcgcgaagctttaactcacattatcaagctttaaacttagtcaccaagatttaaacacacagttacaaaattttcatctcaaagctttaagctctcatcactattttagttccaaattgtctaattttaagtgtatcatattttaatttgtaccatatttcaaatgtagtgtcggttttaattttaatatatttcacaatcaacaaatacacgttatatattcaggaatgagttgggagttgctgggaagtagattacacattgatcaagtggatttatggaatcaagttggcaaattgttagaggaatcagcactgcaaacaggacaaaaagattgtgaagtaacaagtgagtattatgtatggttaatatcaaggattttggaagaagttaagaagaaaccttcaagagattccaaggctgtgcaaaccgaggaggattccagtgatccagaaattgaatgtctgatgaaagagctggaaatggagaacaaaatattagaagagtgttacgaacaaattccaggaccgggaaactactataaagaggaggatttaatcattaaagtgtgctgtgaaggagatagtattatctgggaaaatacagaaaatttaattaaattgatgaaatttagagaagataaatgtgtaaaaaagtgtttaagtctgttaaagaaaaggaatgatctttacagaaaaattatagcagctcagtacctgagtatagtctccttaaaacatatacattctaagaataagaataaagagtttgaaaggcctaaatttaaggccacagaagaaattgtgaagttagagaagagaatagaggatttgaagggacagaatcagaatcttagttcaagactagagttatacaagtcagaaattgagaaattctaccccaagaacaattcttcctctcagaatgaagaaaattttaatttgtaattttaaaagttaactttaaaattaaatgtgttgactttgaagttcatgtaataatcttaatgtgtaccagattgtcatccgtgtggatgttgacagatgttagtacaatttttattagatttataaaatgttagaatttgtagatattattaatttaaactatatttaatggctgtttcaatgattttaaaaaatgaaagtatgcaaacctccatgtcggaggtcgaacttgaaaaaatcacaaatttccttcaaatctgacccaaaccctagcaaatatggaaaaattgacgggtttgagatagatgaaccgttattttcacttttggacggattagtggaaaacaatgagaagacgaaggaggtcgtggtcaaaactctgatgaagtttgcactttatcagccagatttagtgttaaaatcggttttaaccttcttacaagtgcagaaaacaacagtaacgcatcaacattccctgctaagcttcctaaaaaagtgcataaatgagttgaaaaacgtgccaaacagtactgttaaggaagtacttttatttgttttaaaggagattaggttcctgaaggttactgaccaaaggcatcttgaaatgaaggaaattgttaacgcggcaactgttctctgcccatcgttctcagtggatattatattagcatccattaaagatataaatcaaagtattttttaacttatataattaaaatatctattgaaattatataaatttttatataaataatgtttttagtttaacaaatttgtaggagaaaattatttcgagattttgtgtatatatgtgaaggttttggctcatatttgtgtctcagttccaaacaattcatacgtgaagagtgttttgatttcaagtcacctaatgtcgttgtataataaggatgtttttaaggaggagaaccaggaaatttgcaaggaactttcatcactattgtatgcaatttctaacatgatactgacagttccttacacatcaaattcctattcaaggtttattggattaggtcgtttttcttccttgaataacaacacactttccaaagtctgtaatgaaataactagtgattcaactatgtatgaggctttgaacttggaaaataatatatataatcggttcttaaaacagtctaacatgccaaatcatactcatgatagtgtaaattccctaaatagtgtgaatcatgtggataataagatgattcgtaagatgagtagacctaatatagaaaatatcaagaatatactggaaccgttgtatgggttaatgttggattattacttgcaaaagatatacataaatccggcgtatgataatacatgtttggaactactgtattccttggtgatcatttcagagtacgtttcacctgaatgtttcaggaataattcactcaacctgttaacgtgtatcatagtcagattcttaaattatgtgccaaatctcaaagttaacgataatttgtggctcaaattacataaaatcagctcaaacaacctgaccaataaatttgtatcactgttttcaaatccaagtatgttctgtcctataccttagaatattttatacactgttatcatacttatttattattgtgattttagatgttctgtgtaatgttccgccgaagttttttgtttatggcctgagggtctttctgcaaatcttgtacaataataatcaattttacatttatactaattcccacaagtttgtttctagatatttacctagttgcatccttatctagatactactaataacgttgtagtctgtgtaatatactgttttcgatgctggtaatattgtataatagtaataataaatgtttgttgtcctacctaaaagacgcggtgtcttctaaggatacttctgttgtcaccagtcattcaagttcaactgactctgtcaatgagattgacaatgtgtacattgaccacataataaattcacttgggatactgtttagcataaattcaacgtgtttagttctttgcgaatttttgtataataaacttgtttcaaatgttttgtcgagtgtgattttgtcattttatatcttctcctgtacatttactgtggaaagggatagtcaaactaataatgagaatagttcgcttttaaaaagtaatggtttagttgatactggtgaatcttacaacctagtgaagaataatagtggatttggtgaaaagaagagtatactgatgtataaaataatagataatatacacaacatactgagcataacagtgacggacacatactccttttatataattgtacagttcataaacatcttgttttcttcaaagtacatttccttttactcaaactataatcaactggaacaaaatagtatgttaagtaagaagctgaagagtgtttattatataatcaattatatattcgagtataaaataaacatggttatcaagaaacggattgaaagtaatgtggagttattcaatgacaacaagtttgaccagacatttttccacctgatgtatcattatgacccaaatagcacagcccagcttctcacaacacatccatcagttcaaattgagtttatagaagactgtattgataacataataagaagttcaccggaacattttctttcatatttaatgaacaaattaacaagtaatgttaaaagaaatcttctaacgatatttatgtactttgataagttatttgaaaggtgtggagaggacttaataaggagagtgttaggagaagagaacttggtaattttgttgattctatcaatgatatatctacatgacccagtgtactactttggtgaagcatattactcctctaaacttctaataaaactctataaactgttgtttgtaccagttggttctacggatgttagtttatctaaactattgatcgatgaagctgttgtggttaatgatttaggtgattataacacactggattacttctgtttaactgatgaaggagtaaaaattattagcaagatagatgaaacctatgtgtatcccacagatatagtagtaaatatgatgaatgtatcaagaataattgagagacttaatggattatacaatgtggatggtggtaaaattattaaccaaatgagttcagtgatgaagaagcttaaaaataaacctgttttacacaggtcaacatccttcttatttaatccatcgtttttgagtacagggaacacgttttctagtaatatactattaaacagcgtaaatacacctgcatccagtttaaaggtgaatgggatagtgattgatacagatttgagtacttttcaaaatctgggaattttgaatataatatgccttttttccgctgattcaaccactaaacagtcgagttttttggataatagtgtaactgatattataaactctgtgattaataatgtgagcacaaatacaagtactttcacactaggtaaggaagagttggctctagcccagaaacaaaaactaacacacttccgatatgatacagttaacactggcgatgatagtgtgttttggtgtaataccatggaaatgaagtatatatatttagtattgaacagcatttgtataagtaatttggcaagtaaagataacactagggttctttgcacaaaactgtatcaaattatggttcaaaacattccaaaagactcatcattttcattattcgggaagacttcagcttatttacagtctgaaagagttagactaactttattatcagcactaacgcatgtttatgcaaagtttgggtctgttatgaataataaagtagttgatagtggtgagttggtaaatagtaaagaatctgttgaagaagtgttaagtgcgagatataataaaatgtcaagtttacttgtggctaaagagaaatctaatgaaccagatgataacaatatatcagaaagcatggttgagaagtatataatatcaccaatgatattgatgttcaacaacgaaactgaatcttcagtacaagaattcatacttaaccgtctgatactgttaacgcactctaacagttgtgttaacggagatatcgaaatgatttctgtattgtttaataaattaattggtgtaatattgaaattgtcagatagtaaccttaaactggatcccaacagtatggtggaaaggtatgaaaaaaatgaaatattgaacataaataatgtaaatagagaagtaactgaaaaggaacagcttttgtcattttactctttcatgttattgtcatcatttggaccacattacaagtcactaacaaggtcagagaagccctatatggtattatactacatactgtactggtgtgattattactttttcgttaatgtagccaagtttaatcttaattattccttctgctacaacttccacagctcagttaaccaggtaaaaatcgtacaattttaccttaaaagtgtttttgacgcacttattgactcggataatggtgtagactgggacatactttataaaataatcgccataatactgagtaataataaccagattgagcaattattgatcaaaaacaggttatacataatgattacatttttaaacgaggtttcacactacggttatactgatctgagtacagagggtagtgtagaaaactggcttaaaatattaatgatgatatggtgttatgtcctcaaatgccatgattacaatgtgaaagttaacttgattagtattttttaccggttatttcaacaacacaaggcagtagcaaatacggaaacagtagtaaagtcggacgtcataaataatttggacactataattagtgtgatgccggaagatttgagcataaagttggtgatgttggcggtaaattatttggaaagaccaacttgcgtatcaaattcactaattaaaatcatacataaaatattgaagcagaatatgagcttgatgtcaacacatcagattcagtcgattttgttagttgtatttaacaggtttaaacaacacttgcagagtaataatataccaattttcttgagattattcctaattgacatgttcaagagtaatattagcattctgtttaacatactgtttggttataatttggagttccagtcaaatgtgatactcatgataatcaaagatgaggaattgctggatttattactcgattaccttcaacaatttatcagtaaacagcttcaagagtgttttaaattggattcttgtagttctgggaatacagaggtcgttgaaaacgttgaaaattctactgtttctaacagggaacttagtaaagaacatagtattaagactctggagtgtataatagagtataatgtaagtatattcaagaataattttgagttgttaagtgagaatagtgaatatgtaaaccttcttattatatacgtgaatgccatgtcaagtagcgtttcaggcttaatcaaggaaaatctggataaaaaaatcattagacttttgaaatctattcttcaacaggatgtttcagccaataatacaatattatattacagtattgccatcataagcagcaattcaaagcttttaaactcacttcttgactatattctcaacttattccattgtaaaaacaaatgttcagaaaacggttcctataacagttctaagaatagtaatgatgcgggaaatatggaaaccagtagtatgaaagtgttgttgaagataataattgaactgatcaagtgcaaatcattaattgggtatgatttgaaggttataaagataataaaatcacttgattacaattataagctcatgtactattatctcaagaatatgtatacaaccaaaattaacccgtattataacttgtataacaatttgtattacaaggttgagaaagttagaaaacgattctttgaccaacttataagctcattaaccagtagtattgatgagaaaatagaaactaaatctttatattactatatgaaggtaatacatatggttattaggataataacaaataatcgtctggcaaactactatgataatgttgataaaatgatatgcactattgtcaggaataagacttttttcactagaaagaagctaaggcactcgtatttacaactttactgctcaatattacgatatataactgttaaaaatactatttcctcaagagttaaaattagcaaaaccctggctgtggataatttgaaaacttatttattatatccaacctgtgtagcaataatgtccaaagatagtaagggactgtcaaagatatgtaacaagtacatcaaattatttatttccttattctttggcaattgctatagtgtggattgttctaacttgtttgaggaggtaataagagccttaattgttatgggtaatagtaatactgcttgtatatgtaattctacaattccaagctatcaaactccggatacaacttgtaattttaaatattctaaagaaccaagtcagaaaaccctatgtgtttgtaacagtttctatttgctgtatattttatcatattttatacccaataatgaagatgaagggatcttagttccggcgaacattaacgaggagtttaaaaacatcaagaggttgcagctggataaaaagagctccgaggttcttttccaaagtaaacccacctttgaaaaccattctcaggaattcattgacgttaatgaattctataatcttaacctcaatttgggaaattccgctactcaacttgataacagtagcgatttgtccaatattagtgtttgtggagatttgttagtgctgttggatgttagtgactatgttatggttgacggcagagccaagagtaattttatgtacaattcagactctctggaagagtatttcaccaaagtttctggtaaaaacttaagtctcctcagacttaaaagtgtggatgttatcaagaattcatttctgttcctctcaaacaacgtttatcgttttatcactttccaaagatatttaaactcgaaacttatcaaggtcaacctgttccaatctgatactcacttttcctttaattccacttcaaacaaacctaatgatgccgtaaacaacaaattaaatgataaagtaaaggaaagtcctgctggagaacctgttcaggacgatgttctgtacaattgtatcaaattttgtgtgtttataatgtcaaaatcatcactgtacatttctgaaaactcagaattccttcagctcgatcaccagtctaaccaaattgatgaacatgagctggagtcgaatttgaagttaatcaggagaaattgtttaattcactatgaaagtctttgcaatgtagttttaagtaagttgtgcaagttaatcaacaacaccaaattcaagctgtacatttacaaacaattgcaacacttatcaaatgttgtgtctcactaatatattaccaaatttaagggtatattttatatatctctatcatactcatgttttatacatggacgtattataaatcactagtgtagtcttatttatctgtacactatatatatgtattctactgtcacgagtatacatagtgtataatagcgccattataaattttgtatatacaatatatactattagcactacacacttgtgtatgttgtatggagtataaatttggtaaatattaaaatcagttgttagaggagttttctaacagttttaaggttaacttcacaatcaaattaatcaatttgtagtttatgtcctataatactaattaactatggtgtaactaacgtgttggttccactggattgtcagattatcatgtttatataccaactcgagtgatgagtacttaaagtttaactctaaaaatctttaaaaggcttaaaagtaccttcagaactagtcttggttgtgtaatctttgtcctccactttcgagttttgtataattttagctataaattcagtcaatttgtaaaactggtctggtgtaacagtcagttttaccctgtttattatcttcggcattgtagatttaacaattttctcaacatctccaaccctggaatcttcattgcttagggttttcaacaaagtttccttattatacaagtaaatattattattcaaattaaatccgtagaccacctaaaattatattcataactaagatattagcggatatgctattaatgggtatattacatgactaaatagactcgttataactataatattggtaactatagtgtgcattactgtttcattgtgaattaatatgtttgggtgtacgtaaacctctcttatatcatttttagaagtatctttagtaaattttattgtttgcccattacatggataatatacctacaacatttaatttttaaataaagttaccggtatcttaagggtattatttatatgttttgaaaatcttttcattgactctaattctccatgtacaaaaacaatgtttttgggccttatctaaaaatataattaagcattatatatttatataaaaatacatgtttgatcagttgtaggattcctggtgagtcggcatgggctgaaaaggacaaatatctaactttacattttatattcatcactccaatgttggttttaatagttttttctcctaaactccacattaattttgaataaatattttacataggatatattgatgttacagttagttacctgctattaacttatttcctacggttccttgtacacaatatcctaatcaaagatttaattatcttgaattatagttaataatcagtgagaatgaataataaatttatagaaataatgaattatactaaaaaaacctggtatgagaataaggttgtttggattttgagaccagagtttgcatgctttgagtgacaaccctgtgtgtaccattcctggtgttgcgaagagaaccattggtctattgtcgtttaaaaatgactgatcaaattggagcaaatttctcagtgagaaagggttttctctaaggttagttatgctattattattggtccagcttgagtggagtttatagtaatttgttgccttttctgacaatcctccgccaaagtatatggggaatgaaatcgataggttattccagtaattgttcaagatgattgcaagttcttgcgcccttccaactgcaaacactggtattaataccttcccctaaacatatttttattgagttcacatagtttatagggtaaacttagtattaattagatattgtgtagttgtagttactccatttattagtgtgtcatgtactgttgtgcatagttccatttcagttgctctttttgattgtcgaacaaatgttgcatatgtcgactcacaaattaaaacgtctggttccaaagttggtactttggcaggtcccaaatgtttgtctggtattgtattaaaatctcctaataaaatatattatactgttttacaaatagtaatagtattgtataaaatgaaatgaactaatttatacaattagaaatactgtagtatagagaattacctgtatatagtactttaaatccatcacattctgataagaacattgaggcccctagtacatgtccagcgtaatatggtaccaggtttaagttaccaacggtttcagttgctctaagctgtaatggaattgatcttttcatgcattctgctactgaatttaaagagtacccccaaggatccgttctttcttctatctttcttctcttatcagtgttgtatgtcgtgtttgtatgacagttaagaagtgacttaaccgaggcgttaattgaagaaattgtgtttgggtcatcaggaactgttctagtagatgtaacttggacactatctctaagtaacaggggacaaagtgctcttgttggatatgtcaaatatattggtccggagtatctaaatcataatttaatcacaagaattatatatctaaatggtgtaaaaaatggtatatagttgagataaactaatagtatggtataaattacccaatgtgttcagttaagaatggaagtgctcctacatgatcaaggtggaaatgtgatattacagagcagtctacactattagtaacattctttaatgccttttttaatgcatttttcatataagtatccttatcaaattctacaatttgttataattttgtaaaaattaccctgttttatgacacctttatctgaatattcatgtgaaaatgggtcatccggagcactttttacgggaaattcctcttttttaactgactctatcagttgtaactgataattatactcattaacatcacccagaagctgtaagtcaggatatcttctttgatctatgaagccacaatgggctccacagtcaaatataactcttttggatggaaatgtcactactatgcatgatcttcctacatcttgcccagctccaagcactgttatatcaacagagctcattggttttatagaggcttgttattctagtttaaaagttaaaatacataattatatgcgattattataatttaaatcaaataaaataagttaataaatcgtgaaaaaataggggaaaaagtgaaaatggttttaaagttgaattttaaaatggaaattatgaagaagatatggaaatttttttattaaatgaagaaaatcatgaaatcgaatgaatttcagatatgatagacaatagttggaaattaaaatttaataaaacttgaaataattttaaaaccaataaaaggttgatttgtctaaaattaagctaattaaaagtgaattaagtctaggaatcactcaatgtagttgcacattccccatctcataaaaatcagttattttaagataacagatacattatattaattatgtcatcacagtcaggatcaaatcagactctacacaataataagagattcgtattcagaagtaatttgaataggttattttctgataccaaaatatttcctcccagctcaaatccttgttccaaatgtattcttaagaaaaaaccctgtatttgtaatattatcaattcttctgtcggaaggtatttattctagacctattcctactacttaagataattatgtaattgaggaaatagattctcaaatttgtgtagaaccaagagatatgaaattgatgagttaaacgagactaaatgtatgctaaatgacttgagaaatgtgttaaatgacgttgatttggaaaaatggtcgacacatacaaaactacttgacaatacgtccctagtcattaaacatttagccgacgtactctttctacatacttttatatactttttatcctaaattctagtataaaactagtataatcattttaatagctgaaactgaatgttaacggaagaaatgagtccggagttgagctagttacaaacgcttggcttaaattttacgagattttggaagtctataaattagttgagtatctaaaaccgaattttaaaactgaaggcggtactttaacttcagtccatatctccgaatgtcctggtgccttcattgcctccctcaatcacaatttgaaatccaaaaattgtacttttatacctaacttttacacatttttataactttaagctatgtattcatacatacttatactcctaagtcatgtaatataatatccagataacggagaattgaaatggtttgcaacttctctgaacccctattacgagggtaataaccacaatgttgttctggcagaagatattctcctgaaagaaacttaccagaactggctcctaggctatgataattcaggaaacataacaaaatcatgtaaataattaaactaacatcttgaattcaggtaatattgagtacatttgggaccacataagtagacctggaagatacaataagtcaaaacaacccttattggtattttaaaaactagttcattaaatttctcaggctgatttagccacagctgatggctcatttaactgtcaatttgatccaaataatcaggaattactaacttcacctttaaaattcgctgagtactatctaagccctatataattagataatttattatactactatatatcgtcttataatattataatagcgtaataatgtgatagagttgtttgtgcacttggactgttgagagttggtggctgttttattattaagatgtttaacttgtttgaggagccttctttgtcgattatcgcgcttttaagtctgtgttttaaaaggctggaagtgtataaaccgttcttgtcaagggaagccaactcggaagtttatgtaatttgtctcgactttaacggaatcacgtcgattttgttatcctcactatgtaaattcgttgatcaatattcgaccaatcaaagtaattttatttttagaaaaatcttattcataggtaacatgagtataatacccaaagaatggataccatctgcatttagagctgaatttgctgactgcgccaggatgtttgctgagatccagttcaggagcttgagaaacgcattatctttgtataaaactgttttaaacgaaaatccctactataaggagaagagggaattcgcaaactcatttattaagcattttaacattgtgccaattagccctgagttcagactagtgaaaagagcgcattttggagagtatttgatttcaggcaaagacacctgttcattggggcacttggagaagaactatttttcgaagtttgaggaccggcaggagtactacaacttgtacaattctctccaaagaaagagagttgaaaataaaactgccaaagatgtatatttgaacacaaatgacggagataacgtggaggagtatgtcaggtctatcaaggccgttgttgactttgtaaataaatctaaagttaaattgttggagaatagagtcgattctggcgatagagtggaattgttgtttaaactggatgaagaagtttatgagagtttattggatgatttaaagaaccagagatatcttaaggagaattggttcggtattgggaacatgaattgtgaggattttaagttcagtttcttttgcaacaacgatcttttattttacttaatatatctaaaatcctgctgttgcagtaatatacctctgacgactcttcaggagtgtttagaaaaatcctcatcctacggtgaggccttgaccgacttaaactcatttcccaactcgtgcactgttcatttggcctttgtatttaagaattttctaaacattaaccggtacaaatattatttggagattacttctaatgatttccagcagtttccatccgtttcattactgaaacgatataatgttactggctcagttatatataaccagacgactaatattcatgataaagttaactccacctctgacagccccaatagtactaataacatgaacaacagtgtcaatgggtcaaatttgtttatttttgagaacatatttgagcttcaaactatattgaataattttcccggtgatggcaatatcgagttgtgctttgaatttaactactacaacctatttaattccaaccaatcatataaatcactcgtaagttctatacatcatcttgttagtatttggtaacttatgttatttatattttacaaattatgttattaaagtatgtgattcattgttactattagatcggtgaaattttggagtctaatttgaagaggaactgcgacttcatcttctgtgacccctacaacaatgtcaattacagggaactgttatataaggaattaaatactaaatacatcctagtggctcaattaattcaggttcacttccataaattatatctttaaataccaaccaactcatccacttttcactttttattttaggcattgaattgtttaaatgataatggtgatttggtattgaggatttttagcttgtttaccagattcacaactgggattttatgttgtctgtcaactgtgtttgacgaagttatcctctatagacctgaatcagttgttaactggtctcaggaggttttcgtcatttgtaaaaactacaaggataaagataactccatttgcagacattttttccaatgcctctgggacgctttagctctgcaccataaaactcaccaaactctacttcaaattattaaaccatttcattttacaacaatcgcaaagtaatgaaatactactttaaataattatatatattatataatatttatatacttaaacatttataaattatgaattattatatacttaaacatttataaattatgaattattatatacttaaacattcataaattatgaattaggaaactgtatgattttaataatttattgttgaataaggaactgagtgagttgttaaataaggaaaacgtaattaaagagcatttgaacgggtctaaggaatttttaaacaaatttaaattattggacattttatatccaaacaaactgccagatcaaagtgaagtacatctactcaaactacaatataaggtattttctactcatttattatcactagttgactattatttgataattattatattcattttgtgttaatgaaaattggtgtagaatgagacaagttgtaccgtgaataattttaaaaggaaaatgactgattcgcctcaaattactgaaagtgaatctgaatccaactcgccaatctggtctgacgataatcttgatgatgattttaattaaaataatatttatacttgtttttaaagtatataacagataaaacattttaaattagtagattaaatgataactttatcagttgggtcaatccagttgataactttaacgtgtttttcgttttttacagttaagtcaacttcgactcttttgggaaatggttttctgagttaatttatattaggattggggttaattacctggttgatggatatggaaatgaagacatagattctgctattactgactgcctatataaccaatcaactgtatccttatcccctaaacaatgaatgaatttatggtattatacattttaatggtaatttttatagtgtatatttgtatagtataattttatacctttgtattctagttcatggtcttcttgttcattggatgtgtgtatgtatccaacattatctctatatgaagcttctttaatttgtagtctttgttctgccagatcaatcctcttatcttcaatattacaaagtctagtatggaattattaatataaaaaggtacttatttctcttaatatagtaaagcaaactgaattcctttattatcttagatacagtaacacctctgaaactaaaaatttttcagatttttacacacatatatagtacccgtaacgctctgcgattctctcaattctaaatctaccagggtcaagtgtgtgcaggaaatatatatattctctcatcaacgggtctactttcctaaaactagattattttataagcatgaaacctatgagtaggaagttttattgggaatactcgtggaattagtctgtttaaaccagaatcctatgcactgttttaagttttacacataccttccagtagtttctatttctggaagtgtccagagttggatatcttaagccactgaagtctgaataagtatagttccaatcagtatctctactatacttaatattcctacaacaatatgtataacagtatatatatatatatatattgtttaggagacgagttatagtattatttttgatgttataacaaaataaattaacaaattttaataaaattaagtaaaattaagttaaaaatacatatcatgttgagaaatcttttggttgaggccaattctaaatctggtaggaactacaaaaccaggtttaggttcatatttcgatggtttcgagtcagatgaaccagaatcgctactaacaattctaaaccaattattaatattacttttataaattgatttataatgaaaatgagtatatgtgcaagaattaacgttgatgtaagtggagtatcatattgttgtagttgttcgaggattttcacattggaatctggttttttagacttggaggattttttagtaaaaacggcaaaagctctacatggcctcaaaaggtaatttttattatacattaacatgaatttatcaattccatgaatttataaaggaaaataatacaaagtttgagggaaaataataaaatatatttaaaaaatattaaaaaattaaaatattgtacatatagaatattataaccatataattatacaaatgggtacgtagaagtgggaattataaactatcaaagaaatcatagtacaatttattatgaacaggtgtaatttaaaatagttggaaaattaaaaaatacttctaattaataataaaaatccagtttaaaatctttttaatgtatttttagacaaaattcctgatttcaagagaaagtcgtaatttgatgttaattattttacacattttaattttatttgattttttaaattatattttatttttcgatctggattctacccctagttaagatgccaaacagttgtaattccataatatgatgtgcacctccataccctagacattcgtggtgttcgaagtaggccaaaatcgcttgtttcatacattttatcacttatttattccattttacacttaattattctgaataattaagtaaattttattttatgttaattaaatattccataatacataataattgataaaatagaaagaatagaatgagagttggaataattaaccttttagctttgcttggatttttattaaattcaacaaagtttgctggagctctttacgggcgtttaaacgacggaatgaactccttgaactatgatcctaacctgctctcgttactacagatggagcagagcatggatctagatgacgatgacgatttagactattttaagtccagtttccttgagcactcgtctgataaaagttccgtacttcagagtgactgggatgaaggatcattccttgaagaggatgacttggactctgatgcttggggtaatgatcaggatgagtctttccttcaggatgatgattctgatgattctgaaaactttgatgactcattcctcgaagacgaatctacggaacaatctgccgatgaatttgtaaatgaaatggatctcgacgatgcctggcaagaacaaggagagtcactgttacaaactggagcgtattatggtaaatccatagcatcccctaccacatttggaagtctgatacagttgcacaattatgaacctgatcccatgaatttcctacaagatgaaactctattagtaatgaatgacgacgatcagacagatttggaccttgtggatgagggtaaaaagccaagtgtcaaggctttcgtactcaaaagcgataatgacgaaggtgacaccgaagttacagaacttctggaagagtcacgatgtactttttactaactttatatagttattttgtccttaattagccctaaataccaatagttatcccttgattatccctaaaaatatgttgtagttgaaaagctgatgtcaactctttgggcttataaagtttggcttgtagttgtggttgtattattagttatcgctttggtcgtcaagttcttcttctacgaccgcttccttaagttcaagacggaagtctccaacaagttcgacaatatgaacaaggtctttgttgacaagttcaacggcgtcttcagaaaaagccaaaatcaaacacaaaatgaagaaactccacttctgagcgcataaacacactctctctacactatcaggagattattacactattttaactagacttttctgtgtaaaatattgagaaaattattacgttatcagtagtctttcgtttttaaattttattagtaatggatttaagctttttaggtcaaaaatggcctaaacttctctgtaatatagttctttattgctaaacatatatttatatattttacttcacttactagttttgcgatgaatgggtcttgtgggaatttactcataaaattttcattaccttgttaatttatgtataaattaagttaaatttttatttttcataaaatttatattttggttgtttaaatctatcattttatactctgattcaggttatatatcatggctcctagtaagtttttagattcaaatctactttcaattattggtttccttatttttattttaaaaattgtaaaattatgttaaatttatttttttcttttttcacattttctctcttaaatgtgtacagttttacacattactacatacattattagaaattctatcatacatactatcacgtacattttgataattgtttataggaacgtttgaggtgaaaggtgaggtctggaatgtgtgtggatacaatgatgaagaggttgatttgtcaaacgtttcgaagaatcagagctgtactatatgtgagagtaacaatgtgaaggttaagatgcctgaaaagatggtctctttatccctaattgcttgtaagaatgttgaggtttttgtgaattctttaatttctggaatggaactcacaaactgtcaaaatgttagggttagggttaagactaatttgccaagctgttccattgacaagtgccaacaagttggtttctggatcactaaagagaacgcctctactataatgttcagttcctgcaagtctggggatatgaatgtaaacgttaacaggaacacttctggcaaccctgatgaggatgactgggttgaacagcctctccatgaacagtttgagcatacccttaatgataaacttaaagttgttactaagccgtcttctctctacgcttaatattgtatgaatagtaaaatgtatattatatattgtataatatttaacaattggctcagacagtacaaatggcatcatgtaataagtcaagagaatgaatgtcatcattgccatagtaatttaagaggagaatctctctaatcttttctttcttctagctaactcttcttcatcaaccacaaaattagtctaaatccattatacaggattattgctactatgtatatattatttattagtattatacttaaattatataagattacattaatctgtatttaatagtttaccttagtgttagtgttcttggtgactaagggaattccaaacctagaaatttgaaacaattaaaataaaaacaaacctttcacttctttttttgaggacttctggatcctcttttactaccagtttcactgcctttataccggaggtagctttaggctccaagttaaatctctttgcccttagcaaaagccgttcctccattgtcatctttgttacttcttttcctgtgcaagttaatgctaattttctataaatttactaaccttctgttaagcttgaggatttagatactgattttgcttctttattatcagtttttgtagaggattccactgtggttgcagctttaacaccattgacagaacttgtagaggaatttgaagagttgttggaggaagatttagttccggcctttgattttaaatttttaggggctccgtttgaattttcttggggatttttcttaaaataatttgaaagtcttgatactagatccgcctacaccagtatgtatatttgtggtatttatttaattatgcttatttaacgtattatactcttttcccggtggtttctaggttatttttagccagtgcggcttttaattcaggaattgtcatattttcaaactccatggtcattctttctgatacatacaagatatccatacaacagtgttataaaattaaaatgtcaacaaaacatgagtgaattagaaccaaaaaattaaaacaagcgagattacagaaaattggagaatttacttgacggaaggttaaatttatacaatggtttacacaacaaaatattccaatatacacatagaccaatcgtacaaattcacatgaaattacactaataatacaaaattttaataattatacgaaattttgataattatacaaaatttcggtgttatacaaaacaattaagtgcgattatttgcttttaacttttttgaatcggagcaacattctgaacaggaaatagaaaggtaacagtggtgtgacgaataatggtgagtacaacaaaattctaacaaaaagttccgctttggttaaacactttatgagttgatggtttacgaacacggaatctggttctttgacataatcgtacaggttctcatttctactgcgataagtaaggcatttttcaccctctacattatatatatatccatcccattccattatatctaaaccgttattactatactattggtatgctattattattatactattgatatgttactacacaacaacatagttccacacaaataaatgtgtaatttgacttaccatcttcgtgattataattgaagtcgatggctccgaagttgttatatctgtaagtgtagtttttaaccctgagataaaaggggtacactagaatattggcataaatgttgtatggtaaaacactgtgtgttaaactactggatgtgaactcaacaagtccctaaaaaattttttaactattgactaccatactgcttgctatattattctttactacactatttatagatgaagatatataactataacaatattgtaatacatgtttttcgaagagttcagcaaaatgaacgtctccggataagaaaatcggtttttttggctttgttgcttcaagtaaatctagtaatctctttttagagtttgggaaatgcccccagctttcacccattgggcggtatgtaaatacttgaaatgacgatactattatatgggacgtagcctcagagtcaactagttgcgattcaagccatttccattgctcttcgcccagcgcatcagcgtcatgtttacaaccaattctaacatgaataaattaacttagaattacacaattatgcagttttatagactgttatagttttataaaatgatgtagataaatagcaaaataacttaaagcatttcgcctacccgaacatataattaaacagtctacgtatcataattaatctcgattgtacgtaggttaatccacagagttcacagatacaattatacatacagcctctgtggtatctaagatctaggccaataattttaacatgattttttggattttccgggtcaatatacgacatactgaagtacactcctttcctcttccttctataatgatcctcaggcttttcgaagaagtctaatattatcttctgagaaaaatctttaaacttaaatgttgcgtctccatcatttattcctatttcaatcattaataacacttatgaaaagattacacattgttaataggtacacataacatatagttagttaatcgatgtgcagagtaaataataccataatcgtgatcatcgtacacgccatcgaatttcctgattttcttcttaaattcttgaaaaggtgggaagtttgccatcttcaagtaccctctttctatacacgtctcatcgcaacaactcatttctactcaaaaatacactcttacataacgatatataaaatatttgtattatatgaaggtgtataaaaaagcgtaataaaatatagaatgtgtagccatttttaagtttacctgtgtaaaaattatctccagtgaagaagaaaatgtcaggatcgtatttgagtatggtattgtatatatccctgagttgtggatatgttctttggcagcttccgtaagcgaattttttcagaggctcatgaagtacttcgtctgcgtttaatttttccagcttagtgttatatttttgctcatagtctgattttgtgaatgtttctgccgtcgtaatgaacagcgttgtgtagatatgtattaaaactagagtacaaatagccatctcggttctaatcatttatttatggctttttatgtataaataatataactagaatatgtaattgtaactttatggaaaaaagatctctccgtgtggtgcttcagatactcacaaaccaaagatctatactatatcagcatgttatataattttaaaacataaaataaaaatcatcagattatatcttgttaaatgtatgataattttcaaaatgtgtaactattcagtcacaattttttatccttgttcttgactctgttactggctttgttattgccagctctgttattatttactctgttgaaagtattgttgttattaaccttgtttagagtattgttcatattagcattcttgcccttgtaatttttactattcgcattcacattgttgatgtgattaacagattttagtcgttctttttcagctgctctgatatagtcataatcttccttagtaatatagttattcaggtgcatctgcttcaatagtgtgaagaaaactcctcctggtgttttgggtcttttcccatctgatgtcgttactcctccgctcttctcaacctttagcgtcaattcaaatagagttttaaccacatctggccctaaacgcagtaggcatcgataaatctggtcagagtttggttcgttgagagcacttgcaattgttgatgagaggagttggtacattgaatcttcagagtcgtctggatccgagtttgcagtttgtggtaggcccagaaatctcgcggtttcattcccagccttctttaaaaactccgacaaagtcgtaaatcctcttatttctgctaactttgaaggcgttaaagaccatctatcttgtgtatcatgtattccaaacttctgatgcattagcttagctaactcaagacttcctcctagcgctattgaatgaaaacttgtcctgccattaacatcctgaattgttggatttgcgtctcgttccagcaaaaatgctacgtactcctgatttgctctgtaacatgcataactcaagggtgttatgccttgagagtccttctgattaatatcaactcccttcttcagtaatgactgggtgatctcaaggttactctttattgctgcaaagtgaattgcatggctgtgggcatctgttagccttgtcggtgcgcatcggtgcctcaaagttaaggataaatccgctccgtagcttagtaataaatctacaatttccacgtgattcttgaccacagctataaataaaggagtccacccctttacgtccttcttgtcgatgtaaactccgtttgacaccaaatactttacaaggtcaaggtttccactgctggctgcgtagtgtattgcactccggcccacttggtccacgaactccaaatcgcagtccttcagcttcatcacactgtccaaatcacctccaaaacaacgcatcaacaacacgtcttcggtcgccgtgttattcaacatatccacatcactacttgacgagtagtttgtggtatcatttgtttcagagtttaatgtcggtatattatatatattatcctctactgcagcgtttggtaatacagtatcagtggttgagaatctattcactgaaacacaattatttataaaccgataaatgttcaagtttagtttttgtttttcttcatcttcattgctaggcgttgggtcctggaaatctgacaaatttacttctgtctggtcacgttgtgttgatattgtgtaatcaccttctttcatgtcatcttcatcaactttatttacatcaccttccctcaatttgtttatttcatggttctgtttaggtttatttatctcattttgtttcagtttatacttggaagtgttaactgatgcactcccctttcctctatttatacacttttgagtaagttgcgggtagataccctcacttttaaccttggaactatcggctgtattatctctattaactgtatcttgggaaactgaactaatgtttcctgaagctgatgttccttgttgcttcactttactctttttattcttagctttgcgatattgaccagttaaaccaacatccctatccactgtatcgccagtgttgtgatttacgctaccagaaccgttaagatctgcattaatattttggcctactactttgcctttattttttaggttattatctgcaatatttttgttggatgaactccttgagttcattatactactgaactgcatcatgctggtgaagaatattttcccaatttcagacattagcttctgatcttcgaaaacttgagcgtttttaacgtcttgcgacgcttggagtgacttaaacatatctgtgaagttaaaggaatcgctgggttgggaagatacgcctgtgggcttgctgggttgatgcgatgtccattcggcgccctttttgcgagattgccggtgacttttttcagtcatttttatttctaaccaaaatgaagaaaaatctgtgaaaatggcgcataccccaaactacgcacattcgcacttatgtgatgtactatgttccgaaatgaactcagcggttttgtaaccataaatctagccggtaaaatccgccaataaaataatagatttgagggtgaataacattaaaagtgtgaaagaagtaagcgtaaagtaccgaattcacaaatcggggtgaaaaattagagctagatatattggggtgtaaaagctataatataggaaaaacaggaagaattaatagaataataatttttaacacataaacagaaattattaaaaaattacgtatattccccaacatgcccattcattgtgggtattcttactttcgtagctcagccaacattaacacattttactcagtatttttatttattacgtatttttacatcttccaatagattttttggtcaattattagtttaataaattctttaatgaattatctaattaaatcaccctatacagggatcaacgttttaaaataatgaataaatttgttttaatacattttaaaatttttatattagattatatttacagttttttcaaaatgtgtccggaatatctctatactttcattccaccctcttttttacaacgttgttaaataatcgacaacacatataaattcaattagattccaccttttaaatacttacatttgggacctttgttatttctattatatcaattacattggagctatttttaggttccactgatttaatgatttttccacacagtttgtagttgttacagaagtttgattcttttacgtattgtaagaattggaacgttcctcccgttaagccaaaatagaacctctttgttgctacatatgctctgccactttccttcataaagctcaacaccattttaactatagactcataattttcagttctataaatgcactctgatgtgattattaaatcaaatttatttttaaaatttcctaaaattgttttatcatccaccaaattgttccaatctcctgccacaatttcataactattacttgatttctcgttatgaaaaccagcagaaatgtgtaccagattcttatcattatcttcatataatacctttaaattaattctaactatggcatttttatccatattatacgctgtggattcattcattgctatgttaggaattaatcccttctcaataacgtttaaatttaaatcttgaaatgttacattatgtcctttcagccctaaaaatgctccacaaactccaattccggatcctaattcctcagtgactagttatttatatattatttaataaacacaaaagtttatataccggtaagtagaatacaaggttacccaattctaacactgataacgaatttaattccttaatattatctaggaataccaagagaatccaagtactttcccagattgtatacccaccttcataggagccgggagatacctatataaacataaattaacaatattcatatagaaataaaatttagaataagtgtgtgtgtttaacatttttttgttggtgtttgaactcaggaaatgtgactttggtaatgagttcattggattcctttgaaagtttgtgaaattttgaaaagggtaatttatctacagtataatcgtattttttaactgaatatatttcagttctctgtagaagatcctctactctaaactccaagctagattccatgactcagcccaccagatgtgtaaccaccatacaaaattgtagtgtcaactacttcaacacttataatttatatacatagtaccagccactaaataagttaaattttattgcgtacgtaaaatttttaaaagattacatttaaatgaaaataaacaagtgtttatgttacagagttgagaaatttttaaaaatgggtcgatgaaactacaaatgagtagtttttgtgttgatgaaattaacaaaagaagagaataaacaagagtgacgaaacagatacaaatacaaagatggttccgagaacaactgggaacattggagagacgtgcaaaactgacttaacagccttaggagtttcctcagtaatgagtttatcctcttcattataatcttttttacctttgatttcgtatggagtctttatcttatattcgtaaatatcaacctcataccaacggtcgtcctccttaacgtagtatctttgcctaaatgtaggcctgtcaatgatgaaaagagccaatgcaactggcttattatcgtacaagtaaagggtggcataacgtaacaattgtttgttgttttcagcctcccagattacatctggcccgtcactgactgccctaattggtctgtcttcataggccaacaggaatatgaagggaacatactttgttccatctataatgtacattttttccattgactttcttgatgatatgtcaacctgatcgtgagcactgtcatctttgggaattataggttcctcgtcaatgtaggggaactcgtcaggatggatgtggtgtgagatggaatctgagtcatgaaggccagaaactaagtactctccttcaaattcttcatcatcgaacatgtcatccaaataatcatccaaataatcatcgtagtaatcatcgaagtaatcgtcagtgatgggtttgtcattactgtcaagaacatagagacgactatcgtcatcttcaactttgtttatgtgaggtacttgatcgtcagaggtaaggctgttggatgggctcctggtaggacttggtggtggagttctagctggactatttggtggtgttccgacgtcctcttcagtgtttctagctgggctgtttggaggtgttcccaggtcctctctggagcatgttggtgtatttggaggagttctttcctcttctggcttattttcaacttccttgacctgaatatcgggtagactccttgacctgcgaagtttcttaggcactggagttttcataaccggaggtttaaactccagaggtccatcagtggccaaacttgtgtcatccataagtattgacttgtaaggaataattctggtatctattgcatctgtggatagaagaatcttaagctcaacactgtgttgaagtttattcgaataatggatcatgacctctttgcaggaaagttcacggctgtttgaatgccagatgggcttagtgttgtaaacaacagacttaatcaagccttttatgggagtatacttaaaagtttccaagttgagaacactgaccttttgaaccttgaaaaggtcattgttgatgttatgaatatcaaaagtcagtcttgacaaatgactatcctcaatatcgataccagatccacgttcttttaatgggtcgaaagaaacacggtggttaatgaagtcctcaacgtggaaagtgaaaacttggtgaatgaatttaacgtctgattttgtgatgaatttgatttggttatctgaaacattgtactggtaaatgtaaccaaagttattggttccatctacggcaatgaaattcaagtatgaattccttttatgctcgtagcccatggcaattgggacgtgcaaatttgagtctttagcgtcaaatacagtttggcctccaaggatgattttggtggctttgtatcccctgtgagggataaaaacggctgcaagaatagagcctagtctcactgtgtggtccacaacctcaggaatgtggctagaatcaaggtcaagaacgaagtttttaggttcagcccttattctcaactctgcaaggtaatccatgaattggaaagtaggaatttgctcataaattccgttcttacccaaaatcatcacattgctgagttgtctagtcccattcacagttatattaatgagtaagaacttggagttgggattagatgagagtgttgcgaacagtaaatgctggccagttttgccaacccagataacctcattagaaatcaataatttaccaattttataacccttcttagggaataacagaatagtatcaacatcgtttatctcagatttaactaggttaattgcttcaagtgaatctttcacagaaagatccaatgatttgtagtagtttgatttagtggtggaatccaggggattcctggggaattcccccttaatattcaagcatcccttaattaggatgactgaaattatatttaagatgaaaaccctggaaatctccattttatccttgatataatctctgttttattattgtctttacatgtggggggtcgtttcgtcaaaattagaataaaattttattttccctttcgattttgaaaattttaccagaattcactagattttaaaaaactctatttacatacccaatttttatatttacttccatttcttcgaccattttctggtcgctcgtatcttgatacatcgtcaaatttttatttagtaaatttttttatttttcacgttttattttagatgagattattttatttatgaattttatccttttgtattttcagtctagcctattgaggcttaatgcacatttattttacccgttcatgtgtttttcaaacttaagtttcaagcacattatagatgcgaatattatgtataattactagaattaaaaattagagagctcctgagtcacatgagaggtcactttgtagttcccagggcgattttgaactctgtgtattatgaagagatgtcgctaaattgaactggttccccctgttatcttctgaattagttatattagttattagtaaactcactatgctgattttcgtctcctagaattttgagcgatttcttgaatttttccagaaaattcgggtggtccttgttgaagagaactgagaagcagtaggaaaagaagaagattcctagaatatcgcaagcccagatttgttttttggacatttccaggtaatctatgactctttgcctgaagcagaggtgtgttagatgtgctgaaaaggacgggatgctcagggttgtggcttcatagccagggtgagtgatgaagagtgagattacaagtccgtatgtcatgagaatctgctgtataaaggacaaaaacgaccctaagagtagaatcctaagtgtgcctagtcttactacgttgtcgaaaaatctgagtgtataggactttagagggtatagaagtagtaagcaggtcccgaaaattcccattgaaaggtttagcaaagtccttgtactcataaaataaaaagtaaacagcgatgtgattagcttaaataacctgcaatcattattatttccgtaaatattaagtaattatggtgtagaacagtgtataaaacgtactgcgtgaagagtagataaacgtattgatcgacgtctgaaaacttatatctattgtagaaatcattttttagcctaaatgacaccactaatagaaaaaatagtgatagtagaacttgaattgagaagttctctgaatcggcctttgaaatatcaacctgagaagctgttggtgatagagcgttactatttggaacgtgtgatgacacaactggtctgctaatgagccatgatacaaaaactgcgttaaatactaaaaataaggggaacagtgagtttaactgtagcaattccccgaacttgttatcgggaaacatgactgggaacattaggaaaaggaaggttgtgtatccgtagaaagaggacagagaaagtctttcagccactgatttaagatatgtattttctcctttccctcttatgtatcttgagaataacccttcaccgtacgcacttgcacatacaaggcttagtgtgagagtataagccaagatattagtacaataggtgtttaaacagttgattttgtagagtatatacaagagtactgaacacagtgccattgtatactctgacagtattagaatcacaactctgtagtttgaaattctgaagaatagaaagttaggccgccttctattttgtaccttcgaagcctttccgctaaaatccatcccatcattagtctgcgatattgaaacatttgataaatctataattaaacagaaaatgggctttagaagccagaggtgggacagtgtgttgtgggttggaatcttaatggttcctgtggttaaggcaaggcctcttaaccagcacacgaaaaatgtgaaaatagcctcagatttaaagaggacgcataaaatcgagaagaacacaaagcgttgcgatgaaaagtcgaaaaatgaccgtcttcggtcttcctcgtagggatgggtagattccaaaaaatcactggattccatctgaaagtggcattgattggatgaattattgtgtttttgactataattgtgtagtatgattgactatttaagatggaatcttttttactgatggggtgtgtgattttgttataccattcagtatcttaaaattattacagtttattattaaaaaatagagttctataaaaacgtatagtatataatagtgtatgtagagaataatattaaaattaaagatttcaatcatcttcgcccatgggttgcttttctggttcgagagtgattaagtcgtcaattctgagaattgttatggccgcctcagttgcaaatttgattgatttgatcttgctcatggtggcctctaatactcccatctcaaggttattgccgactttgccgttattcaaggataaaccgtaccatttatactccttatacttttcctacagcatttataagaggtgaaataattaatattttatatcattaattgttatacccgatccgaatggtactttgcatggaatgatttaagtaatgagacatgctcagttgcatctaatgctgcgttcagtgatagtgttttgggaataacaagtagagcatctgcaaattcatcaattgccaattgttctcttgaactctaaaatattattaagatattattaatcgaagttaaatttatttgtcattaccattgacttggaataattgtgcaggtgtattgagagggaggtttctactgatcctcctcctggcactagtgagttttgttccagagcagtgcttagtgcgcaaagcgcatcatgtactgatctttcaagttcatttataaagaactcgttggctcctcttaataccaaggtgcaactactttcgcccttttcagtacctgcaaatatatatcaccattagtagataaatttataactgtataatatatctgtattattactgttatttgaagtgttgaagaaaagtgcatcccaatctccaattctcttttcttccacgctttcacacgttcccaaataatcgctggaaaaagactcctcaccatcaaggtttgataacgttaaaaggagtttacctattaatcattataacgaagaataatagtggttaatattgtagaaataccatttgtgatttttgagatatttttaaggtcttttttcgggactcttctggctgcaattactccagcttcaacaaagtacttcatcgacatatcatcaattccctgtgaacttaataccacattgcagcccgagtcgagtatcttcttcactctttccttagttatatccttttctctaaacataaatttatattccacacataaattataatagtattaaaaaagtgtataactatttttaagagtgttaatagcatgactattatacaaatagttgatacttaagtcggatgttttcaagttcttgtgggtcggtaacgttgacttgaatgccgagatgaagacggtattgttttagaggaaagtcgaggaaggcaatcttggcgtttttgactgacaatggcattccttgtgaggctctacccataagaagggcgtagccattgactacgtaggactcctttgcacttttcccgtgaaccttaatcacgttaattctcccaacggggtacttgtagtctccgtcgtcactcaaagtcttaactgttttaatggcctttacaacgagttgagcaaagtactcggagtcgaaaccgaccaatttagaggaaagtgtggtctttgcgatgttcatcaaaacctctgttcccattgaatctaaactcaaactcatatgctcacgaatgaacttcacgctctcctaaacaaagttattacactgaataagagtaataaatgaataaaaaatggtaattataatactcttaaggccattttgtatccagtgatgattgaggtgggatgaatcccagagtttgcgagggaatttgcacgttttaataactcagctgcaatcaaaacaacagatgtggtaccatctccaacctataaatttgttaacactctccaatttaatgagtcaatattaatgttgttgtaactgtgtaaaaaataacttcttggtcttggagttcagataaatcaacgagcagttttgctgctgggtgctgaacttccaattgctttaacattgtcgctccatcatttgtaattgtgacgtcgccgaggtcatcaactagcattttatcaaggcctttcgggcccaaacttgacttaagtatgttagctattgcttgaactgcattaactgaaaaacaacaattaataagaattaatataattttttatggaattaaataggttaattattttagaaaataccatttccggctctgacttcctttccggtagtcctgtgtcccaggattccaactgtcattttgttctgaaattatttacaatttaattattaacaaattatttgtatgaagttatcgtttaaggaactgatcaggtacatacaccacagagacgcaaatcgttagtacaaatttattatcagggcaaactgacactatttcctaattaaaactagtttaaattttaacatgttggtacaaatcattaaataataagtattatttacttataccaagggatacatataaataagagtaatgtgtatattattgaagtatgcattatccagaagtgtataatagtttagattaatagtattttatatatttgaatagaatcttgatgtttttgaaatgatgaggattttattattccataaatgtcaatcttgaatgtgttgaaaacgttaattctattcttgtttttacgttaacaacaatttgattagctgaatattaaaatatctagttctattttaaaatttaaaagtcaggctatgagtaaatgagcctcatttattaaacagttgaggatgggggattcttcagattaatttttttaatctcactgtttgagttaaaatgatgacagtgtagacgggcgatcttaagttactagcgtaacgctgttgatgtctacttctgaactcaatctcaatgatgaaaataacggactagagtatatgactccatttgattatacctttttttctgatgtgattgagatacagactaagtaacctcaaattttacattatatctacaattacctatttatacctagtagaataaattaaatattctaaaatattaatgtaaggggcacaggcatttccctaattttggtggaggttcgaatgacccgtaatcatcctccattatgctagaccttctaattatttcttccttttctgtaactattcctgctgttaccttgaccagtccacgccatggtgctataaattattatatttagataaaatcttacacttctcaattttgaagccagagtagtacaatattaaaagtataattccagtcacaatgtataatccgcctagaaaaaacttaaaataaacaacatactgattgagagaagtgcaatttcaagtggtagtgactttgttcccaagaagttaatgcaggttatgtagattgatttcctcgccttccactcctggtcaggccacaggttattaaccaggtggatcttgtactctccttcaggtacctcgtcgtaaatcaccccgtaaggtttcaggaacgtgtttgcatacgggtgctgaagccatgagtggtacagtggattactcaagtctatccagcaaaatcccttagtgtactgcttcctcttaacctatggaatattactctcaaatattaacagtattacgagtttaactagtcttaaaatatcaatagcataactaatattaagtataaaatgggtagaaagtacgttgaaaggtccaaaacgccataaatcggggtaatcgtgaatttgtatatccaggcaaccgttgaaatcggctccttcgtaggtaccagctgcgtttctaggtaccacgttcggacaaatctcaaagttgtcagtcatcatcgtggctgccaggggcccacatgggtatgcagggaggttaaactgtggattctgattgtggttctggcaccattcgtcaattccattcaaagtgttctttccattaatacagcgcaagtccaatatctcagcaaaagtcttataatctaatcaaatactcattataactgaaatgataatggtatgtagttaaatatgctaattatatataatataatataatatctagaatagtttaatgaaaagcaaactttggcatgtgcttttagcggctaatgaaggtcccgagtcataaacgacttttttatgagtgacgtaaaactcagagattttgtagtagatgtatattggaggcttgaagtccttggttatgttaactatgattggtccctggtcaagttctgtgtatggcacttccacattaactgaacttgagaaaaagaacaaaatcaaggtcaaaacagccagcaagactcccagtgaaatggaaagaactgccgaccaaacgggtgtatacatataataaacgaagtaattgtgtgaaaaatccttttgacaaacgcgatatgctctactcttgtagtcagggcccaaacccttgcctgatggcagccatagcactttattttcgattgatacagacacatcgttctgactcgaacttaaattttgtgctctttgcacatttggttcctttaggcccttttctagcaaatctttgaactccttggaaggcgaatcgaattcttgctgattattagcctccctttcgtggtggtctgaggccattggcctcaactcactgatatttggagattcccttctcattttacaaaattaaaaacaataaaaactacacattttaaatttaatctacaaaggtataagctttcctactgatgcgaaatttgataacattaatttacaaaactatgtttaaaaattaatataaaatgttttttttaatggttactaaatttaaatttttttacatttattaaaagtggcatggactcatcttttatccgtatctacatacaccatccacatcatactaatattaacacaatgaatataaaatgatcaaattaatgccaattttattaaactaatgttatgtttagtagactaataaaaattttattgagttaatggaaaatttatcagattaatgtgaatttgatgaaattgatatgaaattcattaaattaaacttaaaattactccgaataaacttaaaatccataatccataatccgtatccgtgttatttatttaatcaatatcttggaaagggttaggcgagaacgggtctgtgggactgtaagcaggtgatgtaggacttagtggactggttggagagtacccatagtttgggcttgtaggggagtacgcaggcgagtaaactggggaagttggagcatatcctagatttggactcgttggtgaataagccggggaatataccggtgatgtgggactcatggcgctagttggactagttggcgagtaggctggtgagtatactggcgatgttggacttaatgcattggctggactagttggactcattgggcttgttggagaatatgctggtgaatatactggtgacatagcactagttggactcatgggactcatgggactagtgggactcatgggactagtgggactcatagggctggtaggacttgttggactgaaacttccgccaagtgcataagtatcaaccataagtccaggagtacttggacccatgccaatacctcctactggtgacatcattaatgatgtatatgttgggctgaaggccattggcgacattgtttgcttggtggctggcgttgaggggctgagtggtgatgagtctggcgagacgagtcccagagtatctgccacgttgattgcattggtttggttagcgtctctgagcttgacttcatctatcatgatgtcaaaagctcctgtgccgtagggcgaaagctgtcctacaataacgttttctgtaactcccttcaggtggtcgacttcaccgaaaactgcggcagtcaaaagcgtctcaagcgtctcttcaaaactacactttattaagggacccctatctgctctgttaattccgtgcctcgtaatactcatcaggtatcctttctgtgtcatgatatcgcagaggagtgagaggtggcggtagttgacgtatgctccgtcaaacgaaatgactgctctgatttcacgtagaagagctcttcttgcggcctctataccaaagacatggaagatctcactaacatcattgctgaatgttttagtgtagtctacgcaagttattgggaggacactttccaggttacagccatccgtatccagtacccactgcgagacgcggtcgaaactaccaactgcgctgttgtaacgcacacaattctcctctctcatgtacaccttcgttattccctttacacctctaagctttattccgcagagaacgtcggtcatgaacttgtttaagaagtcggcctcagtgtcagatggtcctgagttgtcaccttccccgccgtacttaaccctaattctcatcaccagaagctcactgttatcatcagtgtatatcgcgtcaatttccccattagaaaactctgagtatattatctcaccaacctccttcatcgtcaacctcttatctgtcattatcttgctgttaagtacgattctcagtacaaattggcccagcgtccccatctcctcgtctgggaactcatagtagtctcgaacccactcgtaatcttcctctattatcgtcctgtcaactacggggtcgtagaccacagtgtaactcagcactatcttctcgaagtttgtgtactccaaaagcgtctgcatctccttcgctctttcctgatctttgttgattgacgggtctaagtaaatcgtgagtgatggcgttctcacgtttgttaccacattaatcaactccttaagacgtgggagacccagagtcacattcttactcgatacaccagcgaaatggaatgtgtttagcgtcatttgagttgctggctcacctattgattgggctgcaattgcgcctacacattctccagggtttgcaatagccttgaaaaaacaacgttcaacttcaccgtatacccagtcaagggctaaactactgatttgaacctgctccatcaagtacctgctattcaaatgacaccttaaatgagctttgatcaagatcgtagcgttttgttgggcctcttctgacaatatatcatttggtccactcgtattaattatgattaggctttccaacagtttattagtacgctgtgctatctctactgggttcagcttgctggttgaagaggctgggaactgagttgttgcatactctaagatgcgcttaatgttgattggcaagtgctgggagtagtctccactcgggaaaatctcctcgcaaatcatcttctttaggtccagaagtttctgaaactcctcaaccagaatcacttgctgtgaaaagtcagatagaatcgcgttccttatctcctcactgatccagcctagaccgtatgactcactcctgaagtcgtggctgaacctgcggtggatctcttcgtcgtccagtctcatcaagtctatgaactggtcctcaatgtattcggctcccattccgtcttctccgtagagaaactgcaggatttcaccgtttccattccttgcagtgcggtcatactggaccataacatcctccatggccttaattagcctcctctgcacataacccgtctcactagtcttgcaggctgtatctataataccctctcggcctcccattgcgtgaaagaacatctcctggggagttaaaccactaagatatgaatttgagacgaaacctctactctctggtccataatcatgctttatgaagtgtgggagactgcggtctctaaagccaaatggaattctctttccttccacgttctgctgtccgacacatgcaataatttgagatatgttaatcgtgcttccttttgagcctgaatttaccattgacagtatgttgtttgagaggttcagtgatgatgccacaatacttcctgactgctcacgcgcatcgtttaattctttattcactcttgcctcaaatgattcaaacagagactttcctggctggcacttcaacttccccttttgtgcctgcaagaccaacttctgtacctccttcttactcttgtccaagatcctggacaccttgttcaaagtagactctgagcagcaaatatcactgcaggagactgtaaaccctatttgcaggaaccagttgttaactaccttttggagtgttgtcagaaagtcgcggcacttctcaggtccagcttcatgccacaaaatatgaataagggaacctgagctgcatcccactgttttcttgcaaattattccacttatatgctcattctttctgattataactcttgagtcattaatactgcagtttaggttatccttgtccagctttattgttccatcccttatcaagtttatgttcgttattccttgggactggttaaaggttaggagcactgaaatcacctgcttacccgtccagagatttttcgggaagaaaatcgccggctgaggcaactttccgtcccagtatgggatccaaattaggagcgacattagctcatccctagtcagaaatgtgtctcgttttgtgaacttggagacggccaacagtgagtcctgtacaatacccatcactggtctgtttccttgcggagacacaatctgctttgggactagcatcagatgcttgacttcggccctcgtttcgtgtgtctgaaccaggtgtaagttcatctcatctccgtcaaagtctgcgttgtaaggagttgtaacacttaagttaagtctgaaggttgaatacggcaaaatcttggccctgtgacccataatactcatcttatggagagagggttgacggttaaacagtatgtaatctccgtcctgcatgtgacgttccaccttgtatccatactctagctgtagttcactgctcttcttcacatgacgaaggtcaaatctagttccgtcgtctcttattatgtactttgctcctggccagtcgtgagggccagtttcgaccttcttcctcaagctttcgtagtttagtgagtttactgtttcacagaatgtaagggtcattgcgatgcttttcggcactccaatcgtatcaattgggatatttgggtcaccagtgatcactgtacgtgcagagaagtcaaccctcttacccatcagattcccacgtaatcttccctccttgccctttaaacgtgctcgaattgattttattggttttttagacctcgttgatgctattggcattcctgggatatcgttatcaaatagtgttgtaatgtggaactggagaagttggcacatctcctgtatgatgtgtggcgctgtggctctcttatcgtgtcttttaatcaagttgtttgtttttaaaacgtccaacaatttgagtgttaggtcgtcctcactgcgatcgcttccatattgcacgtacggtctaactgcaggaggtggtactggaagcacctggagaatcagccagcacggttgtgatcgttcaggaacgaatccaaggcacttcatgtcctcaagtgtaatcccccttaaaaccttaaaggcttcctcaggcgtcaagggacgtttaatgtcgttacactgctcatctgactcctcaagaatctcacgttgcttctgtgagaactggatcatcaggttaggcccctccttggtgtagctgggctgtgggtacccgcaaccctcgatctttgtgttagtttgagtgtcaattctgcaggtgcgagaggctgaacagagttctgaaaggtgatttagcctgaaagaacttgaaggggacttcaggataagctggactcttgggtcattcttgtttagtagcagtttgctgcagttaaaacatacgcaacggagaatttttaacacagtcatcataaatccgtagtgatacatgggctttgctaaaactatatgtccaaaatggcctggacaatattttaaatccatagaacaggtcaaacatatgtgacgagggtcagttgttcccattcggagatcgttaagtcctccggtttgggggattccctctcggtataactcagtaagagttatttcacatactgacattcgttttactagttctgggtccaagagcccaaattctattgccctgatgcgtttgagctcacagggagaaaagggtcgattcaaatcgatcaccgtcgtcattttatatatgaaattattgatactgcatctatattacaataaagctgtattacagctttaaaaatttattttaagtgaacacaaattcaaatcgggccatctttcttcactatatacttctaaccagaattttaacggtattttatggtatattatatttttatatattgtataatattattatttccttaaatgagtagattaatttgatttatctcctgattttgggaccaccaaaagatcttccatattctcaactgatcccagtgaattctttacatcttccttcactaaacatttattaactgagttaatctatatgtttatctttgtttttggcattattttgctcaaataatgttgatacgctgagagtttattctgctgaatattgtagtggcctgtgttataagatccgtcgttccactgctattagttaggattatggtgttattcgttttggccaaatttgcaaaagctgcaatatacttctctgcaagccttaacgttacggcctcagccactcctgtacacattcatatacttaactctacagtatataaaatatctaaccctaatttataatatataaccattgtttatataatataaccattatttataaatattttactatataaagtatgtaatattttgagttaccattttttttgagggtattggttaagacctcgagtgtgtaagcagctgcttctgctctttgtttttcagcttttgcttcaccttctgcttttagtatctcgatttgtctcttggcgagggcaatgttgatttcgctctctctgtcaccttcacttctgaggatttcagctcttttcatacgttcagcttcagcctaaataaacaatgacaaaggaataaatatacctgtttttccatggcagagatgatgttttttggcagagtaatgtccctaatctcgtatcttaaacaggttacaccccaagattttgaagcaacattaatgttctaagttaacagtattaaaacatttaaaaatacgttgacaatcaggtgattcaggttgtctctttcaaggaaagtggaatccagtgataatttacctagttcagacctcatcgtggtttgtgccagctgggtgatagcgaaaattggatcctcaactccataggaagcctaaaaaatgattgttttagattatgtttatttctcacatcatatgggtttatacacttcacatataaaactccatcaatctgtatcattacctaaaaacaatatataaagaggggtataggtggcatatattggtaatttcggagataaataaagtagtaatagctgcacaatacgaacattatccttggtaattgccgtttggttgggaataacgatagtattttcctttaatgagtggatatatgaaatcctatcaattgttggccatagtaagtgtattcccgctcctattgttctcttatattttccaaatctatataaaaatgcatttcaatgatgattttaagtagaatttagttgtaatttaaataaaaatgtaaatattaagtgataaaaaagggaaatagtaaaagaataccgttcgataacgtaaacagattgctgagggactatgacgattccaaaatgtgttttagtaggtggtctgaggttaaaagttgtaaattttctattgaagctgtgattgtagttgattctacctaaacttctatggaatcctacacaggcattctttataccaattctatggaacagcatatttatacagtcaaattaacatataaaatgttacaacattattttactctaatatactaaaattaaagtgtaattaacgactcgtagatgaaaggaatatataaccctatcaagtatgaacccaattgaataaaaaattgttatttattatttttcatcgatttgtaattttgttcgtctgataaatagaacgaagcccacttgtatattgatctaatttttaatttattggtcagatattattaacatactctcttattttttcatagttaaatcctaaaaacatatatgaatctttatctcagtattctatatgtactatataaatttgtaattgagaactgaatatctgtgaaatgtgtatatgaaaatgtgtaaagttgtgcgagggaaccttttggttgtgattccaagatttgtgcgatgtgttcaagaattgcatttgaactgacgtttaaattataatcctcaaatgcctttgtttttgcggattctaaacttgccatcctcgctatatctattaaacatttattcataaaataggttatatgtttataattgtgtagagttcttggggtgaaaataagtaaaaaatacgtattataattttagaaatatcatctccgaggaagttgctgatccttttaacagtttctaatcagtttattttttcataaaattaccctcgttataattaagattagtatcagcagtgccactaattttattgttgttttctaaaaattgtagaatatttttaaaaacttcagggtcgtcaattttagtcttgatgcgttgtgtgacgtcgtacggcctgctggaatcaccgtcactgaaccacgaaatagttacacattttaaacagactattttaatatgaattaatattattaaatatttatgcataggtaatttttaatgaagttttccgactttataccccaatattggtttttcacactatcacataaattatatattgaaatattgtatgggtatgtatgttcatgttcggttgataaaattataagagagtttactttgaattaagcttattttttgctgctgataatggcatcaactttagcttttaaaattttttccttcacagcctcgttttcgctccttattttgactttttcttccttttcacgtttgtacctttccaaagcctcttgcttagttttcagggctttcatctcaagctttttcttggcttccgcaaccctttttctctcagcctcaacaatcttggctctggcctcaaactcagctgctcttttctcttcgagctcctttttgaactgctccttggcgctcttgaccttggtctggtttatctcagtgattttctggaccattgcaagtcccttaccccttgtggtcactgaggttttaacgccgtcttccttaaggagtttgctgtttaaagtcattgagtacttgggtactgaggctttcggctcccagttgagtttctcggtctttaacttccttacgggtttctccgttggagctccaactgaaccctttggtagctggagttcttggacttccatggacttcattgcctcctctacacttctcatatcaactccgtactcttcatcgtcctcagatgactcatcagcctctggttttgattcctcaacgtcgtcctctggtgtctcgtgtacgtccaatgattcttcaacaccacgttcagatgattcttcaacaccacgttcagatgacccttctgattcttctgaagcttctgatgcttctggtgcttctgatgctggagtgcttccggtatcttctgacatcagttcctccatttcatgaatttgctcggctacatcgacgatgtcgctgtttgattctgagttttcgaagttgtcctgagaatttttggggagttttggaaactcagagtcgtatgtttcttcaaattcgtactccattgtcatataattttccatatgatttttgttactaatgctgcagtctgtgcttatgctatcctgcttaccaagttcaatatctttgaaattggttagtttaacgtttaaattatcagaatcggattttctgtcgaaaagatttttaaaccaatgatacagcgctgaaaaaaaccttgttattctagttatgaatcttttgaccatcaaacaaatttgtataatggttttttgtaattatttactaatcagtttaatatatgtaattatattaatctaaatttgttcgaggagacgtgaagacgtcacatgaaattatagatcaagctgccttctatgctacttttccgccaagattactaattaacgcatttatatagtgtactatattaacataaacatatcttaattattaaaattctaatgtgtaagcgttaaatgttaaaaaagatgtaaaattttacgagatctgaatcgactcaatttccgtcccaaactttaaagaactttattatttgcatctttgcaaattttttactttaaaattaaaattttatctaatataaaattcaaattaacagagatatcaattaccgcacaattaccgtatattgttggtatacatacacgatttatattatagaaaccatctgtactatttattatatgtaagtataaaaatgtataaatgagtgataagctggaaaagaccgagaattctgaggacaacttgataataagagcatataacgtgccttctgagtatacaatttccaagctccaggagcttataaaggagaactgttcgtctgctcagctggaccgtgtgatcccgcctgagccctgggatgatcctgtggatacgtgttggttaattatttgtaaaaactctaaaacttataaatcgcttttggctttggaggacatttggttgaaagttgataaaaacgataagttgtcttctgcagttacctttttacctggtcaccaatttgaccttcctcaaataccttccaaatctgatgaacaggtccttctcacccagtttccataaggttaataaactttcccttcttaacactatttttaattttttcatatatttttaatttgttgaacaatatttattttctttatcaatttttactaattggcgtagttgtgttaacaggtgatgttgtgtgagactttgttaatttacttacacatttttaattttttatattaaattttaatttttataattttcacttaattataatggttttaattagtttcaaatgagaatattgtttatatttctgctgttggtaaaattatcccgtgccctgagtaaaagggacaatagtattatgagcaaccttgttcgtttggttctaacacgttcaaagttcaataaaaccaacaatgaggggtccagagtcactcaagcccctatcatgtactacactatccgttcataataattatgtagaaaaatgaacttagagaagactaaaatgccacttttcttgtatcatacacacaaacaacctcaagatggtattcctccttacacatacttatagttatctagagtgaataccgtatatatttacaatgtgtatctaagagtgtaatcaaaattttagaaataagattgcaaagttggttttaaatcaaaattttatccattgtaggggctaacgaacttgataatagtaattctaaggtattttacgtctaactaattagtatataagtaatggcatggactaatttccgtttaggaagatgatttggggaaggttagtgggaaattagaagagatggaaattttccaagtgagtgatataatttaataaattaatgcccaattttcaggttatacctcttaagatgttcaaggcacaccactacacaggtatacaaatacttacacatgattattaccatgacaaaatgtgtaattctcctataatgatacagaggatgagctcaagaagatgaacgataacgctgagtctagggagacttacgaatatttattcgtggtattggaataaatttcctacacattatttatttcagcttatatttatatataaatactttaataaaataatatcaattaattaaactttgtaaaaactttttaaaaattattttttctcaggaatctcctaaatcccaacaaacttcttcataatctttaattttttaccaaaattttttgctaaaactttttattgatattttgtgtataatgttatgtgttattgtatactactttagtgccttgcacagcttaaatataaagtaatgttaattgattttttaataactggtggtgtactatgtgtttactgtttctctctggtttctaataacttgcatatgcctgagattctttcttccgatcagttggacaggtataaaagggtttctcctgcagttgagaaacttgccagcctagacgacggccgtgataggtctggctgctatgctatcgcactaatttcagggaatccaaggtggattgaaaagggccgttactatgacgtgtatcgcattcatcagcaagttggtaaacgggtttaccttaacaggattgagttttttcattctgagcagggctggttcgtcaacggtgagccttacttacagaacattagggctgttgccactatcctgaagcactttaggagtcctaaaatgaggactgtcaagttcaggtcaaagaagcactacaagcgtacaatcggacaccgtcaggagatgactagaattttaattgacgactttgacgtcttgaggagtgacatgaatgtcttcactcatgaccctgttaactttcctcttctgaaaatgcagctacttaggtacccgagtctcgagcttaagaagatgaaacacaacactgttaggggaatgacgaaggatgaaattggtttaattggcgagaatccactcgaccacttcgacccagtttacaacaaactcgttattcagcaacaatataataattttatataatttttattccaacctttatactatacacaccataatacacactatctatataacattatacttataattattaaaagattattgtttcagtaagtggttggttactgtatcaaataatggtaaaagtggctgtttggtatatgctacaatttcgtcatttaattgtaatgctacattctctttaaaaattaaacagttattgttatctaaagaatcattagcatcatttatataatgtgtataggtgtgtgtataatagtatatatgtaaatagtccgtaaaatgattaagattgtacctccttttaataatgatttgacatttaatttatttgattgaaaagataaaacattcagatcgtgatggatagttttattatctctaactactgagtagaaatggtttaatttacattgtccttccttaactgatgttcctacagcttgcttctttccaactcccttcagcgttatactccccagctgtgtcactatcagattcgactctattttcctcctgtgctcatctccaaaatagtactcgtaaatcaactaataattgagttaattcaataatttactcttataatagctaaataaagctaaaataagaataaataaccataattgtaactaaaattaacgctaatgaccctttttaaagaatagataatactaaaatatgccacaataactactgataattcataaataaagacaatttatatagtttagtgaatgttagatgaactaaacaataccttgatgtcattgaatatgtggtaaattatgtcatgtgttctcacgatattatctaaattcatctaaacaatattagaagatattttttccatgatatatactaagttaatatgaaagagtgtatcaatatttggtggtataaggataattgctacctgattctgaacgttgaaaccgatattgactacgttcccgatactttgtagttggaggtcatttgtattaaaattaccaagatttttactaataatcttaaaagggacccagtcctctgtatacttggagtatttatctcttagttctgaaacccccaactccttgtctgcctttatatcatcactcaagagctcgggtcggatatacttgcgattaatgagattgagcacatttaaactttccttggcattgttgttgaactcatcaatatacttttcaatggcctctaaactaccctgatcacagcatcttaaattaatgccaatatacggtaccaaacattcctattacacattatattattatatatcagcatagtaacttatagtataatgatttattagtttgatttattatatagtagtggatgggataagatatgtgtttgtgattttaaaaataccctagagtttgtttcaagttgattgttgttattaactaatttgttgattaggagttgatagctttgtagttcttttagtgatttatttccaacgaccactgtccctgccaaattagttatgcttacatttagtactatttgaatcaaacaagaatcttgttcctgttctttggggttaagcttatttgaaccggtattagagtttgagtctcctataacataaacagttttaacctttacaatttggttatcaatcaatatgtaatcattttgttgtatcgttccttgctgtactagaatattaatcaactttcctctagtcgggtgatggatagtttcataaacataacccttaaatatagcatttttgtccgttctcaggttcatttcagactgtatcttctgtatctcacccatgagtttgtcaacgttgtgacctgttttggcgctaattggtacaatgcctagcaaattactgtttacaaggtgggactttaaagtttttgaaacctgtgagattgattcttctggtgttaaatccaccttattaatggccgcaatgactctcaggttaaaccttttaataagatcaatacactcgagcgtttgtggcatgacaccatcatcagctgctaccaccaggataaccaggtctgtgcatgaaactcctctttccctcatagttaagaaggctgcgtgtcctggagtatcaataaaggtgatttttgatggacttgagggtgaggttgggtttagagagacttgaaaagctgagattttctgagtaataaagcctttttcggtattggcaacatcggttttattaatataatcgagtagggttgtctttccgtgatctacgtgccccattacggtaactactaacggtctgttaacccagttactttcaattctctcaacataatattttccacctccattaacaattttataattacaaatactgttagaaccactgtttagaaatgttgtgatctcatccaaaataaactgagactcttctaaacttaacttgttgggatttaaatcaagtttctcgcacacctcttctatctaaaccacattttctacatgcttgactcctatatactatgccttatctatatacctgctactattataattaaataaagtttaatatgcaaaatacttgtttaattggatagtttgtcaatcctgaaagtgattctgatgtcaaattataaacaaaatccctcgttttatcttcacgtttaacatgtttatcgtaatcaaattcatcgtagttcacttcattgtactcttgattgttattttcatggttcaattttccattagatattgaatttgtaataattgttttatgtgtttttgaggaaattgactgtaaaagatgttctacgtcttcctctagcttactatcaggtgtaaatgggctcctgggtgtaattttgtagcacgttttgaacgtgtgaactggataaattacatcagaatttagatatttaagcacattttcaagaaagtgattgtaatttatgggcttgtcagttttatatattgaactaagtagcgaaaatatgtgtaaggagccggtaaaacctagattattgtacaaattccgaattttgatttccaattcattcaataaactattttctgatgaaactaacaatattttgagaaatctttttatgttatccagatattcttcactgaatccttcaaactctaacaatttgaattcaaagtccacatccaaaggtttagatttgtgatctaggtgatcttctttattttctatatcatcaactgttgtattatcaagtaaaataacattgtttgttgaagaagagtgtaaataaaaggtgtttcttgtggatcgagatgagttagtaatttttgaattaaaatcgttattatagttattaaaaattttgtaatattgaggtttattgatgggtttgtgtatgtttaaaattggtgaagatttgggaatattagtgttgagattggttctaaagattccgtaggttttggaagaattcgtgtgattttttaactcattgtttacatatttcttaatggaatttattattagtttatccacatctatcattaacaaaatattataaataatgtaacaatattactacctcatatgagtatcatatattaaattaaattaaatattttcctattcagttacttttcatattatatgtacgaaaatatatattggctctagtgtgtaaataataactatattcttccatgtcatggatacaacattaagtgtattaaagctgaaggttaagccctaacattaaaactcctgttaaaaggaaatattaaatgttatttggcaaatctctgggaagatttgtcaatagctcgatccttgagtatctacttttcctgttttacattgacctatgtttacttacacacagtcacattgttcagtgactaatatatttcaataaattcgtaattaaagtattatttagttttttgtttctttttagattggcttgatggtattttaaattttggctccttaattgcttccctaatgactctgtccttcgttgtacaatctttgcaatacatagtaacattatatatttcctcatcttcgtacgtttcaattttgggttccggttgaatctcgttttccggctcgtatctgcgttctagggttcttccatcagtcagcttaagtcttaaagtcatatacacaatatgataattaatttttgtaatggacgttcctttggtttttccgcgttgtgagaataggatcctgtcgccgtatgtaaggtaagcacacggttcctttaactctatttcatagttgtaaccttttagtgatacatcataatccattggttgtttttcagtttcgcccccatcttcaggataaaatcttaatttgaagggatcgaagaacttgtgagtaacatctacccactcatccctggcccagcatctttcgcatccaccttttacagcccatgttaatcttctttcttgttctgacagtttttcacactcttcacatttatatttctgggaaatatgaagaccaaggttttctagcaggattataaccatatcaggtctgttcaatagataaaataactcaactttcaaaccacattcatttggttttgtagatttccaaataacttgatcgccatctaccactaacccgtagacttggttgtatggcctaataaagtcaccaaaattgaagcctgtccaccattctgttttcctggttggaatagctttacttatatccagctttactgcatggcaatccattgtaataaatgacttgacttctactgtcacttcctttggatttacttcccatctattaattggtaagctgaggtatggtttttcatctgttacgttgtctgaattatctgacgaattgttatttgagatatcctttttcgtatctggtgaatgatctggttcggctgttaaatccattggattgtttataattggaaagaatgttactgacattttttacaagttctaataattagtaaaaaatattatatgattatcagattaaatgggaacaaatttagatctaatagatcgaaaagatctgatagatccaatagatgagattttcattaactacagttttcaagcagtgtgttcacagtgaatagttagatacacattatgtattatttgtaacaaattcatagttagattattatttgtgttttctcttttttacaggctctatccatgtttttttgaatctctcttccctaatcggctcccaaaaagtatagttctttgttgtgcattctttgcaatacttactgacgttgtagatttcctcattataataagacatcgttaaattttgggatttgattttgttttccggcttgtatttcctatgtagaaattttccattagtcagcttaagcattaaagtcatacctacaatgtgataattaatcttgattactgataggccttttgttttacccctttgatcaaataatattctatctccgtaggtaaggtaagtgcacggttcttctagtttaatttcataattgtaaccccccagcgatacttcatagttcatagtttgtttttccggtttcacgtctgctggggtgaatctaaatttagccggatcaaggtacttgtcagacacatcaatccattcatcacgggccttacagcttttgcaaggacttttattcctccattcatatattctctcccattgtgtcattttttcacactcttcacatttatatttctgtgatatatgaaggcgtaggtttgctagcaggattattaccatatcaggtttatccaataaataaaacaactcgactttcaaaccagattcatttggttttgtagatttccaaataacttgatcgccatctaccaccaacccgtaaactttgttctttggtcttacaaagtcaccaaactcgaaatctgaccaccattctgttttcctggttggagtagctttacttatatccagctttactgcatggcaatccaatgtaataaaggacttgatttccacaatttctcgatctggaccgaacctcgcttcaggcactttattgaagccgaaatcatctgacgaatcgtctggtatcgtgtctgttgcgttgtctggtatcttatttgaattatctgttgagttatctggtatcttatttgaattatctgttccgttgtctggtatcgtgtctgttgagttgtctggtatgtctgaattttctggttcggctgttaaatccattggattgtttataattggaaagaatgttactgacattttttacaagttctaataattagtaaaaaatattatatgattatcagattaaatgggaacaaatttagatctaatagatcgaatgttcattaacaacaattctcaaggactatgtttacggttaatagttttatgtactaaaccgaaactgatttaaagttaacaaatgaatataataatcaaatgaagatgttagaatatacatagaattatacttagttgtggtaaaaaatgaatgaacaaagtgtaccaaaagcagttagagtagattaatagaaataattaggtaaaactgtatgtgtatacgtaaatataaaagtacatggatattttaaaaagattgtaacattgtttgttgaagaagagtgtaaataaaacgtgtttcttgtggattgagatgagttagtaatttttgaattaaaatcgttattatagttattaaaaattttgtaatattgaggtttattgatgggtttgtgtatgtttaaaattggtgaagatttgggaatattagtgttgagattggttctaaagattccgtaggttttggaagaattcgtgtgattttttaactcattgtttacatatttcttaatggaatttattattagtttatccacatctatcattaacaaaatattataaataatataacaatattactacctcatatgagtatcatatattaaattaaattaattagatataaattttaataaataaattaaaataaaatatattgtaccatatttttatcgcaataatatatttaaatttactaaaatactttgtagcatatgattaccatactaccttctttatcacatatcaaaataacatttacaatatatcagaatggctaaagagaatgctgggcttggaccctttggcactttgggattgaagaagcctatttgtttgacactacagaagaggttacgatatgaccagccttccgccatccagcgtaagaccattccacatattctggctggatcggatgttttatgcatagctcgaactggctcagggaagactgttgcttatatagctccaattgtccaacttcttgactttcactccccagttgttggtgtacggtgtttgattttgcttcccactagggagctggcacttcaggttgaaggagtcttaaagaaatttgtaaatttttccaaccaggatgatgctctaagagtttctctcttgatcggtggcaagtccgtggagagccagtttgggtcactaagctttaaccctgatatagtaatagcaacaccgggccgcctggtttatcacctggaacagaagagtttgactctttcacttctaacacatttggtaattgatgaggccgataagctatttgaaatgggattccttccagatgtttataaagtatttgcatacttgccaaagataaaacaggtaattttagtgtcggccactcttccaactcagttgagtgaattcgtgtcttttggactcaatgaacccgttctcgctaagctcgaccaagatcaacacattaatgaacaattgcaaatgagttttatattctcaaggtatttttactttacacaacgttaacacacctatttaccacttaattaccattaatttggtattattttagatttaatttcactaattaatagttaagagaaattatataatggcatatattctatacaatccttatatataatattataggaatgaagagaagatatcggtgttgctaagattgttagccaagcataaggtgggggattatatataattaatactgtaactggtttaaaaattctttaggatttgaagaccatagtatttgtcgctacccgtcatcacgttgagttttttagaaccttgttacttaaactgggatactcaatatcatgtgtatacgggaccatggatatggataacagagttattgagatgagtcgcttcagaagcaacaaaaccagaattctgctggtcactgacgttgcgagccgtggcctcgacattcccctagttgacctggtgatcaactttgacttcccatattcaaccaaactcttcattcacagagttggtagaacagcaagggcaggtagacagggactggcagtctcaattgtaaccaataaagatttctctttcctactccaaattttatacaaactcaacaaaacattattacttcccatcagtaatgctagtaatactggtaataatagtgattctagtgctaatactatggctgatggtgttaatactcatactcacaataccaataatatcagtggggaagtgatcataataaagaatgataaattgtttaatgaagcgtttgttggagaattggataataattactgtgttataggcagctgtcatgatttgaatcacttgattgagactgtgaataataagatatctgaggatcctgaattatctgcgcagttcaggagcatgcaaaactcatacaacctctactacaaaacaaggcctagccctacccataacttcattcaacactcaaatcagttctttcaactctactcttcacaattcctcttgcatcttttccacccaaattatcttcaaacaaccaatcacactaacactaccaagatagttgatagtgagaacactgacaataccgtgggtaatgtggacaatgggaaggaagagtatttgcaatatttgtcaaattataaacctgatgagaaaatcgtccaaaataacatttcactagattcaatcaattatatgaaaaattttaaactgtacaatatctctagtacgcccaacactaataacacacaaaacattgttgatggtaaaaatgacacaactagtgttgaaaatagtaaatttaatattacaagtaccacaattaacggtgaaaatgctatgaatataaaggaaaaagatgagagattggtgaaggatgatgataagaatgagatatatgaagagagtatggtccttgatatggttcctgacaacgaagatttaataaagaagaaacgctacatgaccaaggaagtctggaaccgacgcactaaaaagttccagcatgtaacggtagatttgtataataataataagatcatttcaaagccgaccaagggtactaaggataatcacggtggtagtagtggcaaggataagaatttgtttaaaaaatggataaagaagacctcaagaagaatacaacatgttggtgaggttgaaaatccaagtattagtggttttggtgctgatagaactccaaccaagaactctcttagctgtgacccagacctggatgaactgaaaaccatgttcccaaaacacaaagatattattgacgcttatgaatccaacgaacagttaacacataaacaaatcagaatattaaacaagttatcaaactacgccaccacaactgatagtcctagtaagagtaggaataaaggtaaaagtaagaccaagaagaagaaaacaagtaaaaaggaatatattaagaagagaacggcaaaaattttgaaaagaggagctccaaacagatcaaaactaattgtacacaaaaaatattaatttattcaaatccattcattgatatactgtattcattaagtgtttatccacttgtttaaattcttaatttagatatttatttaaattgtgaatttaagtataatttggtcttaatttatctacaatttactgttaattgtaatatattaaaggtttactataattcattaacataagaagcattagtattggaagatgttccatcagcggtatcagtcaacgttgtagagtactcgtcgaagtgttgtttcctacctttgcccttggtgtccttgagcttaaaatcttcatattgctcctgagagattggataccaggattggccgttgaacttgaagaatagatggggattttggtgagagtttgtaacaatgtgggaaagaagagaactttcagaccgatatatgaagacgaggtggcagcccggaccatcagcagtttgttcccaaagcacattatcgccgtcaacaatcacattaactgcgtagcctggttgcggttgcagctttatgagatcagggtccgttgaaaggaaatcctgctgaaggcgaggctccaccgggttactcaagtcataggtgaatggctcaagtccgccataatcaagagacggagtagaaggagtcacgttaacagtcaccggaggtgattcgaacatctttttcatctccaacgaagtaaccaactgcatcataccattcattattctattatacaagttatactcaacacattcccaaactcctatataatattattaatattatatatatatatatatattattcttaggattatttactaataacatgactaaatttactatataaattttatctttagtaataccatttttagtaccatttgaggtattattggtgttattaatgtttttaatagtattattagtattatttggggttttactattagagctgttagtattagttgcattattaaagtttgtactatcggagttattagtactgtcacgttcattaaacggttctggatatgatttaaggtggaaggtgtgtttaagggtatcgttattatggtcagatgtgaaattgctggttaattttttagaatcggtgatagatataagcagagtaggttggtgatttgtgaagttgaatttggcaacttgaaagtatgaaatagtgtattcattcttgttttcaaatattacgtcttcgttgtcggtgattgaaattagtgaacatcctgaaggttgcaaaagctcgtaagtactcagtccatagtattggtagccgttcacagttagagtgcagtccgaagtctcttcaaacttaacattcaaaaccacattaatcattggattttgctcgtctaaatttaacgcatcttttaaaaacagttttttgacatccaataccaaatcactaatgttattaccaccaacgctattttcaggtgctgtgttaagttgagagcttcgatttgataaatttatggtagtagtgaggaaatcatggacccaacgtcctgcgaattttttataatgttgaaaagaatttgttaaataatttgataaactatttgaatattggttagaatagtgattagaaaagttggttggatggttagagtaatgaattgtaagtgtttcagggccagaggggccttcagttaattccaagtatttaaaatcgtatttaaaatcattcttccaaatcacagcatcgccattacatactttatccaattccataccattctctacataataccttgttgtaacattttctacagattcagccatatcgttaaggttgttggcgttactattactatcattggggtcattaacagtattatcagggttatgagaagtgttatcggtgtaaaaatatttgttatttttgcttttaatatcgaaatttacgtgattgtttttgagttttaggagatggaatttgtatgtaagagagtcagttagttgccagctgttttcagccctgaagtagtacaaactgcggtagctgtagtccttagcgacgtcagagtacatcacctgaagaagttcaggagactcgttcttagtacccaaaaccagacccactagtctggtgtgtgaccttatgggaaacagacgttcggaaccgtcaaacacattagagtaactgccgttatcgttgcatgttaacttgtaaaacagagcttctccgagctttgaaggcccagaaaaaaggctcctttggccaaggtcggaaatgtcaatcacacctgtagtcccactcacacatgacagttccgccaagattccaaatagcaaaacagccaaatacattataactacccatgaaaactgttgatttcaagttctacatcaaaattaacaatttttaaccattatatcgatggggattagaatatcattattttaacaattccatcaaaattttcttcataaaacgtttactaataatatttatattactaattatgtctatatatttgatgttatgaataaatacttagaaagtgtattgtatccttgggtgttaacgtcctttaactaagtataatgtaattatgtatgtttgatccattattttaaggtttagagtgattacgaaatacgtataaaatctgattttttagcccttccctctggtggcttccttatatcctcgtactcttgttcgtctatgatgtgccaattgttatcttgtttcttgtagtatttgtgagagtccaaaggatcatctagcataaggtgtaaaagtggcttatcgccgctcaaatcaatataaaatgttgtacatccaagtccatccttttcctggtaccagattaaccttttttcatcaaataacctagtcagtgcataccctgttttaggtgtatatataccaaacccctccttcttgttcacttctataataaacttttccttatcgacgttttgtatgtcacattctataggctcacaatcatttgtaatcacaaattcaacttcaggtttgcggttaaaaagtctagaaatccaattctgctcttttatatgttgtttaccaaatttaagctgctgtttatgctcttcaaatgacattttctcgtgaacaataacatttctcattgttactttgtcaataagagcttcaagttcagagtaaaaatcagcctcaggagaagtataccatttatctctttttataaaataatcgattttattctgaggttttggtcctggttccttgatttcagagtataacacctgtaagtaaatgtgactctggcccttgtagctgaatttagcatgtttaaacaattttttacccttttcatcgtcccagattttagcactcttatccataagctctttgacaacacagttcggtttgggttcataaaatgaagtttccaaaccatccatcaagtaaccgcttcgattgtagtcgctgttttcttgggtttcaaagactagggtaatgttacggagtctgttttcagactctttttctcctacaggtacttgtgagagaactttagctgcaaaacaaacacttttagttccagcccttaaagcagtattttgggttgcaatgtcttgtaactctcttatttgtttaaaaaactcttcatgactcaatgttatccatgtttgatctttcatataatgttttacctcatctgaagtcttactacaaaagcaatttttactctttagagtatagttaacctggaggaaaatgttactgttgttaaagtagtaaaaagtggccgactgaaaagtcttatcatcaccatatgactcccaaattcttacatctccatccctgagacagaggaccttaacaccaggccgtggctcatactttattccattcaaacccaagcttacaaacccatttactgtatagctgggctcaacagacgcctcatcacagtccaatgttatagttatcaatttagataataatttagcggcctcttgtgcctgaaattgtttttcagtttgtggtttaggtgatacagttgataacttggaaaacttagaattaataacagttgcttgagaagtattgattttttgttcaatttcaatgatttgacttgatttctgtgtgttgaagtatattttacatgttaatttattggtgttttggtcagttttgagtgtgatccctactgcgaggacctccaatttatctttattggaccacaaaactgagttaccaattacaatactttcgacgaggtaattgtcctcaatttggcacaacttatcagaaactccgtcaatacacttgtaccactcttcaccaagtttgagtaggtcaaatttcttaatgttttgggctaactggaagaaatttgagtcaaaaacaggtgaactcacggactgccatttgccatcctgacgaacataaaaccagtcaaataattcatggtttttagttgagtcggaatatgtaatttgagcctgcttcacctcattatccttcaaaactaacatcaaaagtgtaagtttctgtgagtttgtaaatttaatcgactcagtttctgacataacaatagatttaacatttttagggtgataagtgttaacaaatgtgtcaccaactttgacagttttagtaaacctcgtcaaacacttatcactcccaaagtcaaacacattacatagcgcactgttcaagcttattaacactattaataactttatcataataatttaaagcttaatttactcgtatttgagaatttttttatttaaaccatgagtttttgattaattttggtactattttacacttaatttaaagcttaatttagttgttttgagccttaatttggctataggccagtaatattttacagttaatttatgttatgttattgttgataaccgaaaattggtgttatatattaacaaaaatcattggaacaaaactagtatcaaaatgttaaatcttaaagcttaaacaaatctaaggtggaaacgggttagaagatacaaatgtgtacggaatccattggagaaaatgcaaaaaaacatgtgaaagttatggggatctaacattaactgaatttactcataaactctcaacacactttactattaccattgtaaattattcattcatatattaatctaacagattcttaacagaatcccaacacatacgttataatatattattatcatattataattatcatatacataatatattagtaaatggtattatcgccaaataattatcatacttttattatgttatattgataaaaattaagtcttgaggtaacgaaaaatcaattaaaaattaacaatgtgtggggaatggttttctaaaatgcaatcaaactacgacagcatgttaaacgaactccttacacaattgttggctgatttaaccactaaatttatttttttagaaatttctaaaattgcttattttgcatttttttaagattccatatagaatctactctacacatcataatctactatttcacttttattataaatttatttaatttgtaattttacacttttatttttttaatttacaataattcttctcaaatttaatccaaattatgtaaaattagttcaaataatactcttacaaatacttttaaattgttatataattatgtttgatactctaattatattgaaattaaataaacaaaatttacaaaattgaataattgtaaggataaagtttgtttaaaatcgagggatttttatgtttattaattttaatatttttttatctattttgatttgtgtgtatctcgatttattttttggctttaaatgttttaaattccaaatcttctcttattgtttagttattaggcgttctggacctctgtttaacaggaatgttttatcgtatattattaaatcgcataataaatttaactctttccccctgaaagtaaaattcgacgatgatattaagaagattgatttcccaattgagcgtgaagctcctttaaagaatgttcagatcccgccatgtactgagtctccttcagtatttctctatcataattatcattacctataatttacttggttattcacttctaacatagtaataatagccataatgattataataggggcgattgagtttactggtaaaaaagagcctgaagagccttacgtaccaagacactttacacaaaaggaaattgaagctgggatcgaagaattcaatgtgattttttatataccactctttaattattgattttatactattatttagttattaattccatagcattattcagtttattccgtaatattatttagttagcaatataattatttattataagtcttttaatattattttacaggttgaagctcggaaaaaatcaaagactcaacatatacgaatttcagatgtttgtctcttaactcactcagctacacattatttatttagttttacatattttactaaatttaaccaattacatacgatagtatctagaatcgtatatacttaaaccatatctggttatgttaaaaatcccatagtgtggaataaaaagttatggattcaagtttaaacaagttcaacctgttcgccatcataatgggaaggccttcacctttttctacgttcattctctccacaccgacgttattcctgttttcctcaatagccttagacgggtcgcaaaacgtcacctcggctctggtcgtatcactgctcttcgcatccctggtatggataacgagttttactcggttgtgggtcttcgtgaggacttctttgagcttgttcgtaacctccgaggcgttattttcaaaaacgtgcccaaaactgctacattcaccaatcctgttatcgctacattgaggctcaaaggaccaattatagccgttgcgggccatttaaaatttggtaatccccataatgaggatgatatcctctattctttacttagctttattcaatacaaattcttcacctacctttattcattactaacagttacttagttttatagttataccactattaacaatgttgataacattaataatactatttatatactaacaataatttacatccttacttatgtagtaataaatttgtagataataaaaaatcatccaaaactaaccctaacagtactgatgagtctactgataagaacgccgataatacggatgccaaagttgaaaatgcggaaaatgtgataaatgactatgtgtatgataaaaaatacactggtgagatagaagtgataaacaagaaccattacatttgttccctttcccagggctgttacttaacaatggacgtgaagattgagtacatttcgaattatgtaattcctgagcacgggcctgaatccctcaatcgcgacataactcctgacgggttcatccacttctgctcaagtgtcaatcccgtggaagtttttggcttcactggcgaacgtcgaggacttgatgagcagagcaccagcgagattgtaactcttgaggtccatactgatggttccgccacacctagagtagccctactcaaaagtgcaactttcctcctcaactggtttgatcgaactctttacgctttgaggactaatttaagtcgagacttctatgctctcaaaaaagaaaatatgttcaacacctcaccactcatgcttaaccatgaactgtatcaattatttaattattctttatatatatagttttagtttagttaatgataatatactttgttatatatatatatagtaatatatagttaaatacactcattaatgaagttagtctgtaacttcacgcctataatgtttagaaatcgtaacttaccttggaatccgtatttatcacctgaacaaagagttgctaacaaactgaagtggttttaccgaaaagacgttaagcgtcagtatcccatagaccccgattcgaagatggctaaggatgagcagaaggcggagtggaacagagttttggaggagcaaatggcgtatgagaggagaatccctccaatatttagtgacgatgaaacggactttgaggatgatattctcattaaggaggctgaagaacaggaggaaaaggataagaatccgcctgattgggtctttaaggatcccgtcggctttggaaacattggacaacacaacgtccttgcatttgacaatgaaccagaattgcttccagatgaaccatacaactgatttttacaaatttaactctacattatatactaaacactatattgtataccaaacactatattgtataataaacacattatatgcctaacacttatttgtagcatgtgaatagtatattattgaagtaatgtataaggttacaatgatccattcagccagcttgagatcacaggcataataattgtaaagaattgtgaaaacgggagcccatgtacatttccgtccaactctactaattttgaattcttcaacaagttattaattcttctagctccctaatacattggttatggagttactactaactttgtaggtatatactatataccataatttatgtaatttagttaattttaacaatgatttcacttaatcagaaaataataaaatagtattaaataatgagagggttatatatatttgtgtaatggactatgtattgaatactcggagtgtgacaagttcgtctccgtttgagtttagcatcagaattggtaagtcttgaggaatgtacgaaaggtgcttatggagatcaaaactagcccgaatcatcaagtgcaacattctgttcctagtctttttaggccagtaccaagggtcctaaaaattaattaatctttacataaatagtatatagtttatataaactgtaaaactaaaaccccggaatgggatggatagagttagttgtaatgggaataactatgatgacttaccctaaatctagtgtatgcatctagacagattgtattgtcgaaatagtcttccaatggattacctttttctggtacgaagaatgccaagattgagattacaaaactggccagtgtcttcaaaagagtattctgaattgctgcaaattcatacattcctgataaacatatcaatccatcaacaaatttagcattaactcgtgaaccactgttagaattattaccgtcagaattattgggagaattagagtttaggtgctgataataataattaacagcccttaaagctatgtttgatcccattgaataccctaataagtataacttagactcattgggttgttctgatgacttagttttcgatttaacaatttcgacaaattgtaaaacgtcgtgaacgtagtccataaaggttttaacataatatctaatattatttactgtttccgagcgtccatgagaggttaaatcaagaccgtaaacactgtatcccagggcgtttagggcttctgtaaagctattcccaagtataaaccgttcaccggtttctgagagtgccaacccgtcatgttgtctatattcaaagacgtcggagtgatttgagagtccgtcgtacagttgccgttccacatcaaaagtgggaacaacaacttcatccaccgccctaacctctgggagtaacttgaactgctcatacttgaggaaataatccttattgtaagtggcgaaatctgaacaaaagtgcccataagcaccgtggactaatactatggttcctttcgcatcaacaactgtcgatgaataagtttgaattctcagccccgatctattcacaaagctccccattactaaacgaaagggatttaacggttttagcatcttagcgctggggctactgggattcgaaactggggtagtgggatcagcaggtggactagggttacttagggtaaatgggttagtgaaattatcgggggtaaagagagagtaatattgttctggggtaatttgtgaccatttgcctttaaatggctttgtaaagtacatgacatcagttccctcacttcctctgaaatatacgccgagtagtttgtactcattatggtacgttagaacattcacaaatactacaaatttgttaggatcactattttcaactgcgttactactatcaacattagtattggtggtaccactggtagttttaaagactgtaaaattgccatcggtgatttcaacaacgttatagccgggttttggtgatatgcttttgcttacaactaatgtactcatgttaccacttgaagttcttttaaccgattgcttactagtggctgaattttctacactgttatctaagttttcattagcagcagcactgtcgggagtgttatcggtagttggtaataagttatcactaggcttataggaacaaccataggtttcaacgtcgaatttatcactcacatggtttaaatccaattttacagttaaaaatgagccgagaacgtctgggttgaaacctgagtttctaattgcgtctgagaattctaagcgtgtaattctgttccatgttaacggctccttcttaaagtaaagtgactccaaaccctcagatgaggatatctgtaaatgggccaaaactggtcttttgttcttatgaaacaccagcgcatttacgcatgagtcatacttattactgtcccagactgtgagaaaacagtcaactacctttgaaactctaaatgctggtttcggtgtaatgatgtaaaatggagcgttttccaacctgttaacaaagaaatacgaccgatttacgttcccggttagcctcagtttgacagatttgaatacataatagttactgacttggtggctgaagacttgggcgtacttatgcgaagtagttgaaacccacctgaaatactccttgtaaaagtacaggtattgtgtcgagttgttgctggtgacgacgagttcgacgaacttaattgcgccttgcctgaagtaacagcgcacaaattccgccaaatcttgggagtggcccttctgccagaaaacggtgtcctttagaaatactttccctacaactgcgcccctggaaggtgaataagtcaatagaaggaagtcgaacaacactgatttcctaacggtgaagtcgggagacttcagctggccgatgttcaaatccacaagacgaacatctgtgttggaaactgtaacttcagtttccttcttgcgttttcttctaaaaagaggcattttctaataataaattagttacatcgtgtgatcagcactacaattaacacgactagattctccacatcactttcatcaaatcattttcaaattcggtttaattataaatttacattattttacttttaaatcatataatttgcacacttttatgcatttttactggtttttcccatttacacagtccttacttagttttatacttaatgtgtatcagtttaatggcaaattactaatttttaattgctatttttactaaattatatttattctagtattaactatattatatagtatctttgttaagtggtattattggtttcatgattggtttccaacttatttagtatatctgctgcgatgtttgggttagttatcaactctgtattgtaaattgaggagtgttcctttgcgaagttaggttttgggtttccaaatttacctgtcagaaaatacaattcactgaaaaaatgggcatgaactgttctctgaccaaacttccttccgtcgagtactttccttgcttttgacgctgactcgactgttgagaagagcacaaaggctgaaccgacacttgttgggtcaaaagccttcatctcctcttcggtcagaccttttggcactcttggtaactcaactctcagaaccactccataaagctcacattcacatctgacgtcgtcaatgatgtctacatactcttcatcatcctcaagttcatctttcgagacgaggtttgataacaaaagaactcttgttggtatttctgccctcattaaactacaatttgcaagctgagttttaatttgctgaggtgaaataatcccctgagtaacagcgtcaatggctagaatcactcgatatccttgtttcggaagggattctaaagctgtcttctggtcttccaaattttcatactcaaacaatacaaccatttctcccttctctacaatagtcataagttgatatatatatataacataaataacggttatataattaaaattttctatacccatgatgaaatttgtgaatttgatagttccatgtaatcgtaatgtatctacaacagtttgttggtcagtatcctttggtattcctactaagcacaaacgatcagttattggtttagccttttccgctgcaagtatatctgatgctgctgcgatttgttcctttgcgctcttgagtgcttgaactcccatggcaagtagtgatgggtcaagtgttggcacagttggactaggcgcctttgagaatacgtcagcgtcgaatgtctttggacggttcacctttatgttgtggcccatgatgttcaaacccgttagttgcatacagttactggcctcctccattgttctcagctcaatgaaggcgtagtggccatcagaactgatccagcccttaaggcaaggattcccaggcatactagtcccattcactgatatcaatgcctggtttattatatccatcaaaatctcaatatcacccactggtggaatattaccaatataaatctccctaaacgctttagaaccaagtccctccaatcctaacacaaaattacactactactatagtatagtgtttagtataggtaaaatttggggaaaataatcaaaatgtgtaaaatacactaaataatgtatatacaacagtgaatttaagtaaagattgaaacctgactgcgctgcatagttggccaatccaaattgttttttagcatcaagtttgggtggtgaatcaaatctataattccttctactacttctctctcttgatctacttctccaatccctggacctactccttctatctcttgatcgacttcgtctatctcttgacctgtatcttctatctctatctctacttctatctcttcgatccctctctttactcaaggaatctcgtttgtatttgtgtctactgcgtgacttactacgtgatttattccttttcatattctagcgcctgtttcacatatcaattaataattattattctggattattctactgccaccgataccaaataaggtatcaacacaaatactataatataacaatactacaataaaataatattaggatataataaatattagtttatgttgtatattgtgtaaagaaatgtagaaagggaattaattactgaatggggagagtagatggaagagttgtgataaatccacaacgctatatgaatttttaagctgtaatgttttaactcgattacagagaatttctctctccttctggtagtccaatgtgtagtagcgcagatacgggattgcctccattagtcctatgatgtgctgcgcgcacagccttagggctgagcttgctctcactgcgcttcctctcgtcacttcatcaataacttcatcaaatgttcgtacttctccgaatggctcatcatacaatattgtcaacttcccatcaagatcaatcatcacattcaccaaattttcctcattttcctctgtattattagcagcagcactggtctgtgtagtattattcgtctcggtatcttttagaggattatttaatttgccctccagcatatacaccaaataatcgtaatacatctacacaatttttagtactatttaactactataatgttattattattgttaaatatataaatttaactggttaacagttgttaatcgtatatagttaagtgaggttagatacgtagactttgtttgatgtgaaaatggtttgcatagagtcgttagattgacacgttggttgtgggcatctgtcaacatctcctacagtcaatattacatcactattagaaactaattaactataaataaattttataaagaattggtaaaaaatgaattaaaaggtgagatgaacaaactgaagcaaggcattacctagagttacgttgagtgtggtaacattacagatgttacagactctaatacagaaagatgattgcactgttaattcgtataacaaacggtcaacccaattcctcaataaatgtaacggtaaccacctcagacaatgattacacttaaaatactacaacatttttcacagagtcatttagaaatacggattaaccaataatataccagactaattaataactaaaattagtaaagcagtgtggtaataatactttgaggaagaaactgggtagaactgggccgttacaatgttgacatgataattgagaatttatctccacctataacattttccaaggagttatctactaactgataactaattgaaaataaataatttaaataaataactaattgaaaataaataatttaaataaataactagttgataaaaattaaaaaactaaagactattatggtaatacgtctctgtagttctcgtgtgatcttttgattagagataaaactttagattcttgttcataattgtactcctgtgtaacggctatgctcttttcgatttgtaaacacctggaaagccgttgtatatctgtaccctcaattatactacacaaacgtaatattggaggtaacagctgctgttgtttgtagtaacttatgtcaacctccaacccattctccattacttcattatagctaaacgctctgaaactcaaactaccaccaatattaccactactattaacattattttcagcactattatccttgtcactagtggtattcgtgtggaacttagttgctgacgatttggtgcatatgatatatgaaatttcatgtcctgttgaataatttccaagccctttttcatttagtcttagagccacagagacgtgtggtaagttttgcacatcgctatactcttttgggttcttcgtcagctgcttcgttatcaaaaacttactcaattcaattctataacatttgttacaattgttttctgtagaatggggtatttatctagtatatcagaataaagctggtgtaaatgttatgtagttgtcctgtgggaataattaactaaagcagtggtaagaacatacgattgattattgagttgttcgttgagattaataagcgttgagtgtatttcttgtacaattccgtcgactccgtcgtagtaatttgagtttaaaataatgttaagcaatttgtttccaatttcctaaaattttaaattaatttatgtgttgagcactacctttgttagaagtgaccagtcacgacgaataaaatccaacccctttatctctctctcaaattgtccactcccatagtcgaccacctataatcattattatgctaaaggtaagggtacagataattttagtgaaaaataaataccaattagtttgacaaaataaacaactaaaatgtgtaactagtgtaaaaaatactttgagtgatgcgtatttcttctttttgagtagcagcaagcgtgtgaaaacagcgtctatgccgatttccaactttttgtgtgatttgttaatgaaagtgacaaggttattagcaagttggtttgctgcattgtaatttgttagattcccatcatcccggatgttcgtgtttatcatcaaagaatctgtgtcaccataaattacttgtaaattaaacacattctccaccttctccttagtgctcctcaataactcacgacctaaaagttataactagtaggggatatttaattagagaatgcagtatttaaatataattaacataaaacaattacaaataataaataactgtgtaaataagtggtgaaatgaggaatagggtaattgcctgcacgcgacgcagtacctagtttagtaatgtaagaagcgatatatttgcaatgaaatcttgaaaaattacttcccaagcagccgtaaatagaatttgcgataagtttcaacgccagttgtcttgttgaaagctggactcttctggtctcgttcttctcgcctttaatgatattcttgatattaagacgtagttcaactagacgtttaagaatcgatgggaggactccaacgttgtccaggatcacgacgctttcctcgccatttgcaactgttgtcgtaaagcaaatgttatattcctggattatcgacgggtacaaggagttgaaatcaagcaacaggatgaagttatcgtacaaacccgatattggctcaaacaccaaccctccctcataactcttcgtatcatccactacaatcatattacccctcacgaaatcagtaatagtaatagtatagtaagatagtagtaattttggaagcaaataacaaaagacgatgagtaaaatgtatatagaagtaaaagcctagtgtggtaatactttgctctttaaatttgttgaagacgttatcgagaatgtacttattgcgatagaactcgtgcattaacaaaaaatcaatcctctcagacctaatcattttataatcatccttcactggttaattaatactatgctagtaataatagtactgctatgtaataactaaactcttttagttggaccaagcaccgtaactcattacctggcacattgtatacttcttgaccaagtgtttccagcgattattgtcaattctttcgtcaatggtaatatctgaaaactgtaatgctgttaacttttacctgaagtttaaacagaagttgtagtatatgtttagaggccaatagatttgaatgcactagtttaagcaagtgcttaatcgagtctggtttaccaaaaaggttttggatttcagtcatgctaaatgctgacctgctataaaaattcagatctccaacattctttatctccaatatgtcattcacacacgttatcaaattgtaattttcctaataaattatacactactagcacagttaaatgtatagagaattgagtgtaactaagtaaataagtcctcaggggtaaaaagtaaataacaatgtgttacgcagtaccttagagggatttaattctttggttagcaatcttgtatcacaaaataatctcccaaaaagtattggtgaatgtgatttcttgaccagtttgagccttgaaagtgataatctcaatggaatattgagtaaattacaacgtttcaccagtagatcaacacagttctgatgaatgtcatgtccaatcaccacgtcgggatcgattccctaaacacaattgatcacaaccattataggtcaaatattcaactaatgtaaataactagttaagtgagaagtagcgggaattgtctgcatgcaacacagtaccctgaggtagttcatgaaataagccaatagtcctctttcttgttcgaaaatacggaaatagttccttttttcaaggaaatgtttgagttcatttggccattggagattctgaggcttcctaataccaataaactgataattatccttcatcgcagtctcatcaatgttatacttattatacacacaacttattataaacacctacacaacattgttaagccaaatgactatactattatctataccagtactatttaaatagtaaataacactaaaataatgttagtatttatagggggaatcatcaatgttacgtacctcttgatgagttggtgtggtgaaaagcgttttgattgagattgaaagaatgttaagtttgggtgtgaaaagctcttcattgtttttagagtgccagagttgcacatttttgtgtgagtcaatctcaatctcaaccttacaatatgataaactatcagttgatttctggtaatcagttagtctcaaccacgttgggccctttatcctcctcttcaactataccaatattattagaaaattggacataaaataaataaagaaaggctttagagcaaataactgcgtaaattatgttggatgaagttctctagagggataactagttgtgaccaagcactgtaacgcagtaccagaaataattccacttgtgtagaatggttgtgataaacatcctcataaaactttccgcttagatgttgtttgtttaaaatttgaaattggaacgggtaacaaactttaatgtaaaattctggcttagttgggccataggtaagtagtgatctcttgacaagtttatatttaattttcttgatcccatagtcttttcttatgacttcaaactcgttgaaaaagttcatcattaagtgacgttcatagagtgggtcactgcttttaattactccatcagaggctgtctcaacaacctctcccaactcattaaacagcaagtccatccttggcttaaagaacaacgaacgatacatgttcttaacagttaccatacaactttcggtatcagttccactagtacgaattcgaccaaataactgtaaatatcctccatcttcacataaatccaataaataaaacgccaaatcctcactcaacgtcaatgcatcaggttctaaatatatgtgacagagttcgctcagatataggttttatatataaatagctatatttactatgtgtatctgtataaagtttcttacgagtatattgaggtggagattgtcctgaatcgataactacatcttcatccatttcaacttctctaaaactttccaatatggccgaatctatcttaggttcctcaaccatttcctgtgctcatcattatactcagtcagggaaaattatatattaactaacattaatagttaactgtataaattttacttgagattgatgaacgagtgcgattcctggttgataagctttgaataaattttccggtaaatgtgcttcagctgatgcttgcattagtgcttgtgataggtaacttggttgtgtatacatttgtggagttacaaactgattctgtaacacagttggccctaaatcattagtatcattgtcaagttcctcctcaaactttgtcaatcgttccaacagagccttgtctgtttctgtaggttttggttggtggtacgaaagactgtcctgagcagccatctcaataaagtgttgttggatagatttcccatgaggaacacctttagaagccttccgccccaatcgctctacttgttcctctaacaactccaaatcctcctcatcgtcactgtaatctacaaatcaaataaaactgtgaataatgcgataattataaaatatcataattaatggcaattttaattgaataatatgaaataaatgtgaaaataatgtaaatattgtaaagaatgtgtaaggaagtagcgggaatcaaatgaaggaattcagtaccaggcccttctataaaatcttcaagttttcttttcctgttcctctcattaaattcctcctcagttattatctcgtagatctgatcgttctcatcttccacctataccatcaccatcagaattctaacaccaactggatacttagatgtatgttatcccatttgaataatttatgaaaaaataactcaaattttggtaaaaataattaaaagataattaaggataaaaaatgtgtaaatggaagaataaatacttgatattcatcgattaggtttgccttcccttctctctggtttcttaatttcgaaagggctgattcgatcacatttttcttgttttttaccatatcatctattatacacttttattatactatttatcagacttgcgttgcactataacactatctcaacacaattattaatattacacctatgaataatatcattaatacatattataataatttatgatattattttcagatgcgttaattgatttctctcttattgaatattacaaatgtgatatagccgtctgaggaggatgttgcgcagatgtaaccgtcgggagaccaggatatatctgtgattgggcagaggtgtagattcttcagcaccgcaattggtcctgacttttcatttgtatcataaaagcacaacgacccatcaattgtccccgcggcaaatatatatctcggcagactaagttcttcctctaaatccgtatcatattcctcatccaactccagttcactttttacattattggtttcagtagttgtgtgtttgtgtttattggatttgtgtttaatacgcttaattttaggcttgattatttcattattataaattggtattatactctttctcacttttcttaaattatatcttttatctattatgtcaccggcattattgttatcttcattgccgttatctgtgtcatcgttaactgtattgttgttttcaactgtgttatcttcagttgcattgtcgtcaaccacgtcagccatattgtcaactgttttaccatcgccattatcattagtaacgtcatactgttgattttccattagctggtcttctacaacattaatatgatcttggacatctgtttccacttcaccaacatccagttccatcaattcatcggtgtactcattcacactattaatatcatcgttattagtggtatcgccgttattagttgtatcatcaacgttagctccgtcttcattgtcgtatggtattaattccgtaagttccgttgagtttgttgattgggaattatcatacatttcttcatcgtcttccaatctcacaagattgtcgacattaccaatatccacgacattcatagtatcaagattggtcgtatcagcaacatggttcacatcctcgatgttgttgatggtattatccacagtgtcaatatcgttagtggtatcatccatgttttcaacattattaacaatgttatccacagtattagtaacatccagggtatcgttagtactattgtgcaatgtgaagaaggagtcgattttggcgaaattcagtatagatgatttttcttgtttttccaactttttcttaattggtttcatcttattccttgctgagttcatgagtaggttgaagaagttttgttttttcttgtcaaatacagagaaatttattggacagaatttgacaactacaaacggccctgtgggtgactggtgtgttagcattgggatcccaaaattcaacagcttccgatggaaaatatacaaagtgtacgacgtggtttgtgaagcgtcagacgagttatcatctaaagtggtgttacgatcatgtcttatccctgccggagttaccaatagacgtccgtcaggcgaccagtcaagtctcctgaaaaacgtcttcaactcttctgacataaacacgtaacgaccgtatttcctcaattccaaattattctccaattcactcacctataaatttttatagagttatctactaactatatacttaactatatataaatgatagataatttgatactgggatgagatcaccacgatcccttgcagccttgagtactagtacattcttccagcccttctgatttcttctcttccatactcttaatctatacaatattattacgtgtcagatgtataaatataatgtattgagttaactgtttaactatgtgtaagatgtcggggtaatagtatgatacgattgatcagatcccatggaagctaagagttcgtttttgggatcaatggagacaccctgtgcgaagttcgagtgtccatcaaagtatctaattttaccaggtccttcaatttgagtgtcaaccagggacacatgaccgtcctcagtggatacagataacactctatcgtcaggacaccaacatattgtattcaccacattcgataatctatacactatttattaaagttaatagtatatatctaagtatcagtgtaaataaggtaatagcgagtgtgtaaaaaggtgtgtaacctgaaatagtgagttttggcccagtactcttcataatcgtattgtgtatcttcgttgaggttacttggtttgttgctcttcatccataaaaatatacaacgatctataataatattaaaaccaaggtaaaataactgtaaaatagttaaatgggtaaataagtgaagaaattgtataaaatgcgatcaacataccttcaccgccagaagctaaaatgtgaccagaatttgaccatctcacagaattaacttcgccaatatggccaaccaaacgagctaagattttgatggagagtggctgttcaaagtcagctttctcaccagagccttcaacgctcttcacgtaacgggtatactggggagcgtcgtcgtgaatagttatctgccatatatggacaaattcatctgctccgcccgttgctagtcttaatactattacattgtccgaattattacttatattagtgtttttgcttaaatttgtagtattagttgtatccgtgttactagtagttgcattggtggtattatttacagtattttctgaactagtagttacattcgtattattattcgtgttattctctaaattatgtacattattttccacatttggtacaccagcggtattagaatttatgttatccgtgttgtgatttatgctacttatattattggttaagttagtatccgtgtgagtattatttttgaggttttctgtagccgtttgggcgttattatttagatgtgtaacgggttggaagtgtatggaataaatacgatcacagcgtttgttatccttgctatgccacaatatttgaggtaaaaatactttaggcattattaaataagtaaattaataaaactcaaataataaccatacggaaagtaatttttatttttacctttgcttctacacattttagttgggctgttttatgattctacgacatacgcttctgttcacctccatatctttaattctgtaaaatatgtatagaaatgttatcaataatttaaaaacagttaaactaaattataatttaaataaattaaataatgtcagaaacgtgagaaattatgtaaatgttgccagaattggtaattttcctaacaaaaagattctagtaaggtttgttaaggttggattagtatctgttctcttcggatccttcggatatatcggattcaacttcgctcctatccctcttaatcatgtatcaacttcattaccaattactttactcagttatatacagttaacacacttaataactttcttttataactttttatcatatttttatagatagatgaggaaacttttgacagtaaggatgatttggtggttgtaatattgaaaaataagaggagttactctaaagagcaaattgagcgtctaaaatcagttcttcccaaacatataagcctgttttacacactaaagtaacttttatttagtttatttattgtttagaaaatcaaacactgggatgagtgtgatgttatataagggaatgaggaaaaagtactaccaaacactgaacttgttggatgaaaaagctcttaacgaattctcttcagacgttaaactcttttttcaaccacaatctcaagaaattgatacaattaataatgattctataccacaatttgttacttacgactctttcaaccaggatgtaatacactattattcatactagttatgtattgtgtttgtatcaaattttgacattaatttccagaattactaaatttatacaattatttatggacagagctgtagaatgtgtgtaggtaattgaggaatctaaacgagcgccgatattggtgcaattatttgaagagaattgcttcctttgttttttactacgtccttttataaattcagtcaataaacacctgatttcaacaaataatcctttacgaattaaacgtttaaacatcgagttaaatgactttcctgagggctgtcctgtcactagggccacgccaacttttgtgtattatgatggcaatcccaatggtactaaatgggatgaatttaaacctaaagatttctctgaaaaactttttaaggtatccgttactgtgcttgtacacactgcacataacttagttattcactacttagttatcgcctcctggggacttagttatacattccttacactggttatatagtataactatataatatatctgattgtatataatttggtgcagacaactatgatggatgaggatagtaaaaagtatatagaggagttggcagagaagatccccgagcgttttatgttatttggtaaacttgcactttggttatctgaatcgcaaaagatgcaagagttaatctttaaatcgcagtcagaagacttcgaattatccagtgatgaagtaattttacgcatttttaatttttctttaggatttatacaacaaatccatcagccttctcatggatattgtaatctaaaaataatagttacatattctttaccctagatatataatagttattatagttatggtatattttatgtgtttttcattaggatatgaagagaagtgatgatttggaggagaatttggagaatttgaagactgaaattgaatctgctgaaaaagactgtctcgcaatcgcacagctcttagcactagatgtcattaagtcagaatctaatctcatcacataaaatactcacacactctcagatatgaattaaatatacacaatcattccataactatactaataactaaagttgagaagtatgtactagtaaatattaagttaaagtagtatatttattaacttgttaaggttgagttgaaaatgttgtgattggaactcgagaggtgattgggagttttctaggcaaacagtttttaaaggttgttttagcttgatgaggtcattggctcgtttaaattcagtgtaaattgactgccacattttaattttaaaggggttgacatttttcttactcagcgggcacttgacaatcaacgacccattcacgttctcagtaatttcattactgtatatgtcaattgtactgcatttcttccctccgttgaatcgatcctgagcgtaaaattcaaagaacccgaataacaagtccactacatcctcttcattcttaccaatgtaatcacatttcatctttatgtcactgaacacgggttagtggggttggttgaaattgtaaaataccttggatcagttaaaaaattatattcagcttcatcgcttatttcaatgtctctataacattatatacaacactatcaataagagtaactaatattaatatatagttgaatatgtggtaacttgaagggtggaataatgggtggcgtggtgttttgtaggaaatagaatagttggagtatgagtgtgtatgaggacatggtgccttgtgctcggttattgattttgcgggatgttgcccagtactttataaaacgtcctaggagaactactctctcatctagtctagacatagccttaacatactcagaattagccagggctattgtattatttatgcttatgtcacaaatactattctcctccttatcaaacaactataaaaatatcacactaatactaatagtgggtataattagatagggtataaagatgagtaataatgagtaacgaaaccttgacgatgggaactctggctgagatgatggagattttggaaattatgctactgttggataaacaagatttgatctaaatcagtaaataatttgtaattaagagtaccaagttaagttttgagagcatatatcttttagagtcacagtttggtatcactaaacataaatctatatcacttcctctagtcctacataaaaagttattacttagaaaagtataactatataccaagactatatataaatagtgtaaagtgtaaaactaagtccccggagagagtagagggaataattagtgatgcagtaccatagaccattatcgcaggagccaaaagtgtgtaaagtgccattaattgaagattcaattaaaggtttgagatagtccattaaactccgtttcttctcaaattgctcggcagtcggacataaaacctcactatccaacactttccagtcccatttccactcactcatatacagactaaacagattattatagagttagaagttattatatataattcagtagaaaataataactagcagtaacaggtaataggggaatttaagctaattactaaataatagttaacgtatagtaaaatacgtgttagaaagaggattagatcgatttgtatcaagattccaaatatttaaagaataatcatgacataatttatcatataatgataattcacttttattcattaatcctaaacataatttttaatcaaaatatgggtaaataaagttataaatgtagtgtataacctcttgaattccataagtccaaaatcagtgaaataaagtgagaagtgtttattaaacccttgtactgacagttgttgagaactgtgtaaaggagtctcagcttattattgagtgaaactttggtattcttggaatagtttaactcgatcagaagatcaattattttatttttacctccaaattctattacattaccaactttatcagtatttacagcagtaacatagttgcgataaggtatattacacagtttattaaaacaatttaaacttttaaaacagttccttaacataattttatagacaaatatgataaattaagtttgtaacgtaaaattttgtatttaaaatcattttcgggaaaaaaattaaaataaaataaaaattaaatttttaaaaagatatttaaatccacacaattaactccttaacataactataaaataatatacaaataaagaattataatacatagaaataataagtggtatgaatatgtagcaataataatagtgttgatggtgggataaattaatttttttgatggaatctgatatgattagataaaaataatttttaaacaacaataataatgtatatgtgtagaggaatgggtatggaatctttttagaatcttgcccatggggtttctaacacatttttaaatttacattccttaatcaaattctattaattatatgttctcatatgttgtaatataatattgtgataattgtctagatatttctgccctcgtataatgataataataataataaatctatgttgtgtaggatgaatttgtttatattcttttattttctgaattttatttattccatccacgcccttggtgttttctacaaacgctccgaaattttaatacctaaaatttccaacttttccttcacaccctttaaacttttcctcaataacaataacaaaggcttctcattcattaataaaattcccaaccacttctccaacacctctagattagtcgacttaaataactcattcaactcttccgaggcactaacctatggaaagaataagaatgtgtgttcaaaggccaaggagatagtattgagtgatgattgccgtaatagtttattgaatggcattcttaaggtcgcagacactgtgcgtgtgactttgggtccaagggggagaaacatactactggaaaaggaatttggttcccctataatagtcaatgacggtgtcacaattgctcgtaatattgagttaagtgaccgtaagatgaacgcgggagcgaagttgatccaagagattgcgagtagttctgatgacagggccggtgacgggacaacttccactgctattttagcggctgaaatcgcctccaagggtgtacagtacgtaaacgagggtcacaactcaatccctctccaaaagggtattcagaaggctggaaaactcatcattgaggagattaagcagcttagtaagcctgtggctggttataatgacctcctaaacgttggtacagttgcaacaagtggcaacgttgtcatgggccaagtcatagccaaggcttttgacaaactcggtggtaacgctgctgtagttttagaagataatcctgcacttgaagatgaattagacttcactgaaggttataccttcgatcgtggtttcgctaatccatactttttgctaggtaacgctttacggtgtttgtatcctcaggggacttagttatcccctactgtttactcagttatatattctattcatcataatctaatcaattattcgataattttacttaattatagatagtaattactgattttgatttaggagaggagaaggagagtatagaatggagtaatcctcatatcttagtgtatgacggcaagattgagaatgcgcagagcgtgttaaacatcttggaattcgccgctaagaataaagtcaacctcttaatcatcgctgaagattatggcactgatgccatgcaaaccttcatcatcaataaaatgcgtggaatgctcaaaattgtatgacacctagttttaccaattttacactatttttacaattatttacattacaagtgctagattaaatccccatttctaaataaaaatcttaggcggctgtgaaatcaccaagttttggtgagaggaggaaggattacttgcaggacattgcagttgccactggtgcaacttttgtgtcaagcgatgtcggggttgatttgaatgacataactccagaaatgcttggacacgctaagaatgttgttattaagaaggacaggacctcaattgttaccaatcctgaagttttgcctcaaattaagaacaggtttgttacggcgcttgtaccactacttagttacttagttatcccctgaattcgttcatttactcatttaaaattagctattattaccaacctctgactgtatgttgtagaataaacagcttaatccgtgagaaggagatgtgtacaagtagctatgacaagactaagctgtctgagaggatagcagctttgagtggtggcattgctcgaattaggatcggagcagccactgagactgagttgaaggagaagcgtctgagatatgaagacgcaatcaacgcagtcagagctgcaatggaaacaggttacgtaccaggaggaggagttacgtacttacaaatgcaaaatccagagtttaccagaaaacttatggagtatattaaaaacaccgttgataaggagctgagcgaactaacccctcttgatacttccactgatgctggagccactcctgttccatccggtattcttagttcaacaaatttaaccatatttaacacagttttacagttacaatagttacaatgtttatgataatgtgggtgttaacaattggtgtagaatttgacaaattggatagtcaagaagagatggaaagtgagatagagttacagcaagctggagccaagattgtcttggattcaatgtcaattattaccaaacaaattgccaacaatgcaggtactggaactactaaactagatttacagatattttacactagatctattctagattattagtataatattagtatacaaacccccctctggttaactatgtaataatgtgtaggagtggatggtgagaaggtcgtagagcgtatattgaagagtggaaagccgtttggctatggatggaacgctaagactaattcgtacggggacatgataaaacagggtgttattgatccaagcaaggtggtgatgtcagcagtagagcacagcacttcagtggcaggactactgctaaccacagagggaatgatggttgaaaaagaggaaaacaaacccaaggaagaggaaatgccggcgaataatttttaaccaatgtagcaaatattaattacctccatatatatatacatagtatataatacatgtaggatttggaatatgtatatagtatacagtatatagtatgggtatacgtaaagtggtaagtagtaaattaatttgagtttaagagtgagtgtatttgttcataattgaagtaaagctgtaataaacaattcttttgattaattaagagtttaaagtagttaaatggctcattaatgaataaaactgagttatacttaactttttccaggtgtattaattttaaacttaatttgttaattttatggtcacataggattacgtatagtagtattgtatcatgaagtccaatactgacaacgtagtaacatccgtcgttacaaagacaattactgttggttttaaatggttttaactcagaagtgaaaaaatcgggtgagtaaaccactgtaaaatttaagtctaaaatgttagaattacatataaatatctcatcaaactgtgctttttcctccaataccaatgaatcaagccttggaggagttaacttattatacaaatccacaagtgatgttatgtatacatgacccaaattagtactcaatatcagaaattgttgtaaagtatttacacacttaccagataccattgtagaattactactattaactccatttgcaatctcagtgttatctccatttacactgctatcgatgccatctccattattagtaccatcagtagtattattagagtcataacgatatagaccaaaattatataatgaatattggttatattgtttatttgttagaataatgttagttattgacccatgaactttgatgttaaatgacttaatgagttgaaatttcaagtctaatccaagtaaaaagagctcaaacttcacactattcaatcctcggtgtgttacacataaataatcacaaatgacactgtaattgtcataacactctcttggagtagaagtggtatcagaattttggttagtttctataggtggtgggaactgaattataagtaaatcaaagacatttttcactaaattaagggggaaaacatttattttattcattaatctcatgtagtaaactacgtcatgggaggagttagatggcgtttggagttgtacaagtagaattgatgtgtattttgaggagtaaactgacttccagattctctgtacaaagttcttcttaatgaatttaagctcctcatcgagtgggaatgggaacaagtaccaaattaactttttaacaggtagttcaaatttatgtacgaaaaaataatcaaataactcaaaattctcaatttcataaaaaaataagtaaactgaaccatcggcacatcctatagcaactatattcggtaaccttggatgacattccatatacactatcgtactcttcaacttactcctataccttgttatcctattaagattgttaattttatccagggtgttattgtttggagggtttagggtgttagtgtaaagagcgttagagatgttgtttacagtgttagaagattgtacagaggtgtcatgggaatcaatgagtgcgataaaattatcagaagaagttagtaaaaagttaggttgaagttgagaattagttattttaccaaattccatcataattcttcataatatccagttcttcatagaaaatttattatcattccctactaatattagtaaaattaagtgttttaagataaattattaatagtattttacaatttttaattttttagctaaaattaagccatattttgcgtataatctggtcttcaataattaggaccaaatccagctattttacaatttaaaaattaaaaaaatatttaaaaaattaaaaatacaagttaaaattaaaataatggtttaaaatcttattaaaaatagtttgaaaaattaaaataattgaaattgtgtcatctgtgtttggatttggaatcgaggaatttgataaattgcaacttcttctttttagattctagagagtttggaactgagattgtagagctggttttgacagagcctttggaaaatatatcgtcgttacccacgagtctcttgaagtgtgatctcagcttcttggactctgttataaaggttattttcttagtttcttccaaatcttcagctgttggcttaagaagtggaagtgagaaattagtgtgtttttccttttctaataactttttttgggttcgaaaccgtcttctaagagcacaatttgctaaatacgaatctttacttcgggattcactcaagtcttccaaatactctatttgtttcctatcatcaattaactcatttgtatcattacggacatcattttgaacctcctcagtcaccggtttagctataacatcaactataaattaagtaataaataggtgtaaattaactatatgaagaaaagttgtatacttagtacctatatgggtttgtgtttcttcagctctcttttctaaaatgtatagagcattatctctcatttcattatctttaccaacagtaattacatcctctcgagactcatctctaagctcaatcttcttcctaacaccttctttgcaaatgtaatccgtatgttcagggtcagtttgtatcacaattggtctgaaacatttgaagcaggacattttaaaggcgtaaatgtcggtggtatagtactttccaacacacttcttctcagcgtcaaatctgacaccttttgcgatatatgcgccacaatccaggcaaataaccttaaaaggcatctcgaaccggataatagggcctcttctttcaccatatccatctcttctattgctaaaccgtcgttttttaaactttttgccaacatcttcctgatctggcggaaagtaaaaattatccgctctcgcggcctttaaagtactcatctcaactcttttctactatatattatacatattctactattttacattattttacaaatatatacataatgaagagtaagtttgtagtgaaaaaaattgtgttcattcacaaaaataattttataattttatgtgaaaatgaaacttttaatagaaaaatttgaaattttattaaaactgaaaagatttccaaatcgtaaatttttcagctccctcaactcaactaataccgtgaataaacctgaggataataaagtgttaagatcaatttcaggcaaattgagtttaatttctgaggattccactggaaatttttattcaaatattgtaaataactccttatcattacaaaatacttccaatttccaaattttactcgaaaactcctctattccttccctaaaattagataaaaatcataatattccttctcaaaatgatcttcaaaattacaattttgactctcatgaactagataaaaagaataattctcaacctgtcccactagaggaaaatattgatgttgaaacttttaagggttatttattaataccaccaattggtattaaaagttatttcacctcaaggtacctttaattttctgaaaataattaatttttaggcctgaaaaagtttattttggagctgatattctatttaaggaatatgttcctggctcgcttttagctcataattacccctttaaaactcttcctctgcaatactccagacggattaactctgatatttacgttaacacttatactgctgatgagaggaactttaaagttgtcggaggtagaagagtaaaattgagtctaaatcctggcctcaaagtacaaaattcctatcccttacttcataaagtttccggtaagattactcttttattcgttttttccggtgatttacccaattctcagtataaatctatccaaaattggttcaaccaattaaatctccacaatcataacatcaatattatcacggtaatttactaatagtatagttaatatggttaattactataattagttttaactatatttactaaattttatttaattttttagctattaaactcaagacaaaatatgttactgactcgagtgtataagagatatttggagactcttgctaggataatagttgaggaaaccactttcatgtcagtggttgggaaattaaacactgagtctatcataagtttgcaccaatatagaccacaactgccttcagtgctcttaattgactctaaaggatatattcgatggcattgtgtaggattaccaaccagtgaagccattactatacttcacaactcaatacaagatttaaccaaataatctatttcacattatattcacacataaacgtatgtgtttactgatatacttatatagtatacataaatggatctaagtaagatattatttgggttgtggtagtgcgctttgtaactgttgtctggattggtttttgacagtttcatcaactgagagaacaaggcaagctgcttcagtagctgagtaaattgagttttttttcaccaaactcggctcccaaatacaagccttgtatgcgttacatacacttcccttgtaacaatctattccataccaactctcctcattattcacctttatctctataaacgaattagaaacagttatctaattaatgtggaaggggttggatagtgctaaataatttaagataaataggtgtaaatctgggtaaattatagatagaagtccccggtttaaagaacgtaaagcagtacctccattgactatttccaattgattgtatttatttcttagtatcgataataaatcatttgaattgtagccggaattagtggctaaattccttggaatacactccaatgcctttgcaaacccgttcattattatgtgcctcttacccaccagactcttattcaccccagtaactccattaacatgatttacggagttaacgcagttaacatggttgacagagtctgtgggattaatagtgttgagagaatagtggaggagataagttgagagcaacatctcaatggcaccagctccgggaaggatagtattacatttagttgctcttctgacaatcataatcgcgtcatggagtgaacgttcagattcatcaatgaactgctgacctccacctctcaacacaattgtacaggtttttgcactcttgcaatctgtgaacatattgtaacgttcagacccaatttgcacttcctcaaacacaccacaagttcctaataaaccattataaaattatatttaaaaagtggaatacaataaataaaacatgtaaatctagtgtaaatgatgaatagaatccaggatgggataaataagtgaacactaaagtataaataactagtaggctgagtagattgtagcaggaattgactgcaagcaacgcagtacctaagacgtcaactgaaaggttattgagagtggtttgaatagaagcaccagtagctttactcgttcttataagatcattttcatcaacccggccggcacaaaatacatttttatctaaggaaaattattaatattgtacgggatataagtaatctagaataaatttgtataactaagttcccgtgggggagtacaagctgcgtaaatacctgcaaagtattgtgttgctaaatcaccaattggcaatttagataaaactacattagcaccgagtttcactgcattctcaagcttctcaaatattatcctatactcggcatctattatcttctgatattcctacaaccatattaccaccatactaaccatataactacactgtgttaagtatatgaatactgtactgtgtagctagataacaattgtgtttacttgtggattattgataacaatttctgcgttttctttttcggatttgagttccaattccaaattaagtaataaaatctttggattgacgaatttctttggctgttgttcagccccagcgtagctgaaagttttcttgaatgctacacccttgactaggagtgagtcctcacaggaaccaccagtgacttttttaacaccaatcatatcctcatccaagtcctcatccaaagtagccactgcctccacaaccatcttggcaaaaaaggttttataaccagacaataactttgaattaaaagtagtttcagcacattttatcagtagttctttcttatcactataaaatacattagtcaataatttttaagttattagtagagaatgtgtaactgagagtgtcagggtgtaaaagatacgttgaggatttgttggagagatgaatggcaactttatcaatgagatttaaagcaacttgacaggcttcacgatagtattttatgataacctgaggacttatcccatccaatataaacgccttagcttcattcaataactcacctataaaaatattagtaatgtatcaactgtactatactattgatagtataaataagtaaatagggccagcgagggggagtacaagcaccgtaactaaataacaaacctgctagaacagtaacggaagtagtcccatcaccgacttcatcatcttgtgatttagcgatatcaacaagaacagaagcggcaggatgagtaatatcaagtaatttcaaaacagtagcaccgtcattggttatcgtcacatctctctccgtatgtatcaacttgtccattcctctaggacctataaacattattcagcactatccataggaataggcgtgcttcagattcatttcccagtattgtcaattttaggtaaaaaatgatcaaatagccaaaattataaatagatctgtgtaaataataaaactgggatccagtgaggggatagaagtaatcaaataatctattacctagagtagttttaacacaatcgacaatagcttgacaggcgttgatattactaatgatttgagcttggccttgggatgtatcagtgccttccttcaatacaaggattggtaggttcattaaatgactcatttttaaaaaattctctttactaattttaaagttaatttattattatttgtaatagttagatttattgattttagattatagtttaaaatactttatatgaagaggtaaacatatgaaaatttaacataaaactttctaactacatttgatagtgaaaataaaaataatccgagggagacgcaagtaacctcatattatacttctttcaacatcacacaatatttcatacaccaactccaaataataaaataaataacaattctaatgaggaaattttaaattatgttacttttcgaatcgctaaatagaataacaacatctctcagtaattatgtagtcagaagggagtttgcaacacataacaattccgtatcaattttacagcaattttacaacagattgtcaataaggaaaaaatacataaaagctataaaacgaggaaccttaatttgggataaaggacaagttaacgcttacacattttttcaataatatttaaattctacgccttctaaattattttaaataaatttatttaaattaagttatgaatacaattttgttaattgtggaataggtcaggatacctccgataatagcggaaggctacgaccctcccaagtactgcttattacccaacgagaagcataggaataaccagtacaggggtaaatttgagaatttaacggccaaaaaggtctcattctacgattaatctaatgttttacactattcatattctgaaatattattatttaccaatgtgtaaatatatgtacaagtagcagagtcttatatgtaatttcatcccctttaataatattatatagcaaatatagtagaaatctgagtaacaaggggaaatagaaaaaacgagtagatttattaggggaaggactgatttgaacaagtgtacaattgtggaagtcaacaactcccggtaaaattttgaccaaattccctaaaatcaaaaaatacttttaatacaacgctatagtccatctgaatcaatgatataaactaaataatatcaagttttggagaatatttggatcagattcccatggggtacgattttacttttaatttatttaaaattaatttttttaaaatcaataaacaattttatggagttaatcattgattaataatgtctgagagtgattctgacgaagaaaccaccgaatcccgtgtcactaagggtaagagtatatatgagagggaggatgattatagaagacaacgattaaggcagaggttatcccccgagaggtatgatcctttttctgggaagactcctcttcctgaggagcgtacgttcgccgacgtgatgaaggaaactgagatttcacgacagagaaatgaaattagtaaacacattagtaaacatgggatgactaaagaagttgaagaggctattgaagaaactagaagatctaaaaggagaacacaaagagatcgatgggatacagacgatgttggaggtaccacaactattattacagtcatttatactatactatttatttaaattatttctatattattatataaatttgttactggtttataaactatgttttagaagctcaaacaccggcatttgatggtacaatggatggtgccacaccgtttgatggttcatttgacatgttggagaaaaagaaagtgagtagatgggataaaacaccgatgatggagcaacagactccaatggctcatacaggaatgtacggaatggcaacaccaatgacaccgcaaattgtagtaccagagagcatgctgaagtttaatattacaaccagttatgaggataggaataggtatttaacagatgaggagttggatgaattgttaccaattgaggggtatgagatagtgttgcctccaccagactatcagccgtatagaaaaccaagttcatacacttatggcactgttacaccacactttacaatcccagaagatgtgagaaaaccgtatgatattccaggtactccgagcattttacaggacgtcgaaattaaagctgaagaccagcatttcttcagtaaattattcgatgactcaactgaagatgatttgacatcagatgaaattactgagcgtaggattttagccttgttgttgaaggttaagaatggtacgccaccgcaccgaagacaagcattaagattactggcgagtaaggctaaggaatttggcccaggaccactttttaatcagattttacccctgatgatgcagtccacattacaggaccaggaacgtcatttaatggttaaggtaattgatagaatattgtttaaattgagagattcggtacgtccatatgtgcataagattttggtggtaattgagcccctgttgattgatgaagattattatgccagagttgagggtagagaaatcatatcaaatttaagtaaagctgctggattggcaactatgattggtgttatgagacctgatattgatcacccagatgaatatgttaggaacactactgccagagcttttgcagttgttgcatcttcaatgggcgtttcttctctaattttatttttaaaagctgtttgtcaatcgaaaaaatcttggcaagctagacatacaggtgtgttacggagactgtactctactatctagttggtatttagttatccgtatatctgaatactataaaatcatgtataggaataaagataatacagcaaataagtttattaattggatgtggagtattaccatatttgaagcagttgatagatataataaagcacggattgaacgatgagcatcagaaggtgaggacaatcacagcattggctctggctgcccttgctgagtcctcagctccatacggtattgaagcttttgatccagttttgagaccgctttggaagggaattactgaatataaaggaaaaaatctcgcttcatttctcaaagctattggtactgccttactctgggctattcccgccacaatctgcgggcccttgttttatcatttacactatttttttagttatttaacactatttaaatattaaactagttactcgtagtcacccttttctttgtaaaatgttgtaggaaatataataccgttgatggacccttactatgcaaattattatactagagaagttatgctaatattgataaacgagtttaacacgccagacgaggagatgaaggcgatagtgctgaaggtggttcgccagtgtgtgtcaactgaaggtgttacagcagaatatattaaatctgaccttttgggtccttttttctcgaagttttggatagtgaggaattcacttgataagaagaattctgacttattaattgagactacagtagagatagctcagaaagtcggcacttcagcaattttggagaagctggtagaagatttgaaggatccctcagaaccattcagacgcatggtggcacagtgtattgaagccattttaatcacaaatataagaactactgggaactcagtgatcagttcagatattttggaaatcagcacacgacttgaagaattgttaattgatggaatgttatatgcatttcaggaacaagtaaatgaggattctggtgttttgttagattcatttggaacattaattcacgtgctaggagccagagttaagccttatttaccccagattacaggtctgataaggtggagattgggtactcagtccgctagaacaagacaacaagctgctgatttaatatcgaaaatggcgccagtcatgaaagtttgcgatgaattacaaatgttaaatcatttgtcattatatttgtacgaatatctgggtactgctttacggtgattgtgcacccctcggggaccttatttatattattctttactgttactcagttatatccggcctgggccattttacttagttatacaatagttatatagatatttatagaactgtgtctataattgtgtaggtgaggagtatccagaagtactgggaagcatattatgtgcattgaagagtattgtgaatgtggttggaacaacagaaataactccacctattaaagatctgctgcctcgtttgacgccgattctgaagaatagacatgaaaaggtgcaagagaatgtgattgagttgattgggagaatagcagatcgaggtggcgatttggtgtcacccaaggaatgggataggatatgctttgacctgattgaccttttaagggcaaacaagaagagcattcgtcgtgcaactgtgaacacatttggctacattgcacgatgtattggaccacatgacgttttatcaactctgttaaaccatttaaaagtccaggaaagacaattgagaatttgcactaccatcgcaattgcaattgttgccgaaacctgtttaccatattccgtcctacctgccatgatgaatgaatataaaattccagaccaaaatatacaaactggaattttaaaatcattgtgcttcatgtttgaatatataggtatccgttacggtgcttgctaactgtggacttagtttactaagctagttactcactacttagttattatccccttagttacttaagcccagaaataacataaattaatttttaggagagatgtcgaaagattatatatacagtattgtgccattattggaagatgcattgatgtgccgtgatttggtacaccgtcaaactgccgcttggacttgtaaatatttggccttgggtgtgtttggtctcaattgtgaagatgcacttatacatctgttaaattatgtgtggcctaacatatttgagacaagtcctcatcttacacagtctgtgtttgatgctcttgatgggtttagagtttcattagggccctcagttattttctattatacaattcaaggacttttccatccagccagaagggtactgcgttacggagcttgcacatccctacgggggacttaattgctctacttagttttacagttatttaactaaatttatagtattaattaacctttaacttggtgtctaggtacgtgaggcgtattggagagtatataacaatttatatttgggacatcaggatgctttggtgccgttatatcctttgataactgaaggcgtggagaacaaacaccaggcaaatgagctcttatatatgatttaacatcgcattaataaacttatatcgtatacactattttatatttagttatttttggtttattgaatattttataattgaggaataggatatttaggatcagatttaatttggtatagggaacgtaaaacataatttggtagtagtgtaggtcaaggaagtcagccagcaaaaaatgcatcgcaacaacaatcaagtgcatctgcaacaaatgcaactagttctgctacaggtcaatccaggggaactcctgtgtcgagtgcatctgcaactcaggcaaaagtaacttcggcatcaactcaacagggagctcaagctaagacaagcccagctactggagctaaagcaactcctgcaacatctccgactacaacaccttcaccagccaaaggtccagagcctaaatctggaaagcctggtgttactccagccaaggcagctccagcatcaacacctgttagtcaaccagctaaagctactccagctccaactccagctcaaccaaaggtagctacaactccatctcaggctcaatttgcccctactgctcaagcaaaactgaccccagttacatctgccgtagcaactcctaaggcagctccttctagccgactcgtaacactcgacatcaactggaacgtcagtactgatgactacgattacactgtcgattatcacagaaatattaagatcttcaccgccaagggtaattcaatgttttgccggatcaaagcggataatgttatctgggaaaccaaagatcctaccaagtatgcatccaaggttttcactgatagaagtgccaaaaacgcaagtgtatacttgatggacggtaagatcttacacttcgaaaagggtccttatggtggatggctcccggcttctaacaaaataacccttgacctgggtaagacctccagcaccattgggtttgactttaaccatgatggtgagaggaggacttttactgcaaagcctggattcttatttagccaagtaatcctcagtggatgtactggaggtaatactttttgggatgcaaaaactgacgaccagtgttcgaccaaggtcatagtctatggtgtagagtcaagtattaataactttaacatattcctcaataatgataaagttatacactcccatagggtaggaactaattggatctcaaaaactggttttgttcttgatatcaacaccaattcgaatagtgatctgtttgattataggtccaccagaggattcggccacttcaatcccaaggccaatttgaagatcactaggattgtgaagaaagggcttaggatctgggatgcgaaagatagggattatggcctcaaagtagtgttgatgggctctggcaaggatgtgaaacatatatccattctgttggagagtggaaagtatgtacttcttaccaagagcggccagggtcaaccctggcaagacataactcaaaataaacataatttcaccggggtaaggctgttctctttggaggacggtacatcccaatatcatgaactcactagggcggactatgatccgatagtatttgagtgtagatatggttttgagttcaagaatgatgtcaggtgtgtaatgatcattgataaggatatgttactttggaaccacactgaagacactgagtttgggtatcctaagggcctctatctcgatctccgtaaaaactcattcagtgtcacaaatcttaaagatcagtcaaaggaagtaactcccacaaaaatgagtgtcgcaattcctgttagaacacctgtagtggagacttccgtcgaggaaacgcctctttcgactacatatactagtcttgttactcttgatatctataatactcagtctacgagtgagtttgagtattctaaaagtggtggtagtcttatattcataccgatgcctgaccatgcttttagtaaggttactcagggtactactgttatctgggattcaaaaggtggcatttctggaacgttagtcactactaagactagtggtgaaaaattccttgtaatcctacttagtaacaattcgttcaaattattccatgagttgtctggcaaatggtctgacatcaccagtcagaggcatgacgttactaaactcaggttctatggtgacaatgacacagttataaatcctagtgactacacagttacgataattcgttactccttcggattcaaattcaatgatggagttatctgtaggaagatcaaacttggagaagacgatttatggaaacatactgatgatcctgagtgttcaacaatcaagaacttatacctcggccttctttccaacaatttctttgccgttaataaccagtctgaatttaagaaactggaatttaaaccatctgttaccccagccaagataactgctgtatcaccacctgaaattaaagctccagcggcagcccctaccaaaccaacccccaaggttactaaggtcgctctcgatattgagaagaaacagacgaccagtgagattgattacaaggacgagaatggagtcgtcacatacgcttcgaaatctggatgtatgttcaacaaaattttacagggtactggtgtcatttgggaatccaaaagtaatgtgtttggagtgttggtgaggactaagatttccaagggtttgaaatatctggtagttttacagagtaacaatttattcacattgttccgttactctgatgagaattggactgatatcacttctgaaaggcatgacgtgactaagctaaaattcctgggtgatggtgacgctccgttgaagacgacagactacgatataactatagtcgatatgtcattttgtcacacattcaataccggagtcaattgtaagaaagtaaaactgagtgaagatgttgtttataactatgatgatcatacggattttggagagatatcggtattttcactgggtcttgcatcaaacaatttctttattaagaacgactctggagatgtaaagaagatagaaaagaaggctgaagaagaggctgaagaacctaccgggactaggcccactcctattcgtaaagctgtgcctcctgacaagtcaattgctctcgatattgaggggaacaagggtacagatcagtttgatttcactgaggccaattatattaagactttcaatgggaaggatgactgtgtgtttgaaaaggtatctgagaaacaaactgtgatttgggagtcggatggtgtgtctggtactatggtcaggaccaaattattcagtaataaggatcgatttttggtcatattactggaggatgagactttcgcagtgttcaaaaaaccctcgggtggatcatggagtgacgttacctgtgaaaagtgtgatgttaagaaactgaggttctacggtgagagtgatcgggagatcaaaaggagtgagtacaatatcaccctgtctgatctttcatttagtcacatgttcaatacgggagttaggtgtgagatggtaaagttgggagatgaagtggtatggagatgtacagatgataagaagttcgaggacataataacattctcgctgggacttgtatcgaataggttttttgtaaaaaaccagaatggagaactaaagaaactagaacccaaagcagaacctgtagtaactaagcctgctgaacctgttaccaagcctgtagaactagtagtcagagcttctgctcctgttgtggaacctgttgtgtctggtcaagtaaccagtgtgttccataggcatctgaggttgtgtacctgtgatcctgttgatcctagtaagtctattcctatggagtgtgaggttcttgagtatccgaatcgtgactgtctgttatatttgttaggtagtgagtgttctcaattgttgtttgatggtatgtgtgtgtggagttatgtgtctggtccatatcctacatctttatactttaagtcttctgattctcttctatatctcaactttgatccatactattatttatataacattacctacattcttattaactattggcaaactattccggtcctcagtacacatataataaataaattatattgatatttgttaaattagttggcatttcgtttatcttttggatctctttgatttattaatcttgtgtgtgctttaaatgtttgtaatttcttttgtaacacatcaattttcttctgattcaccttcgcctgattatgcaaattaccgtacaaattcctcacatgctccttcatattctccaactcatcccattcaacagcctatcaacattattaaccaagtaaataaataagtaaatggttgtttacatatgaatttgtgttgttatattgatattctctggtattgggatctgaaatttcattttcaagttcatgttctaataatttaattctttcattaatattttcaaaattgttcttcaaattctccaccatatccattactccatcactcactttatactccttcaaatatttcttataatcattctctaatacaatattcacatccagttggagataatttggataaaattatcaataaataattacaaattgtaaataaatatcaataggttgaaaaaatataaataactgggtcttgaataacgggagtaactactacctgtgttatcttgagtggtatgttgcgataataggtttagtctggttggaatatcgtattcttcaagattatagtagaatgagtaatgttgaagtagctcggatttaactctatcaagtgagtccttaagttcaccttccaagtgaccttttttaatctccgggggcattggcatttttgtcatcttctcagtctcagcattagagatacgtagtaacgagtcaatagtattctttatctcagaattaaaaaaggtaccagagtatttgggatcacgaggtagaagagaagtgagacctaaagttgaattttgaagtgcacatttcactagtgaacagtacacattcaatggcatcgtcacattctcaccaaccatacctacacactctattatactctttatattatctgatatactctccattattattaactgagtaatataatttgtgttaatatattactttgtgtagaattcatttttagtgtcaaaagagtcaaaaaaaataactgtaaaattaaataaattaactcaaatattaaaaatgattaaatcaattaaatgtaaataaaaagttaaattatattgtgagataaggggaaaaatcggaatcttaagttgagaattgaaggtgcaagttcaaaattaaaaatgtaaaattgactcaaaaaattaaaattttgaaaattttttaaaagttaaaatttacccaaaataataccaaaagaactgtaaataattacttatatgtatgtgtaaaggagtaaaaaaaggttagacagaatccaatttttacacctaaaaatataaaatttttttacataattaacaaaaattatattttaaaatgttaaatttcataattttagaatgaattaaggtaatttttagagagaattactagatttaaagctgtggggaatcacttgtaaatacctcaaatttctcaactaaatttaattaattcttttcttaaattgttatactttgaagtatttattttttgtaatataataaatttgaagtaaattggataaattttgtaataatataaatttcttttgaaatgacgtttttatgtacaattagtggcgtccagccacaggagccttgtttaagtaaaaccggttacatatttgaacgaagattaattgagaaacacttagaagaatcgccagtctgccctgccactggagaaccactgacacttcaagatttaatcaccattaaaagtatgttttaactaaatttaggttctagtcattaaccttagttatacctacatgttttttatcagagggtctttagatagagtcccagtcccccgggatttgattatttgggccatgtcaagccaatagctatacagtagttagtagtatagtttagggttcagttactcttcgtacatagttacttttcactttataataattttctgatgcttaacaatgttaaatctgttgatttgggttgagattttggaatttgaaaattttcgattttggcccggacccaaaagtgacaattaggttttgaaaaaaatcgaaaattttcgactattgtgaaaattaaattaattaatcccaaatcattccaaacatcattttagacatcaaactacttttatttaagaaaaaaagtcagttttagctatagaaaatttgggttctttatgcatcctcaggttcacttgaggtgttattatacagttttatttatctattagacagaaaatttcaaattattaccacaaattaaccttaaattaacttacataattctaaattatcctaaattgagttaaataaactagatttctgggataaaaaattctagaaccttcccttaaattaacaaaataaatataaaattccctatttataactttagaatactcttaaaactatttaaaatatatctacgattcgattttttaatatactttatacttattgctatagctatgtgcttgacctggccctgacaacccactcctggatgacccatttatacccttaactatagctctatacttattcttatccctaataattgtgtgtagctgatgtggtaacgaagcctagaccagtaacggcctcgagtatacctggattactctcgctattacaatcggaatgggacgctttggcgttggagactcataacatgagatcacatgtggatgaagtaagaaaacagttaagttattcactataccaacatgacgcggcaacaagagtaattgctagacttattaaacaacgtgacacagctttacaagaagttgagtcactgaaacaacaattactacaattcagatccaattatgatccaaactccttagaaacaggttttacaactagtcagatagttaatgttttattatgagttaacatatgctaatactaccggtagttatccggtgttaactgtgttttttagagtttgataaggatacattggtgaggttgcaggatttctcgaaggtattattggctgagagaaagaagagagatttgagtggatatgtcccgagtgatgcatttacaaagtttaaatgcgctggggaatttagattacactcctcgactaagcctggagtactctgcgtagccttggataagagtaagaattcccagggtatagagggcagttattgttttactggtggtaacgatggcagtgttgtttacttcgatttacaaaataagaagactcttaattctttaaatggacatatgaaacctgttaatacacttgtcacacatccaatggaaaatattgttttgtcaggtacgttagggagctagtcaatcaaatttattccctgatagtacaatctctggggaccttatatacacattttacacagttaactggaacactgtatagtatgttgtaggatctgatgacacaactgttagagtttggcgtgactttgaaactgagttcaagtgtacatacgtcttaaagcatcatagatcccctgtcaaaactttatcactccatcccagtggtgaatatgtattatcattagcatcggatggtgtttggggtctctgtgatatcgactctggtaaagtaattaaaatgcatagagatttaccaaagtgcaattcgcttaaaatacatcctgacggtctcgtatgtatcggtgcagccactaacgggacactgcaagtttgggatatccgtgacgcacaacccaaggaaccgcttgctaatactatgagtaatggtaatagtgtaagcgagtgggtggatatggattttaatgagaatggatattacttggcgagtgtctcggcggctggtgaagttatgttatgggatttaagaaaacaaagtgttattaatactttttcttgcaatgttaatccaaccaaagttaaatttgatcattccggtactgttcttactactacacagttacttagttattcttccgggggactttacatacttagtcatgtatttacatagttaactggaacactgtatattattttgtaggattgtatatgggagttgctagtacgaaggtggaagtgttttacatgaaggataagagcaaattcgagttggttcacacacttgaaggacatactgcaaatgtcacagaccttgaatttggacctctctccaagttcctcctcaccacctgcctcgataaatcactacgactttaccattaatttatcaaattatttttatacttcacaatatataatatttagtatatataaattgtaaaataaaaaatttttttgtatataatttgtaaaataaaataatattttaatattgtaaaataaattatggataagatattcaagaagttggtgaggggtacgaattttaaaaatggaccttcttcgggtattttcgtttttcgagatggagacaaggaatcggattccggtgtttttgatgaggattttagtgtagttaactcttcaggagaagattttaatgattatagtccgttagatactttttcagcattggattccttaactactgacgacaaaatcagtgaaagggccaaagttatctcaaaatcaattaattctaaacttaattttgataaaacaacaccaattcagagatatgtgagttactgcgttacggatcttggtccaacggcactcagttttctatacctgcactagttactcagttatatatctttcctggacacttatttacgcttatattactgttatttaagtgttatagtaaaaatttttataggtaataccgataatgatgaaggggaatgatgtggtagcagtagcacctactggttcagggaaaactttatcatacttaacaccgattttactcaaagtaactcgagacttaattatctcatttgattgtgtagaatctggaggatagcttgagtgtgataataattgtacctactgtagagttagtgcaacaggtgaaatcagaattcatatacctaaccggtaacataataaataatttattggtttaggtggtgaaatttttagtattaaagcacttgaaaagaatatgactgaatttaacttctctatcgcaatcactactccactcactctctacactctactacacaacaacgcgttgaaaactgtattattaatatttaacatagtgataataatagttaggacttaatgaggggattgaagtgtttggtgttggatgagtgtgataagttactggaggaagggtatggtgagaatattgagtatataatgaacctgattaaggattttaaaggtattcaaaaggcttcattcagctcaacattacaatctgaagtcctattactctccaaatcacatttcaacaatccaattcacatcaccataggtatctcattacatagttaactcagtagatagtggcccttcagagcctaaaaaaggggatactacttctactagtgtctaaataatatcctacttagtcgtatatcgttgtaaatgtgtgtaggaaaagaaaatgtatgttgttgtaatgtagaacaagaattaatctgcgttactaatgataaaggtacacaattctaactatataatcaactgtaaactatgtgatctgtaggtaaattgttgatattgaagcaattgataaatgatgggaaattgctaccgcctatattagtgtttttacagagtattaacagggttaatgatttatataatgaactctcacagctgaatttaaatgttcaaaaattcactaaacaactcactctcaaacaacggcaaaatatcatacaaaaattcagaatcggacaagtaagttacttccttatagtgattgtactaatacttagttgtctatatcagttgcactcagttacttagttataccctacccttccctacttatccccaacatgtcactctatacacttaattttgtatagatttggatattattgtgtactgatatattatgtcgtggtatcaactttaagggggtgcattcgatagtaaattatgacttaccgttaacacctcaagtgtatataaacagagttggtagagctggaagaggtacaaaacgtggtaaatctgtgactttcttcactattaatgattttaaaatcttgaatcacattatacaaatcatgaaattatccaaatccaacattccacaatatcttctctcactcaaaccaatacatattcaacgtaataactaactaacttgtgatatgacatactgatgtatgtttaggattgaaaaaattggagaagaaaccaccaacaagagttaatattggaccaataaagtaaattttttcattattttaataaatttgtagaaaaaagaaaaaattcaacaaatccaaaccaacaaatactgaacacacaaccactgacacatgaattcaaattatggaaagttgaccctaaaaacttctaatcctattcactgtacatatatatattatactattaatatataatatgtatagtatagaagtaggactaaattgatgtgtttttgcacagtattaaacaaaagtcctggttgtctaatacttaacgatttgtttaaactttaaatattaactgctaaacatggtttggtttaggcggccgcatgaagtgctagttcatgtatgagatggtgtgctggaataccttcaagtttgtggagttctagagacaaatcgtgaataccagctatgaatttagccatactaactgcctttgcagcggctgtgccatcgaataaaaggaacacgtgaaatatacctcccaatttgtgtagaagctcgaggtgtacaaacttcttggcatcgtcttttggtataccaacaaagtgtaagtccaaaagtacttcgccgtcagctgccttccatacttcatgggatccacagacaacttcatttaccttattatgaactggtttgacccatgtgaagaaagcgtcacccttcttaaatgtcttgtgaaggaaaatgctgtcaggaatagaacccaggggacaggtgcttttcccggctgaaataccttcaccgtgtttcccgtaaaggacaaacttcaaatccttcaggtctaatttcccagcagcagcatcgagaccagggataaacaaagccaaaagggcaaatacaaaaatcttcatcattactaactagttagtttttaatgtgttagatttagttgtattttaactgtggataattatccctatttttgatggggaaaacaccacaacttattcctcctcattgattcttgcacataatggtcttatccacatcaatctcattcccaaacactattatacatagtatattattagtagtataatataatatatagttaacctagttggtggtcgaatattgagtttcacttaaaattttttaaacacatgaatagggaccttcattatttgaccttaattaggtttttatagttaatttgcccttagttatattcgtaatactatgtccatattaacgctgtataccatatattgcattatattttagtgtgtggtacaatctcacaagggattgttggattgtctttacataacttggatttttattaagagattccgcaactgatcgattccatttacaaaatgaactagaaatgttctctataacatgctaattatcattccagatgacaaagccataattacagtaacagtacggttagataataatgtatttagtaattaaaatattaagtagttaaaataattatataaaattaacggaattcacgtgatatgtgaaaatgcaaaccgctattctcagatttgagacatctcaactacgtttgagaataatatagtacaaaattcggtaagatttgttaataattctattttttaaagtgattgaactcatttagtatgacaaatatagagaaagtttctaagaaatcaggtgttcatgtagatttcttaggtcaagttgatggactggatcaggtccgacgtcctaagtagtagtagaggcaggagttgttgtagcaggagtcgatctagttccagtaccagtttgaccagcaggagtggctggagttggagtaccttgagtagttccaccctgacctccagaagcaggagtagtaccagtctgacctgtaggagtagttgtggtttgacctgtaggagttgtagtagtttgacctgttccagtaggagttgtggttgttgttgttgagtgcttaaattctatttttttaaattctttttcactcttgcgtaagaaaaaatcgtttgaaataagacctaataacaattccttgaaggtttcaaaattagaaaaatctgtacttttccacaaatccttatctcccaacatgatctttttacatttaacattatcgttgaaaattactgtgtatgatagtttaacaaggtcaattttgtaatccgacgttgtgagttccttgtcattgtcaccaaagaacttgagtttacttacgtcgtgtttcttactggtgacgtccttcaaattgttaccatccttttcaagaagtacaaatttaagagtgttcagaagtatggcaagatgtttttcattattattttgaaccttgattaccaccttgacagcttgatcatttggatgagcagtccatatttcagagttacccttcactatcttagagaacaacttgttatttttaggagtgtaagtcctaatatcgtttttctcagaacactcaaacgcattagtactgctagtcttctttatgtcaagggtaacagctgtgccatcagttgtttcggtagatttaccaccacaacagccgccgtggactgagtagtagggacatgatcccaagactgcgataaaaattaatataccaaacttcatctctattacttttaactagtagatatttaagctgtgaattccagctctattccaccttcaaattaccattcctagccataactagaaacaacgtaactcattctcccccattcattggtaagaattcctattcctatcctcttcttagcttattaataaatttatattacttatattatacctatatataatatataatatacactgagtatattataatacatgcgtattataataattgtatagtgtattaacttctcagttgagaattttaaaacacataaacaactcccttaattattctttatttgactatgactgtagtataaactgtaaatattattatataccgtatagttaatagtttaataataatttattaaagagtataataatgtgttagaaatgttccttaaaatgtttctttggatcgaacttttgctgttatttggttgagagatgtctcaatcaactacattttgtgagatttactatagtacaactacatttagtaacatattgtacagaacatttagtgcgatttatgaataattctaagaaatcaagtgttcatggagatttcttaggaccttcagttgtactagttccggtctgacccgaaggattagtactaggagttgatccagatccttgattagttccagtaccaggagtagttccagtagtagttggcttagtaatttctattctcttgtgttcaccgtaattgttaataatgaggcaatcgtttgaatcaagatctactgaaaaaaacttgaattttttaaattttgtgtcagaatcatcaggtttccaaatttctttatctccaaacttaattttcttacacttaccttcactattgaatattaccaagtaacaaaacataagtccaatgtcaattttgtaatccgcagtagtgagctccttttcaccctcgccatagaacttgaattttgttatatcatctttggaagaggttatatcattccagggttttcctttgccatccctgtaaagaactagaaacttaccactcttaaaggaaatggcaagatgtttctttttatcacctttacccttgagtaacacctttacagcgtggtcatcaccggtagacttccagacatcagtgttacccgtcacgatcttagaaaatgtatgagtaccttgggcagtgaataatctacacttaccacgctcggagtacttgaactcattgcttcccttattcttcttgatatcaagggtaagaccagttcccccggttttttcaccagttttagaaccaggtgtagttccagtagctggagtagtaacttgagcccccggagaagttgtaccggttgtagcaccagttgattgggatgaaccattcccatccgctccatgggctgatttataggggcacgatataagaattgcgataaaagtaaatataccaaatttcatctctattagtattaactaatagatatttatccctttaagattatcattgtcacaatcctcaattctaattcctacttctaattggcaaacaacatctcagtcttccccattcattagtctgcattcatatcctttccctaattctccagaatactaacactattatacatagtatattatatacagtattataataatggtatattattatagtaatagaatagtagtagcatagatattagtccccctattaccaactatccaggaatagtaaaacaaacactcatagatactaaatttggagagggtaactaatttttatacactactctaggtactgggtactaaatacattagtaaatgatattatttgggattagtaatagacttggatacatgcccatcattaatggattgaggtgttctttgttccattcttaattgtccagaataaagtgcttcatgtaaccctttaatactatacacaccaagattttgaaatccatgtttcacaccttgggttaaattgggtataatattatttacacttcctttatcaataactaatccggatacaccctgtgacagtatattcggctcatcaatcagatgatatctacttaatgaacccatgagtcctaaattctgcattgaatctttgatagcatctttgctacccatgcctctataactcttcattcttacaccgttgttaaagtaatattcaccaggcgtctccttactaccggcaaataaacttcctcccatcacacaactagcccccaaacttagggcctaagttaggggttaagtatgcaactaagtaactgattagttgtaatgagcaaatgtgtaattagttactttaacgatatcaccggaggatttgatgccaccatcggcgataatggggatgccgttccaatgttcaaaagcataacgactaacataatatacagcactcgcctgtcctcttccaacaccacatatgttctaatcacatttttaacaccattaactaattatataagtaatagaagtaatagtgttgggtacgaacttgagtggtacagatggacccgatacccataccgactttaatagagtcacaaccagcttctaataagttcttagcttgctgggctgtcacaacatttccagccataacctaaaaattagtattaaatttggtcaatttgaggaaaaaataattacaaaaaaaataaatattaatggttcgcaaataatgaaatagatgaggatgggtaattagttaggtaacggaggaactaagtgattagtacaagcaccgtaacggacctggaaatctggataaactgattttagttgcttaattaaatcaatttggaaaacactattcccctgacttgaatccacaactagtatatccaccttggcatctatcaacttcttagcagtgtccaatccatttcccctacaaaattattattctggacgtaacacaatatcataaataacaaaatagcgtatggttgttacctagtggagatagctgcaccaacgagtaattgtttattatcatctttggaagcgttcgggtagagtttattcttgtagaaatcagacctggttacaattgacatgagctcataattttcattgacaattggcaaaacgcctttttttgacatgaatagcaattcatttgcgtcgtgaagtttcattggatggtttccaaccactaaatctgtactcataatgtcctccaacacgacattcttagactccacaaaatacatgtctgtctttgttacaattcccaataactttgagccagcattaccatcagacgttatcgggacagatctatacaataggagttaccagtgtgttaaataggtaaatagtagagtaggtatgtccaaggactggtactatcgggtttatttttggttgaccaagtatatagtaaggtcccagtaggtactaaataagtaactcggtaggtagtaggggataaataaggagtcctggagggatagataactaataactggggtctattaatgcaagctccgtaaagtagatacgtgaaaccgaatttatctctgatctgaacccagtcagaaacagtagaagtaggtttgaggcaaagaggattctgaacaaagccattctcaaacctcttcactgccttcacctccttcaccaaatcctctatcgataaattattatgtatcacacccagtcctctgtacatcacaattttaactcttattactgtgtattaatgtgtatgattaggtaaataatgtgttaaaatgtgtaaaattgggtaagtagtgtgtattgtacccgagaagagccattgctgtggccattttggattctgtaacggtatccataggtgaggatacgataggaattctaagtctaatattccttgaaacatgagtcgtcaaatccactttatccacagaatcacttatataccctaaaattttatttatttgccgtcagatattaattaaatttttaatatttactaatgttaaaattcttatttttctctttaaaaggttaaattaacttaataaaaggaaaattatgtaaaattttggtggaagtaacctggtagtaggatgaggtcttcataggagagtgagaacttggtaaaattaaaaaactcagcggcagaataaccgtctgtcatttcaaaccttaaatgttaatttatcttacaacattacaataattaattttattaatattttttaacaaatttctcacatttccccatccaccattacctaccccgtaagtattaaattaacgatataaaaaggtactaaatacttaactttataaaattagtatatgtgtagagaatagagttgaaaaattagagagcagttcctcgctcgaggttttgtttaatttcattggagtaagtgccaaaggaccgttcaagcttcttgttaaaaactctattccgctcattaatgtatgaaatatcttgcgcgtcatcatcgtagagtcgacgtctactaaatacatcacgtttcttatattgtttttccacattcctcactattacatccttggtagattccgtaggtgtgaagttcactacaccaggactgtagaattggtcacctagttcactcttttgcttctcatacaaatcaggattaaaccccgtctccctcaaactaatacagtgttatacacataactagggagtaagtaggtaaataactatgtagtgagtggatagtgattgggttgggagataccgttttttgtgtgctctgtagagagcgtcttggttgaaaacgttccatccaaatgttttattcttctctttagtcttttggattttatttatcttctctaccattccagcacttatctaaacagtattatagttagttattagacaactacgtatgtcccccgggatacaactatccggcccaaaatctgcctgacttatgtaactaggtaatgtggtagctattagggagataactaggtggagaataactaagctctgtgggctggtacaagcaccgtaaaggggcaccgtaacgtacatttaattctttggaaagatttgaggagatatctttatcaatatctttaccttcagattgattgatgagattttttgaaatgtataattctgactttgggttactcttgatcttctgctccaagattatctcatcattattcaacctactacactccctcatcttaccactcaatttcttcagtctccgaagcacatcatcgtcaccaggttcatcctctaccagttcctcatcctctaccagttcctcagtttcttccttctctactacttctacagtatcttcgggttccttgggtccaacaggttctgtagtgtcttgtattgatacatgagtggcatcaagagtggtatcttcgggtatgtagtgatgttttataccttgtagagcttcagagagtaactttttgcctagagtattagcacttgactcattaggtaaccttcttctattcacacgtcctgtgtacacacatctaatctgatcctctttcacagacacatcatttggagtgggtttggactggattgtactcattagtgagttaattaaatccttctgcttagtggtttctgtgacactgtgttgtatagtgttgaaagtgccggatgagagtatcccaacttcaattttaggtttaaatttattatctacgggtacattttctatagctcttatgaattccataccctccactactctaccaattaccacattactcctgtcaaatctagtcacctttccaaataatacacaaaattgggaaccaaatcggcggtcaggagggcctgagctgtcaccactgtcacccgcgttcatattctgtacggtgagaagccctgcgtgagagtgtaatcttgaggagggatagtctttgaaatattcgccgtagatactaccaccaccggtgccgtcattattaataaggtcgccacactgtaaatactcgcccttgataactttaaatactttacagccttcataactgagtgttcttatgcgaccacggactgaggtggtcctatcaccccggcatagagtcgtgaaattctctaacaaacgctcagaaacatcaggaaaaaactcaaatacgactctgccactcagatttaaaccaattccaaggtccaaatatgaaagtaactttgttgccatcaggaatttatataattaatttattatgtatttagtgtttaaatttagataaatttgcgatataaaaagtaatttctagttgtatggccctagattcgttgtggtaaggataaaattttatttttatttttatcgcaaatttaataataattttaattatttgttttaataaaatttttaattttataaaatgaatattgataaatgttggctttgctccagtaatatctatccaggtatctttcatagattcttcctttactcatttccattatactatataatttatactataataatattatattaatagtatattaatagtataaataatatgatggtgttaatttggtgattaggccatgggatagtatttgtgaggaatgattctaagatttttcggttttgtaggagcaaatgccacagacattttaaagctaaacataaccctagaaagattaaatggactaaagcatacagaagacttcaaggtacccttgaacccagtcacttattatacatactattatatatatataatataatataattgttatgtaactaaatgtatattattaactatataaaaatgaaaaaagaaaatttttcaaaagaatcacataaattacataattttactctaaaaattagaaaaataattaacaaataataatcttaagtttataaaataatttgtttgtaggaaaggaattgcgtaatgatgagaatttggagatggagttgaggaagaacaggccagtgagatatgacagagatttatacataaaagctattaaagctataaaacaaactgaacgagttgaatacttgaggaaaatgttactatataaagaacgaagaaggaatttggttactaaaaagttatcactagctcaaaaagaacttgaaaaacataaagatattcttccaataccactcgaacaacttgatatacaacaactcaaactactcaataccaaaccagtactaactcagttttatatttaccccaatattatctatttttgcaacatattgatatttatttttaatttagctatttttactcagaattgaacgtttaacagtagttatgtgtagttaatactataccaatatacccctaactatataccttctactatactatactattgtatactatagtataaatgtgttaattgtgttatagaaatcaacagcccatattaaggttacggaacaaaccaagctcaatactaaatcaaacactaagcggaatataaaagatgaaaataaaatggatcttgattaaacaataattaatattatttccacaatatatgattgatattatattatgattaggttggtgatgtgattggatatgactcgtatggtaggtttgggatggggatgtaccaattgagacgttaataataattttatttcctaattcattaaatatttattgatataaataattaatgaattaaattattaaatctacaattcggatggaaaataacgaaaacaattctctcagagtattttctcatactatttatttaattacatattaatagtataataataataataatttgattgaatagcaatttcaactattgcaagagactcagagccagatagaagtcttgaataatcaaataattaaaataaataaacacatctcaaaccaaaaaatcaaaaataaaagagccgaagccgctttagaatcggtaatccacaaataattaattatttaactttattttaaataatattaataattgtttagctcaatacttcggaatcaaattctaaagtgtacaaacaagtctccagactgtaacccactactcaccattatcactatttactatataattacttaaattttaaccaagtggaaaatattgtaagctcctaacaacaggaaagggggctaaatatacacctagtaacaatagtataatacaattttgtagattggtattgagggatagagaggagttgaggcgtgaagtggagagtgagcgtgatacgacagcattagatttaccgaaattagaatctgtaaagaaccaattagtagctaagttaggcggactcaacacccaattactcgaaatcaaccaacaaatacactcacaaacactacaaaccaactcctaacacagtaacacactatcatacagttaactagttaatagtacaaaggttttctagtcaggatggacaagtcaaaagaaaattatccttgatagtcctgagctggggaacccctactacttaaccatactaatactattactgtactatttactaattacttgaataattatgtagagaatggattttggagaattaagtttgaagcctacggcacctaagttccgtgtccacttgttcctcttggtggtcctagtccatgctgcctgtgacttgctgaaaactgtgttcaaacgtctaggaaaacttatggaccacttgaatgtgaaatttgggggaacgcctggtgaaaaattaacttttacagagcctggcgatttcagtaaactgctcaaaaaagagacttacagaccctttagaatcctaaagggagttacaatgttgttggcactgttttcagagttcctattgccatacgttctattcaataagacgacagcggtactgaagactaatttccaaaaacaagttgagtcgtatgctccattcgcactggtgactttcaagttaccagaccacccccgtgactttctgaagtcaaaggctcaactggaccaacttatggaagaagattataagcaggaatccagcgccaagatgaatgttttcgactttttcaacagtctgtcggacatgactgagaactctgacgaggccatacaacagaaactagaagaacacgtcaaactcaactccgaaaaactacaagaagatttcgatagcaatagtatccaccgtagttaacggagttcagttataggatttagttgtctagttacgggtttagttagagagttattgtagttaggtattactgggtagttaggtagtacttggtatactgattaccttatttgcccttcaattattcataattgcccctgaattactgagtaataatgaattagagcatgtgataatgaatttgacatcgtttaaccgttttgtggcctttacgatatcgaaggctgcgttacatggtttgtatgtatcagtccacgcacttgtttctcctgagaatcataacgcgttcctcaataccttcaggaaaaaacgctaatcttctaacaccattcatagttattattttgttgtgtcatgagtttgctgttttgtgattatttttctattttattatttataaattattatttatttgtttaaaatgacgttatcgaaaaaaataataactttagtgtcagcagagggagtttcttgtactgttaacagagatgtcatttgcatgagcaatgtcatcaaaaatatactcaacggtacaaaataatcagttttaaattattcaattaatttatttttattaaaatttgtcaaatttgaataataatatcaaccaagtgaaaatggtttagatattgatgatgagacggagccgataccgttaccgaatataaagacgaacgtactaaataagataattgaatactgtaaacatcattacaataatccgccatcacaaattccacaacccctcaaatccgctcaactcaacgaagtaacaactcaactaactcaactgttctgtaggtggtttccgaatgggattatgaatttgttaatgtcgataaagaattcctcttcgaacttattctcgtaactctctactcagtctaactctctacatagtttactcttactactcaccactattcattactcaatactcaatacttacattgtatgtataggctgagaactttttggatataaagccgttgttggatttgacgtgtgccaaggtggcgtcgatgataaaggggaaaacacccgaacaaatccgacgcgaattcgatatcgtcaacgacttcactcccgaagaagaagctaaagtatctctagagttttacactctagttactcatactcagttacacactaataaacttagttatatactaatacacttagttatatactaatacacttagttatatagaaaactgtaatacataaacattaacaatgttaacatgtgtagataagagaggaaaataagtggtgtgaggaattgtgagtgttaagagctacgagaacgtactctcctgtaactgggacttcttgaacggattcgtctaccacgactatgcgatctactcctactacgcctaaatcttattaacactccacactactacttaataccgagtactgtagctactatgggaactagagtgctagaaaaccgtacgtagagtactataatagttaactaattagctattgtgttagtactagtgtgtggatatgttacctagatttattatctctggaataaggttctctataaggtctcctacgattagatttatctcctctacaacgttcgatcctcaatctaatcacagatacatctcagttaatgattttactacttagtcaactgtgttattctgtgttagtagtgttggtcaggacggggtttcgaacccacgacctcagctaccagtacctagcactagtccactgtgccgtcatagctaggtttagcgcagtaattatatatttatatatgttaatatagtaagtagcagttttggtacgagtttccgtgtagatcttttccattgagttcaatgagagcgtctttagcatctctcggatcgtcaaacgtctaaaccaagtaataatattaattagttggagatacgacgaatccgaatcctggaggatttctggcgacccaaacattagtcactttgccatatttcgaaaataataaatcaagatcctgtgatgtcacactgtccaccaagttccctaaccaacaacattgtgctattaataatattatatagtgtaatatagtgtttaaggtgcaacggcgtgaagaaaagataaatgggttaggggagaaaattcttgaaatgccccaaaatcatcaaattttattaaaaatataaaaaatataaaatttagataattttagtggaaataataattatagtgtgagaattgaggaaattaggcgttgacgaacctacaaagagcttatgatcatcggaatctgaacgtcttccaaccataggtaataactttaaaattaataaaattattaatttattattcgagtcttcagaaatagaacgaatgattattgtgaaataattgaataaaattattttactagtgggatgatttattgcaatttgaagtataaattaaaaaatatggaaaaaatgacaagtaaaagtaatttaaaccattagctaagccaacacttgacagcattaccaactccccacagattccaaattttacttcaaatcctcttcatatatccactaaaacaacaattttatcattgtttaatcaattgtcacattggatttgataatttttgagctagatttgttaaattttcagcattttacacaacatcctacacacccacaaaataaatataaattttattacatatttagtattaatatattagtaataatagatcctctccttagaggatacggaaattggctctcgttcctgttattcccagtttacaccaactatacaatttgttgtcatgagtttacacatcttttgtcacgagtagacaaaattgacaaatttgttatcacgagtttacacttactaatgccaacgctatgatactcagtaataattcagaagtgtaagggtttaaagtgtatgcctagtgaggattctttgatggcttcggagagtgaggggtgtgcgaagcacatcctggtaacatcttcagatgaagcgccgtaagtaattgccagcgcagttgtatgtatcatttctgacacatgcggaccaatcatccaggcgcctaataacttattctcctcggtgcttaataatttaatgaagccgtcagattcattatatattttagctcttgaattggccatgaatgggaatacactttttttatattttactcctaatttttgcaagttttgttcagtttctcctacgccagctatttctggctctgtgtatattacagaagggattacattgggtaccacttgtacactgcctaatgttacaccttgtggatggtggacaaaactctttcctagaatgtgccctaatgcgatgagtccgtcttcttcagctttgtgggctagcattggaccataagtgacatcaccaatagcatacacattttccaccacagaattcggatccttgggatccttcaacacacgtaggttgttatcggttgggactttaccgtagtccagtgtaacacctaatttatctattcccaggccctcagtgtatggtactctacccatggccactaatactttatcaccgacataactcatctccttaccctcagactctataatcatcacttagtcaattgtgtaactaatagtagtgtaactaatagtaatgtaacaaatagtagtgtaactaatagtaactgtgatggagataccagtggtgagagtgacggtgttgttggtaactttagcgttgaggactttggtgccggtatggatattaaggccttgtttctccaagatctttctcattgttacacagacatccgtgtcctgcacattcataggggatttcaggtaaaataatactagtcaggagttagttaaagggtgatttaagggcaaaatgacccaaaataacccttaaactactaaagagcttaaattatctataaaactcgttattcataccataacggagcaaatctgattattgaattcgaagatatcaactttagagcctaagcgactccagactgaagctaattcgagtccgatagcgcctgcaccaatcactaaaaggcgattgggaaccttatccaaacaaagtgtttcagtggatgaaagaaaatatttaccatcaactttaagtgattcactaggaaacggtctcacttcagagcctgtagccacgactactttgtcggctaataacactttagagcctactgtaacctcgttctgactcttgaaacaagcagttccttgaatataatcaattttattcttcttgaaaagaccgaaaatgcccatgttcaacgtcctcatcaccgagtccttctcctccatcatcttaccaacatcagtctcaagacccgtaatccttaacccattcactcccttcttcatcaactacacaaatattattatattagcattagtttagattttacagagttatatgtagtaatagaatggttacgtggtagagatgtgaagtgttgagtaatgatttggaggggatacagccgcaattaagacaagttccaccaagagttggtcttttttcaactacaccgacttttaaaccgtgttgagcggcctttatcgccatggtatatccaccaggacccgcacccaaaaccagtaaatcatacctaaaccaatttaaacactaaatatgaatagtttaagggtaatttaagggtaaaatatggataatttgggaggatttggggaataaaattaagaatttgaagtgtgttaaaaaatgaaaactgagtaaaaaattacttggatgaagatgttgaaaattgccttttaatatttaaaagagaatcaaataattttttagtaaacattctgaaaatacaaacttatatcaagtgaaatgagccaccacaactacatataaaatcacttttaaaaataggaaaataaattcattttttattttttaatataaattttataattttaaactgtattatgtggattttttaatatatttattctgagctttgatatgatgttcaatgcttcgtatacttttgatacttttttacttgattacttcaaacacaagttcatttttaattaaaaatccttcacacatttgtccaaataaattaattttgtaagttttaaataaattgatttatggaatctaattcgcaatattattaataataataattgattaattaattttatgttagtgaggttttggcccataaaactggaacagggaatacgaagaataatagggacagtaggcctaagtatttaggcctgaaacgattccataacatgtttgtatacactggtaacatcatcgcacgacaacgtggagcacatttcaaacccggccccggtacacatatatctatttattccatatcagataacatctcttgttaacacgtgattatatgttgtaggagccgctatgggtagagattttactatatatgccaagagaagtggtcgtttacagatattgaagaggcgtataagtgtattagatttattggcagaaaatgaatatattaaagaagtaaataagaattatgattcgcctaccattaacacactttccaaaatctggaccaaaaaaacactttaaacaataaattaacaacttaatataattataatactatatactgctttaatactcttaacaacactaaatattgttaataagcactgtaaatagagtttataaagtgttattgaggtaaatttggctgtaaaccaccaactcaattagcatgtgtaagaatgtactagccctaccaatagttatgaacccattacgatatgacagtaaattagtgtaaaaaaatggtaataaaagagtgtgactacaaggcgaagttggtcaatggtttgccagtgctatattgcaggtttggcaagaatacgccttggattaacattagtaacaaaaggtttagtattaaacatttctctttcagtgatcccgaaaatcatacgcatagtattaatgagtgtgaaataacaattgaaggcttggtggcaaaattttcttttccatttgatgtggacaagatcctctatcagaatagagtagttttgaagacttgtgaccgtttctggtctggtaatccgaaatatatcctctttgaacttgccaaaaacgagtttacaattggatttagtcatggagttgagagaaaagtggatagtaaagtcgaatatggaggtcgtcaatatggaggagaacttgacatagacaagtctgaaaacaaaaaacctgaatcaggtatctttatgtacacttttcatacgaaacctaaaggtataaagtacgagggtgaagttgtttgggagtctttaccaggtgaagcgttacctgatagaatgttaagagatgaggaaactgatgaaattgtcgtcttctttcaagacaagtaccttgttagtaggaaagaagatggaattagaacatccgatgttcatgaattcacgcaatcccatcgagaaattctcaattcttattttcataattcatttcgcagcacttaatagatttatacatataatacacatacacatacacagtaaattatacatggtctaagtataataggtatagtggtagaggcatatattaaaccctaataactcagtataccctatgtgatatacactcaacttgctaggcctagaactaagaacaataatggtatataatatattgatgagattagtaagttctttcaaatggtggaatagtttccatatctttccccaaagtttcatctattacattacgataatcgaccacgacatcatatcctccacaactcccatcatactctacaacacataattagtatattacagtacataactaagtatagtaagctcagagatagaactatcaggacatcttttgattgaccaaggtcccagagtataactacagttacggataactactataagtaagtccttgtaggggctggtgcggtgtgaccaagctccgtaacggagctccgtaacttacgttgtgaaggattgtgcagaaaagtgagagtatgtttcctataattctcatcatcacgtttggggaagtcttcgcgtgagtgtgcacctctggattctttcctggcttcagcaccagtgacggtttgtaagctcaactgtaacaaattctcaagctcaagcgcctcaagtaaatctgtattaaacactttactcgagtcacttattctcacatattggaattgattagccaactcttttattctctctcggccctcagtcaatgagtcaccattcctaaatacacttacatacttttgcatactcttctgcatctccagacgtagctcactaggcttcaccacattggctgagcttactgagtgagagttagttgtgttagacagaagattgtgtagtttgttggaagctttttcaatggcatctttatagagtgtaggatcaggcaaatttgatttattactattatcagactgaatcttgtgattaattgtggttccggacattttcccaaagacgataatgtccaataatgaattcgcacctaatctattagcaccatgtacacttgcacatgcgctctcaccagcactatacaacccatagaccacggtatccccagagttggtgggtttcggtactgtcattttcttcttcttaccacccttaactttgtcacctaagaagttaccagcagtaacaccacttgacccactacccgtgggactggtggtgacaacttcagttttatagttggtgggcactccgcccatattatagtgaacagttggaagtactgggatatactctttggaagcatcaactcctaaacactcattattataaaaaattacctgcaaagatcttgctggtctctgtaatccctggcaacttttctctaaaaacatcctcacttaaatgtgttaaatctaagtagagatgatctttatttggcccgcaaccacgtccttcatttatttctatggtcatggatctgctaacgacatccctcgaggccaagtctttggctactggggcgtatcttgccatgaaagcctcaccttcagagttacgtaaaatcccaccctcgcctctacagccttcagtaattaaacatcctgcggggtatattcccgtaggatggaattggacaaattccatgtcctggtttggtaacccgagtctactcacagctgcgttaccatcacccgtacacatgtgagctgatgtacaactgaagtaacatctaccaaatcctccagtagcaattaccacatgattactcctaaacacatgtaattccatattactcattctcagaaatataccgccaatcacccctaaaaatgattcatattatataataaaaatatatacataattaatgttttatttgaataaaataaacactaaattaactataaaattgaaaaaaataaagaaataatttgatacgattttcagtgggatgtttgatgagatcgagtaggaaatattcgatgaagaatgagcaattgtatttgaggcaggtggagtacattgtgtggagtagtgagtgtccagttctatcagccacagctgcacatctgtaggcctgaccacctttgccaaaattaagactctggcctccaaacgctctctgatatatttttccatcttcagttctagaaaatgggacaccaaagttctcaagttcaatcacagcctcaggtgcacttttacacatgtggtaaatgctgtcctgatcacccagccagtctgaacccttgactgtatcataaaagtgccaacgccagtcatcttcagtcatgttacccagggcggcattgataccaccctgagccgcaactgtatgtgaacgggttggaaataactttgaaatacaagctgttttatgtcctaaaatcgacaactcaagtgctgatctcaaaccagcgccaccagctcccacaacgatcgcatcataatcatgggttaccaccttaaatcctatgatataattattggtattttggtaatattattagtattttggataagtaggattagcatgtgttgactcaggagaacaggagagagggctgattttactatatccccggaaggtgatatattttggtactaataactatactacagtatataaatgagtagtccggtaggagatgagagtgtaccgaatttagtagtggttgaaaaatattttggtgtaaaatttaaaattttattaattcggaacatttgaaataaatttaaaagttaaactcacatttaagatctttaaaaacaaattataaagttgctattccagcagattcctacaccacaaacaacggtaccatcccatacactcactaatttaaattaatttagttactttaataatggttttcattagctgttttctcaaaattctactattgtgtagagttattagtttgattctggaaatatttgagtcatacaggttatcgacctaatttacttttttacttgtaatatgaaagttctaatgtagatttttgtatattatttcttaattttgcccttctataatcgcaaatatggaaaaacgaggggagaattcaatcaaaggttctgaagaggaatcagaagagtccatggaatcttcagaggctactgaagattcggaaagtattgctagagattatctgagactgtcaattgtcttcagtttcctcaccaataaacctcttaacatacccctagtacctcccactactattccctcttagctatactatttaccttagataactccataaatatgtgtaggaggagcctgtgagatcatacgaagtgtcactgctgaagttgataactaaggtgactgatggtacgaggactgaagtggatcgtaattccataagtttaactcctggtagactcaccggcggtgaattcagctttcaatgtgattcttcaatgccattgacttatttcctagaacctttagtattactatttcctctctcatcccagcccactactgttactctcacccatagtaccgcaaatactattgacaatgataccagtgatactgtgaacactggcttatctgggtgttacagtagtttggaatgttttagtagtgtgtgtacgataatattacagatgatagggagtgaagtgatatttaagtacaaggaaccgtatgaaatgtattttagatgtggccctgtgaagaaaattgagcctataatactatggaaatcacctaaaattaagcgtatcagaggcacagtggtggttagaaacttacaaccctcactagggaaaaacgctatcatcggtgctaaacgtattttagaccaagtgtgtgataacacttggatagccctaaacacacctccagggaagtttaaacctacactactcatctcactcatcgcagaaggcactaaaaattgtatcttcacctcgaatacactttcacatccactggacattaatgacaaggttgagagtggtgacacaactgatagtgttgataccaatgagagtgtcaagaggaagagtatgagtggtagtttactgaagatattaaacttggctaaaaacaacaccaacaaaactactaactcacatcctactgaccctgggaatccctctgggaatggcaccgctgctcctgtcgtgaccactaagactgtggaagtagtggagaaagatgccgagggaaggcattgcggaataattggtgagtgtgagaggctgggagaacagtgtgcttttcgattatgtagtgaaatagcactggattcagtaattgacactacacatcagcatctgttactttatttcatggcactgtctggcgattaccaagtcagtcaaatcagactctcgaaacttaaccgttactcagtacaacttctaaggtttgtaaggagatacttgggaataatattcaaattcgaggaagttgaaacggagtccggaacaaacatattattagtcaaatgtgtaggatctaattatcacaatattaatcttaaatctttctaattctcatactacatactttgtatcatttacttagtctagtgtcgtagtactacagataatacctgaaggtagtaggttcaagtcccggaccccgagtactaactatataggcctggtcaagcaaagtatgataacttggaattctgttgagtcagagtaaagttaagggtatagtatattaggaattaggtatagtactatacctatattatgagtgagtagtctgaatgtgtatgaaaattagctaggtaaactgagggttaataaaaaaaatgtgtagagaattaagaggaaatattgttagaaaatattaaaaacttatggaagatttaaatgtttctcaacatcaagttaatttaaggcaagatattggcataaaattcattgaaatatcaactgaacattttttaaatacctcacacatgagccaagatattgagaatttaggcctgaaaaacactggaaaacaatatgataatcccaaattaagctcaaaattgtgtgaatggatgataaaaattatatttgagtatgactgtgggaaggttaatgttaatgggaaattgtgctgttcccttataaatcttcaagaatttataaaatatctattactctactcaagagataaacagatgtatattaaatttaatgtaccaaaatttctaatgttagatcttgaaaatcttcaacaggatagtgtgttacagcctaagattcctcaaaaaagattaatgggatctaatcctggaatcctcgagaagatcaaaagactgtgtaatagtaacccaaatgcagttcaaacaacaaatgaacccaccatacaagtggttaccaatctctcttctaggctcctggatcgaggtgtgagtggattatccgaagtttcatctgtagaacctcatcaaagctgttcaataccccaaggaacgcccataggaagtagttactcacctggccgcgtcattagaagtgacaagctcatatcatccaatgggtactacatgtatgcttacggtgtcaattattcctacaagctcactgaaacccctggtggtggaactgatagttcaacttctagtggctcttcaactacaacggctgctgatggctctgaaataattggacatccaccgccgaaaacaatcgaatattacaagatggagcatatgacagtgtttgggaaagataaagaatttgtagtgtgtaaactggtcaatgatgagtacactgagcaccatcacgagatcccaccaatcagattctaccgtagagtcaatggtaaatttatcctcatacgtcctaagcattatgaaatacaattacgtattgtaggtgaaatgcaaatggtcttcagactaaacgacgagtcggaatgcgttaaagtaatgttcggtgatgaaattgtttgggtcaatccacccaacagtaaatcctttgtcgtcacactactatacaatttgacagattacagcatagtgttggagactaatgtattgataaagtgcacaaaagtgaataatcaatgggtaaataaaacccagagaccgttttatgtaaggcattatgctgacgatgcgatgggtgactttataccagtttacattgaaaacgttaccaaaaccaacagtaaacacaagtacacgttggattacagaggtgtaccgaacattgaactcgtgaaatattatgataaaattatttggaaaagggaacctgatcaagccttccccaaaaccatgatctgctccaccttcagacataccaccttctctttcaaattcgatgataaacccactgtatcacattcataattcaaccacagtgttcagggagtccttcgtcagggtgacagtgggaccgtcaaactcagccctgtgctagagtaatttgtaatgttagttccggtgaaattaaaccagtttacgttgtttacacaagttattgtaggaatgaggttatttttgaggggaagcccttttgacaaggtcgggacttcccaggttcttcttggagacgctcagaaatcctcctgaaatcacctttcacagaagtgactagggtcaaactggccattctggagtctagagtttagacatatggactcaccagattcagacactctaaaacttcagtctggtgatacacataccgtgaactccgaccctggtcaatgtgctccactgcaactatactcgcctcaatctactatatatataccatatatactactatacatagtgatgtacatgtgtgtgtgagaatattaattttcaaagggtatgaatgagagtccgcccatataaggtattaaggcttctggtacaatgataccgtctggagtttgataattctcaagaatacaacagagacagcgctgagaagccaccagtgtcccatttaacatgtgtacatgttttctatcctgattatttttatcatagaatttggagtttaagttctgagcttggtaatctgtgcagttggagcagctgacaagttctctgtaatcttcatagcctggaaaccaggcctctaaatcatatttcttagacgccgccttattcaatgctccagccactattgatactattctatagggtaactttagactcctgtagaactcctctgaatatttaagcatttgttcgtgttcgtcatgactattttcaggtgtacagacgacaaactgttctactttctggaactggtggactctgaaaatacctctcaaatccttaccgtgcgctccagcttctcttctaaaacaggttgagattccggcataacgtatgggtaactgtttcttctggtacacttcattcctatgcaaggccgccaatggctgttcagatgtagctattaaaaataatttattcttatccgcatctttcatactattgactgtgttggcgttggcggtagtgtttgtgtttactgcgtttacagagttattaactgggttggtgttgactgagttggtggtgttagtggtttcaacactgttgtccggtggtatacagtagagagtggattcgaaatcatcaagttctgcgcattcggacatgacttctttcctcataaaataaggcgtatggacaggtaagtaaccttttctaacaaggaaatgaagtccatattgtatcaatgccatattaagaaggcagcctttgcctttaaggaaaaacgctctgtgaccagcaatttctaccgctttatttacctcaaggctgttaagttttgcaaggatttcatggtgctggaggatcttccaagctggtctcttgatcatctcggggattcttccaacataacttacgccagagttatcagttcccaggccgtctaaagagtttccattggatttgggcaggttttggttctgtggaacattgttctcagtggtcttggtggatggagattcccaagggagagggtttgggctccaggacctgatgatatcattgagagattcgtctttggaggcgattacatcaggagaaacaacattcccaacgagttttaggagcgaattcctcttatcattacattcttcgatattttttaagcattccgcaatgccttgttttttagattccgccaacaattttaaatctaaaaactctttatcattcgagaagtcggttttgtttttattgagttttgtgtattcggagatttttttagaaatttcgtttacgctttttttcaactggtcataggcatacattgcctttttccaatccttatcagcttctatcaccttatctactacgctgttcgattcacatctccgctcctcagattccctcaacttcttcagcaaattctcatccctaaaataatttatatccaataccattttcaaattattaattattattttatattttatggaaagtgaatttgtttaccccaatacggaatcttaaaaccggcacaagcacaaaataattaaaaataaaatactcaataatatgatgaaaaatgatattaaaaatgttatttacaagagagattgtaataatcgtcgtgttgtgatctgagatattcttctttgacgagttcgacgacttctctggaatgctccatttcctcgaaattccccttaccatcctcactctcaaaatacgccaccttcctacatatatgcttagttttacagtttaattacctgtaattatccaaaaacgctcttctactgtatagtttatcaaattgtactatacactcctctaacacctgaaaatgttattagtatttacgatataactgagaaaaataactgagtaactctgtagtttggaacttgatggatggaggtgtgattagcgatgaggatggcgttttgtttatcctgtttgtaaggtgactgcttcgttaaattaatgtgtactgttgatggattccacttaataaaatccactaatcgcttctcctttatcttttccacacatttatagacctacaatattattatttctaaagttaggaaattctaaggcttaggatggtccaaaaccgctaaattttccctcttatgagatgaataaccacttaaatacggtagttacatcggaagggttaattttatgtcctctgataatatttaatgctgataaatacttcccatttttggtattcgtgtatacctacaaattttcaacagtgttataataattaataattaactcagtagttagcttaccagaaagttattgggatagtaaagtttcttgatgagattgaggagtgtcatgttttcatggtacatgattgaggagatgaggaagtgacatctcggaatgatcacaagtgatgatattaaacttattaaatcattgtttatcggtccaggaaatcttatacaactagtaaaactcgacattatattaccaatctacagaattacagcgttaatattactatatataagtataattaggtctcccgtagtgggctgcccgggccaggtcaagctcatagctatagcaataagtacaaagtatatcaaaaaattgaatcgtagttatatagataatagttttaagagtattctaaagttataaatagggaattttatatttagtttgtaaattttaaagagagttctagaattttcaagatcagaaatctaattttttaaagtaattttctaataattttctaataatttcaaccagaattatctatttttagggtaataattagaaattttggctctaatagctagataatagtggttaataccacgtcaagtgaacatcaggattcataaagaacccaaattttctatagctaaaactaacttttagaactaattttaagcattttgatgtctaaaatgatgtttggaatgatttggaattaattaaattaattttcaaaatagtcgaaaaatttttatttttttcggaacccaaatgtcacttttgggtccagaccattttaggccaaatttcgaaaattttcaaattccaaaatctcaacccaaatcaacagatttgacattgttaagcatcagaaaattcataattaaaaaaaattaactgtgtacactgagtaaccgtaccctaaagttgtgcttgacaaggcccgtatagcctatagttatcggacaacttaactatactacaatgtgtactcaccagtttattgttgtattgtaatttttctttaaaattagaggtcaaattatcatccgatgaactggatcttgagttgaatgaagttgaactatcaaaattgtagtcattgacaacattgttgtcaataacgctgacaagatcagcattgagaattaatcttttaagtgagagaattgtgttgtaaggttgtactacaacatcacttgactttttaagttgtggaaacactgaaaaggtttttatcaccttcttcgggtaattctcatttatcatctccaataagtaactccccaatccactaccagttccaccgccctaaacaaaattataggctatttagggttttaaaatcccaagaataaaagggtaaatagtaaaattttcggtcccggaccagtcaaaggagtcaactgttcctcgaactaccctaactatatagttgagtagtgtgatacgatagagtgtgagagtatgaatccttcgagattatcagcgttgtcaacttcacgatcaacgatttcagataattcatcgtttaactgatttccatacgtatatccaactccccaattattcccagctcctgaacaacggagttatctcctggtattcctcatggtatttagttatataactaagttaaaagtaaatagagatgtgaaaggaatttacccatggaatctttggataagaagacattttcgggattaaataaattcttattttcagaattctacagcaatagaattaataatttataatataattgataaaatgactatgaattacgagtatggatgagataacgcgaggttctaaatctattaggagagctctgggatagtaacgattagtgccagtttggaagaagaatacatctctattatccccaatacactttttatccaataaaaatccatcctaatccattatagaacaaatttactcaataaataatattagtatgtgttttactttgttgattccatgttcgagtgagatttgattccagaattcgttggctatgttattcccgcattgtccaacttgaagcgtaacaatttctttagtcatttttacccggtaaaaatgacgtcattttaaccaaattataatacaaatataattcggaatatccaaattttgaaagaaaataactcaaaccaaatttaaaattaaatattatttaaataaattagtgtaaatattattaaaataaatcagaaaaaaaattaattagcaattgacgtgggtcaacaatgttccaataacagctaacattaactaaattatacaaatatcataacagtgactgaattctattaatattaattaaattataaaatttattgaatagttattgtgtatgtgatgtgtttggtgaaattaaaaattattggtggattgttggattaaggttcttcaggctctgtggtatctttgacttcaaggtcttcatctccaagtggttctacagattctggaatctctaaggaaattgctttattcgccttctcatcaggaaggtcgtctacagtttctggttggcctttcttattacaaactaccctgactctcgttgttccacagtcaactttaatgggtttttggtcctttcctgttgttgctaatttactttttaccgctcccaaagcttctactaatttcttttcagcaccttctattgattctaatacgggattcctcttatcttctgcatctccaacctcacttgcaaaggtagaatcgcctctcaaattcccgctatccttaccattagtttcttttaatatgtgttccggtacatccacaaatgtcgatttcattttatcatcatcctttttttcagttggttgagttgtttcagtgggtttgttggtgtcagttggttgagttgtttcacttggttgagttgtttcagtgtgtttgttggtgtcagtggaaagacctcttttttgacttgccattagttctttagtaacattttgtgccaccgattctaaagcgccaaatccaggtggtgataagatatcaccaacaactgtttttaccaataggcccgctaaagaaattattaatgctgatttcatttttaactcaattataaataaatatttagttaattctactaccaatagattcagtgatttcctttttctaccaattttcatttctagaaatttccacaaaaaatcaacgttccaccttttttccgaatttttacattttcatccgtatgatttatttttatttaattttttaattagttttattaatatgtaaaaaaatctctggaaaacttagaaatgtgtaaaaaatgtgtaagattaaggtatgaacattatatggattaaaaaatagtttcgaatagagtgtccatattagaaggagctactctataaacccaagtattacctaaactccgatccaatctacttgttctatcttgtgctctcttacgattcactatcaaatctctaaacacattaattagtaccaaattatcataattaagtagtaaaataactataaaactcgtgaatttatacctaaggtcttcgataacttcacgattgagaaaccagtatgaatgtctgagtgcgtgtacatttgatcctaggcatgtggtatcaataacatcaacatcaagccagtgtttctttttcctggtttctataatttctctattatgtttcttgttctttttaagtgttttaacttcctcgagagtaaatggtaacattatactaccaagggtgcatctcttctccagcgaggagtcaactggctcctcaagcgtgtataactcattcacacacctgcccaatctcttcttacccgttattaattcagctattttcaaagcctatagaatattgtattcacctgtaggatgagtatatagctgagctactggtgaatagactagggataaaaaatgactaaattgagtcttaaaatggcgttaaaactaaaaattttgtctaaataactaaaaaactaagtactcccaggtggctaggtagtaaaaaactaaagaactggtgccatttgaccaggctcagtaacgcaataccttatcattgatatcagaataaattgtaatatggctgcaatagagtttcagtttggggtaatcattttgaatgaaatcgtgtacaggataaaaagggttcagcaatgtgacggtgagaattttaagtttaggatttgcggaattgcgatgctcattgagtggtaagaataaatcagaatactctttcgagtttaaaatctgtgtaaaggcgccgaggaacatggtagcgcccatagaatgtgccatgatgtgtacgtcccgaatattattcaccagaagtgcctgtaacattcggataaaagtatcaacagtcttcggacaagtactggagacaatagcctctttaaattgtgtcaatttatttcccgaaggccagctgaatacaaatggtttaatatactgagggtaatttccaaatgatataatctgtgcaaatatacccagagaatccgaacacttgacattaaacccatgaatataaatccaagcctctaatgctctcacttcctctttcctaacccaaccatcaacggataagatattataatttttcactctgcccagcttgttctcaatgtcgtcagagggtaaatttaccactttatttgacggtgtctgttcatatttcgtggtgtttaatctgattttaacagatttacaataatctgtaacaaattcctgtaacccgtcacggttaattttagggttctggacatatccattgatgttaattcccttattgtcatcgactgagatgttcaaattactagagtccagaggagtaaaattaggcgtatgtaatgttaaagcgcttattaaacattccatacagttgacaaatgtggtcaagggtataccaggttctttgatcccaaataactcattaatatcttggaaaatgtcacggatgtgtacattttttagcacgttaaagtatgggtttttcttaccattcagatatgaatctacattaccatatctgtacccaactatgtcatttgacacatgattcaaactcattactatatgactatccgtacaataatacttactgtccatacgctcatgaaatacataacccttgttcgtaaatattttcgttaatatattaccgcccttgtcccccttatctttatttttacccttgttattcctgggtgtcagaataacattcagcatttcattcgattcttcggaggctgaatcctttttcattagatgaattttattatagttaaaaaaggtattggcgcctaggtacttgaggactctgccacctcttttaccgtcagtttcaggtactgtgaagaaccttaaaatacggggaaatgtcctgaaaaatgggcctgaaacacaacattcagctgcagctactcctaatccaacatcactctcaccgccctcatatcgaacccaaccaataatcacattcgaaaatcccgcattcgtacccacctccctgctcttaaacggtgataacggtaggcctataaattattattagcacatagttaatgtgtgtaactaagtataactatgccagtcaggggtgagtaactaagtaaattagtgagttgatacctgattcccagaaacccatgagtaattcaccgtgataattgggtgagttccagaacccaaacccatgaggcttaaactcagaatttaattgtccgacgtattgaaatgagtcataactccccctctttttaaagtgtaaaaaatcaataaaacatttgaatgaatagtagattgagtttggtttcttgaatctggaaagagtaactttataggctggaattttccctacattgagattagttccgcccatgttcggcgcgtttaaggtcatctcctcaaagtctgtaaccttgaaagttttaacatcttcattaataattgtgagtaacaggtgtgggtaaaagaaacgataaataaaagcaatcaggttaaaaaataatattaaaactgtgtaaaatgtgaggaagaaagtgtcgtaaaagaatatcccgaaaatgttataggctctgatgttgaaaacggctctgatattatcttgtccagaggtttcctgtagtgaagagttcatggagtaattatatatcattaaaactgggtatagtatgaagtaaactttcacagttattttactgaggctgacgattttacaaaacgtgtttggatgaatgcaaatgtacaaattaataattgaaaacacagtggaaccgataaatataataagactcaggttattcaagttattaatgtatagagagtaccaactcttgtgtgtgtcgcctcggatagtaccgggatctgtagggtcaaaatgctgagaaactaatgaagtggttaaaattacacagataaccattaaaatatgtcctatacaaactgcatatgggcaatttttaaactctcccgtatatctccttatagcctcacgatatttcatataatgtaatgtacataacatcgaatggttcaattgatctggataaaccacagtatcaaacacttctatctgtatcggttcatctataacattcatcaaggatgtatagttaagaatagaagtatagtaatctaggtatatagttaagatatagtagtgggttgaatactttgtgaatcggtttgagttgaatcgctattgtcagattttttggaatctattttatcatcattatcattcgattcttgattagatttcgttctaaagaaagttaatagtttaaagggagtttcatcttttttggcggtatctaacgcctcctccatagcattacttaaattttcggtgctttgctcttcagcaccttctttggacttcatttttaaatcttttaaataatttaacaagtgttttcccaaaaaataagaaatgtgttaaaacttgcgattaaaacaaaatagaattctattctaaagtatcaataaattattaatcggatcatttccacaaacgtttaaatcgaaaatattgtacataaatatgaaattgatggctatttagctagttaaatattaaagcaatatttacacatgtgtaagaatcaaattgcacaaataagccacccaataaagcaagaaaaaattagtcaaattccttgcacatctacactaaattttaatatttcaattattaatatttttaaaattttattgtccaaattatattcagaaattttcaagtttaaaaagtatttagagccatgaccacaccaccaggaaataacaaatcattaataaattacaacaattcaaaattcccatttcttaatgacgaaataattatttaaacatttttacttcaatttaaaatcaaaagttgagattttgagcttaaaccccccgtgacggaatctcattaaaaggggcaaaaatagtataaaacaatccaatattctcaagataatatatgaaaaaataaattatttaaaatcatttttgagatgattttgccgaaagtgtctttgggacaaaaataaaaaagtttccaagatagaccgggagtgtgtaactttaacaattttttaaattttttctctccctagatattttggatcatttgaaaattttcacaattaaaatttagtttattgtttattattatttattattccccattggttaccgttgttttattcttcctcatattttacacatcacaatattccagccataatacatttttaacattttatgttaaatttttattttattaaattgaatttacatttgtcaactgagcaataatttttaaattcaattgaaaatttgtcaattcaatttaaaatttgaataatatttaaaatggagcttacaacggaagaagctcaatcacgtgttgctttattaggggcacatacaaaatccctgtctacattttttgaagatttctcaagtccactagctctaccagatgaagatactgattacaaacctttcggtgataaaagatataaaaatcagctcgtaaataaatattctattcttataatttttagcaattaattaaaaatggatcatccaaagttttaaaagtttatatggacgacgtcagacaagtatctaatcatctttcatattattgttatacaatattatttgtaatgtgttgataattgtgtagtactttttgaaggagaataatgataaggatttttatgaggggttgatgatgaacacttaccgttaccttgaacttctctacattgcctcagaaatggtcctcgaaaaattaaccaaagatgaaaatcacccagtaacactctactaatactattatttatacttaatttgacatgagttaatggttttttagaagtttggattatattacgatccaattgatgagttgagagtatcaaggatgaaacaaaataaactgccaatcaacctaagatccaactagtacactacataccgtgccctaactatatccctatacctaacactatcttataatttttgtagtgacatattattgataaatggaaatgatgattatataatgaagatgaagtatgtgaatgctgatttcgtcggatgtctcgtcttgattgaagttgacgttttcaaagtcgctaacatctcaccaaaattgctcattgccacctacgaatgcgacatctgccataatcactcctataaaactgtatctacactatttaacagtttaatgctattcaacagcttaatagtagttagatagtttgatagtattgagagtggtgtcactatggttcagattgagggaaataattatatgccgttgatggattgtgtgtattgtgtgagtacaagaaatgttaaatcatcactaaaatttcatcccaagtaactttatttagttttaacacatttgatccaattttgcgtaggctgagcaagtttgagaagtatcaagaaattcgagttcaagagcctctggtacacttaaatgaaggggaaatgcccaaaaatctcaaatgccaacttaccagtaattttttactttattttactatagtttacccagctatatactactggggaagcgggcccagttcatcagtaacgctcgtaacttctataataataatgttgttagatacgttggttggattattgagacctggagataacattttattgtatggtatattattaccgatgtttaaggagggatttaataataataaattcacactgctgtctgacaaagtgttcaaaatcctcaacatcacacacctgaaaaaagattttaaactctacaagcaattatccaacaattattttcaactgtatcaacatagttacttattacttagcctaggctggtgtatttaccccccggaggggatggttaaattgtctaccagttcaaactctcaaattactataggaagatggaagaattgagtagaagcccgaatgtatatgaaatattggcaaatagtatagcaccagatatttatggacatcaagacatcaaaaaagcactcctactacaactcgtacacactcagttatacacgcattactattaatatacttaatattaatactttgtcagattggaggatgtaatgtggtgaaaaatgatggtggatttataagggggaacattcacatattattgctgggtgatcctggcgttgcaaaaagccaactaatgaagagaatctgtcaaatctcaaccagagcaatttatactacagggaaaggtagttcttcatctggtctcactgctgcaattgttaaagatcccgttactggtaagttacggtgttccgttacggatcttgtacacccatacttggtcattatttacactacttttaatactaatactatgttcaggagacagcgtattggagggaggtgctttggtattggcgaataatggcgtctgctgcattgacgagtttgataagatggacgacgaggataggagtgcgatttatgaggttatggaacagcagaaagtttcagtagcaaaagcaggtcatgtgacaactctagcagctaattcatcagtgttggcagctgctaatcctttatccggtgtctatgacattaataagtcggttttcatcaacattaatctaccgcacgcactactctcaagatttgatctccagtttttactgctggacaatattaactataacaacgactacaaactctcacaatacaaacttaacaatctgaacaatagtgctgttaacagtgtcaacactagtaacacagtcagcatggagaatactcaggaaaccgctagtaacactggtagtcaggacactaataccaattcccacaccgccgacaagaggaaaagatctaaatccagctcaaagaaaaaaactgccagcaccactaatagtgccaagaatactgcgactagtgggctaccatctgatacagtggtgaatgtgaatttattgagatattacattaactattgtaaaaagtttaagccggtggcgagtgatgatattctgatggagttgtccaaatggtacatcaacaacagacaagatgaactacaacaagaactctatcaaaattatcaatactcctacaccactccaagaactatcctgtccattctccgcctgtcacaggtacaatattagtagtttggtgttaatattactcaattaaccacactcccactcactcgattactttaggcattggcgaggatgaggtttagtaatgatataatcatgtcagatttggaggagtcgataaggttaacggagagtatgaagcatacaatcaactacgaactcctacaacagaaacacaaaagaaaaactaccacctcctccaatatcatgtacatcatcaagtaccttcttattcgagttatgtagtttgtctccacgtatatatactaggcaactggttacgtcatgatgtattagaaatctgaggaataatttgaagaacactaaagaaaattgggacggttggataaatataaatgacgtggaacagcagttactatcaaacggttataaaactaaagatttaactgacttcataagcaaatactcgcaactcgcaatcattctcctcaacaacaataacacacaattatcatttccacaagatgtaatatgatcaatccactgtgtgtatagttatattagtgtggaatagtacatagttaatgtattaggtcagaatatcacattggatttagataattttaagttaatgttcaagaataaagttttaatgacttcataatttattaaattatgatcaaattttgaggaatttgaagtttccagagtcggcttgtatgtgtttgttaagtttccgttgccgtaattttgagttatttccaagttataatttttgccgtaaaggatcggcttcaggtgttcaacgagttcagttttagtaactttaaacccaagtgtgtttaacccattgcaaaactccgttaaagttaaacattcggcagaatcacttcccaccgaagctttacataatactttatataataacgaaatgactttatcaaatttttcggtgtattcctcagaattatataacttattcacgcttctgctacgaatcttcttaaccttgcttttaacagtggtttttctccttttcattaaaatttaataatttattgataaaatattaaactctacaaatattaattaaactttattaaattataaaaaaattaaataataattaaaaaatataaaataaataataaaagtaaaatgtatataaaaaatgtgcaagtgatgaggataaaaaattaaaagttatttgagtgtgagattgtgtttgggtcgtttgtttttcattttattgtaattgttgagcgatttgttatccatgaatagcttgaggaagagttgtttgtcctcctcgttactgagcacaattaggtactttgtgggcttagccttgatgtcgttgaacacttttattatacacttaatcagctcgctgaggatcttgaatatgttctccaggttactcaactcttctcccacaccgccactggcagtcttggtgatacttgaaacgtcctctcccaggtagatccaaacgttcttaatctgattgtaaatctcgttcttctccacattgatctcattcaacttattcttgcacacgtgtaccacgttattcattatttccaccgaatccacatccttagcagcgttgtcagcagttttggtgctgtcaccggttttagggttattatctttgttggcgtttgcagtagcatctttagcgctggtaacagtggaggtattggtagaattgaggagcgatatgatgttgacaagctcgttggataaatccttgagtattgtgttgatgtcgcctgaacttattttctcagccctcaacacatttgttaacttcatatttatgcacaacaagtcattacttatatcaaccaactcgtcaccagcactgttgttctcggtggtaggagtgttgccgttagtttcatctttatcaccagtgctgggagtggcaccattgggactagtttcacccttggtatcagttggttccgtggcatttttgtaaagtttaatgtacaggttgatgatgaggtagtgtagtgatgagagcaagttatcttgagttttaaagtccataagtttaatggtagaggaaagggtaaagcctttttcggctttaatacttccataattcacaaagttgccatactgaagtataatattcaggatcagcggtaggactcgactggtcttaatctcctcaatagctagcttgtagatgctaagttgttcattaattaagtttaattgatgcttcaggtcaatgagatatttacagagtttaattttacagtgcatattctctctcagtaaaatctccagcagcatccgctccacaagtctatactcttccaaattactatttgccttgtaactgttcatcaacgactcgatctcattgctattcggatatactatgtataatttcgttatattatccatcaccaccgtatcattcagattcgcaaatatatctccagccaaacaagctgcggtgtcgccactatcaccagaattatctgtattcttcagtttattggtgtgaatattaatgtagacgaggttgttgacatttttcaagagtgtgagatagtcttcataggagttgaacctcagtataatggacaaattttgcactcttttattgtccaagatttcaatcagcttcgtcttcttggtggaactagggtcgttttcagctttatttttgtcacttaaatcagtagttcccatttttgagaggtttgtgctactcgtattcgtacggctaaacagcttctttatggtcatcgtgtcaatcaactcctcgttgtaaatatcactttcgtgaatgctgctgaagatcgtgtcattgaacttgttcaggggtttccagtgtaatttgacacccagtggtaatactctttttaccgatttcattgacccttttgggattggcggtgggatttttcctccttttttaggtactgggggtggtgccttacctgctgctttagataccggcggcggcgggggtgctttcttaaccatcctttcctctattttttctggagctttaggaactcgtttgtctgcttccttggtcttatccgactctttatctttatccattattttactcttatcatcccctggtttgccctcgccgtccagagccttagactctggtgtgagtttgtcaggtactgcgattgtggttgtgagtgtgatatccttaacctcaacaacagttgaactggaactggaactacttggtgttttggctacagctgcattgactggtgacgagatgttactgtccaaccttgttgttaatagtacttctttatcttcttctgcacaaggttgggttgtgagtgaagattgtactggaatgtcgccagtaagtactgatggtactccactaacttgaacggatggcacagattttactggaacgcttttgataagttccaaattgttaaaactactatctatccttataggtgttacttccgccactttaccagtacttccatctactgacttggtggtagctgtttcacctaacttagcagtatcagtccctactgtgagagaagatttatctgatgccatagttctaaaggcatgtattgaaccggctttacttgcaacttgtggaggataagtgttattgagttgatttcccgtgaccataacatcacttactgatgtactatgtgtgcagtttgtgtcactggtgataaactggtgcagctgcaagtttgtaatattgtgtgttatcactttgctgttgtaattcaacaatttaagtagattctcattatttatattctcaaacaaacttatgtcgcccatatcacccaagttaccaggtttgtcaccagtgtcaccagactgtactgacccatgagtttcacttggtggttcactaatttgtagtttggacatgtgattaatgaattgatggtcgtcttgtatgttaatattattataataatcattggctatgttattataataataattgttgtggtacggtttgttcaacttgatcagcaggttcatagcattggaaaagttattacaaattttaagtgccagaatacaagtttccttattgtgtcctgtcaacttcattaaattctcacactccttcatgtcaattttttttatgtgattatttataaaattcatcacactgccatatactattgaataagcgtccacttcatatgaaggtggcttacataaatcacgatctgtcatctcagtaccatccagctcatccaacaacgcatcatgttttaacaaaggtgattttgttacatctgatttagtaacgtcggtctttgtggcatcagatttggattgtttggaactcttcttcgttgcgagtgatttgggaattttcaagttagccgtttccaaatcagtggtgttgataataattttaacattgtttaataataaaatattattattttgctcccaaatatctaaatcatatttggtcaactgcattgtcatgttcgttaacatatttgtattgaatgagtaacttccaatggatttccggttcagcttgttcttattaactacaaaaactacaattatatcatcctctaatactagcccactgttattataattatatataaccacatcagactccagggatttggtacccgacgacttattactctggtgcgtgacgttgagactacttagaagtcctgaagtacccggcgcagaagcgttggtagtggtcacattataattatatggacacgagattaactttatgttgtcatttgctctggtaggatcgggttcagtaccttgggcgttatcttcctcactaccgttacacttgtagttcttgaagaaaatactgttgtagtacttacaactagtgttagagtctaattttagactatttgaccaagcatcttcttctttagtacgatttgtctccagcacagagttcgtaccggcacccgagttaccagtcgtgtcggaatagttgtacatgctgttgttataatcattgatttgataaatttcaatatcaatgttatattgcggaatcaaggtattaatcatgattatgttattcagcaaacaacttttcttagtatacagtgacgtagtgttgttgaggatataattcatatccagtccattcgtgggtgtacacgtaccatccctggaatcagtggatttcctcctgtcagattctttaatatgtttcccacaatccttagagtgttttcctggatccttcttgtgtttcccagattccttactggacttctccaagtccttacccttttctccaaatgcctttggttttaagatatttttaacggaattatttaactgtttatagtaggataaatatcttttatagcatgttggccatttcaacagtgggtacatcattgggatattctcgttatttggtgctcctcctgtattcactttctttctccacgtcagtgtgttgagtaatttggactccagttcactggtctcagttccggtggctatcataatacaggcgtaaatcagcattatattgaagttaatattattatagttgagaattatcaggttatccctgctgtcaaaattgatccagaacagtgccaccgacaccactttaagtatgtatgtcagggttgggatatatttgtcattcattggtagggatatgatctgtcccatgaactcgtacatatactcaaagttatcatacacaccaatgtggttgtaactgcacaaatccaagatgacatatttctgataattcagtgacggtagatcacagccgaaatgccttatactgtagtacttgttatttatgtatatcaggttcctatcatcttcgttctcttttaacttcaatatcgctgatttattctccttattatccactattggttcaaacaggatgttaatcttgttgtaaatgttgttgcagaagctgattaagtaatttaatctgctatccaactccaaatcttcatcttctgaatctaatccatactcgtctttatcagcataaactattcgctttactattagtccttctcttccaataccttccttatacttactcaaaccttcagtgtatttttcggggtataatttcttatggtttgcgtcatgttctgaagtatcgtctgaacctcgttctgtcagttgtgtattgaggttatattgcagaaagtatttgttcaagagtttttggagtattttgaagaaggtcaacaattcatgtatgttatttctgagtgtgttttccttgctaatgtacttccagggtgttctgatactgaaaacattgtagttaatacactggatcagaggggtcacattctcatttttgaccaataacatggaatttgcgttatttctctgcttattctgcttgacgtagtttttatctagccctgaaatgactttgttcgacttcattttactgtaactttctgacaaattctttatacttacgctcaactgacgtattaaccttttttcaggtttgctcgtgccatcaaccgaattctcaatctcatttacgttattatccacatttgatatcatatattttaatccactgcaattttacactttgatattatttttaagcttttaatgttggttttaagctgttaatattatttgtacactgttaataatatttttacacctcaaatctcgaaattgctacaatacacttttaaattttcgcacttaaaagcgttttttctcgatacaatcaatgaaactaatagaaaatcaataaaaataattaatattttacatcttaaattaaattaatttgatacggtacaggggtaaaaaatatgttcagggggacattcgtattgggtaagaactcgtaaatatcatgttaaatggttaaatattaaaatttaaataccaattttgggaagttaaaaatcgttttaaatacaatttaaagttagattccaatatgtgccataagattcctgtatgtgctataaagttgcaatgtgtggtatgagaatcagtgtaacttaacttgtaaaaattattctctaacattgcttcatgtcacaatttaataattttgttatattattactatagttgataaaattaggtgtaacttctgggattccattctcacatttcgtacaacatataaatttagtatcttccagggcttgtaaatagattttattatacactattacaattccaacgttcagtagactgtagactcgttctgatagtaataaattattttttatctcagccttttcactattagaagaagattccatttcatctacctcacacactttttctgattttggagttaattcctcctccaaatgtccttcctcgtctttttcaaatggtttgccctgtgataattttaaatcactgttaatttttccattgtatttgttttgtattaaattatttttgagtaataattgtttacttattaggatgtgtacgcatcctgttggatctccagccaatagtattatataatccttatagtattcatttaaacaattaatattttccagactttttgtatctccaaattgtaaaattatatttatcgttttataattgttatataaattaatatcttcttccacaacagaattatcttctaaatcagtattatgttcttctatataaatattatgttgttttacatctgttgtatcagtttgtgagatgcgatttgagaggaatttgggaatttctgagaccgtgtaaaatggttgcgataatagttccaaatcagtcttcttttcggatattttggataaaagtaatttgtaacctggaatataatataaatttgccatttatagtagaataataaggatgaataaataataatgaattggtaattgtgggattccatacacattctgtcacttagaaatttataatttatacttttaaaatgttcaagtgtattattaaaaggaacgtttcaaatgttgttttatcgcgaattaatcagaatttgttaaatcaaccgtatgtcaaatattatttttattattaaattagtgaataattttttatttttcaggtataatggtaataatgtgttaaatgccataaagttaacccttccaatactggaaatgggtaacgaaactgtcgaaagcgagctgaggagtttagaaaatgaattgagcaggtgtaagagtgattacaattccgaactttttataaatgagagtcttttaaactttaaaaagaagattatggactcaatttataccaacaacgttaagttcgaagaggctaaaaattacattctgaacacaaattgtaaacttttccgtccaatcatttccttctacatctatcacatattgaattcaacaacaaattattcacaattagatgcctcagtcggagaaaattcacacttacctaacccagttgagggaaacacacgaataaattactcggatgattcacagatgaaatcaattgaaaagttaaacatatcatatgaactaatccacatcggtatggtattaaataatcaatattatttgcaggaagtttaatacacgacgacataattgatgaaagtgatgttcgcagaaacttgatgagctcacataagaagttcggagtaaaattctcagtcttatttggggatttcctgttatcaaaatccgcccaaattattacttctcttcaaaatattaaattagtcgataaattatccaacacactagataatctaatacatgtaattccactacagtattactaattatatatttagtcttaatagtttttagttttagcccagttatttggtatcattgagttgaaaaacgtttagggcgaattgatgtacgtcaatttgaacaataatgatttgtatttgagttatttgtacaaaatttatttgaaaactgcttcactaatttcaaataacatctcctccgtatctcatctcacaaatcagtacaattttcaactaggtaacactatactcctgccgtatataattatactattttattaatctttatactaattattgttttagatgaattgttgtatataattggtgtgcatattggattgagtttccaaatgtgtgatgacttgcttgattataactcaaacttggaacatctaggaaaaccaattctaaacgacattaaactagtaatacgctaattaactttattatactatttaaatttattaatttgattgttattgtaaatttagggcctaattacattgccgttaatatatatattgaataataatggaggtactgttgttgctgaggggaattctgttaattctgacagtgtcagtagtgttctgatggaattgaaaaggttattaaataactatgaaaataatagagaaaaactcgaaataaataatataaaggagtttttaaaggttgttaatgataaaaataacattaacaagtgtaaattatccatttactatcatctctaccaagttaaatcactaatgaagtcgttcaatcaaaccaaaaccaactctctaatcaactacatctataatgttgttaatagatattctacgtattattaatatatacattacaatcagattaaagtttaaaatatttgaattttcctcaaatacaacttgagttgaacatttgataaatattttacaaattccaataatattgagtgaaaaatcaatgttttggataaactggaacttttagatctgtgattgccaattgtctgtttttaaatggtctgggatattttaacagatttttatataagaattggaagccagttttattagaggagtttggacaaaagggattcgactgcgatttataaggtacaatctgaggtattgcacatctaacatatgatatcaagtccttatcatcagcagaattcaggattatcttctcaatttctataaatttatcatatttaaatcttaactatgtgaagactaagattctaataaataaaataataagtatcaaaagttacgttgttgattgtttaatgtgttgtataatgaaatgtttttcatgtaatatttgtaatggaaatttgtgatatcccacatcaaattatcaataaacggatgaaacccgtttttggacagttttgtccttctagtcaataggccatttctcaaataacgatacgacattgtaaatacacatgtcaaattatattcattaaaaattatactaaaacatattaaacggaataataaataagtaaaatttttagtataaatagaaaattacgaaaaattaaataaattatagtaatagatgtgataatttacactataatatgtggatgtgtaaatgataaaaacagaggaaatatacatttaataacttaggaatgtcttatatataatggatacctcaattttatgcatttaatttgaggaagtttgttcttaaacatggagaaggctttaaatgagttttctctactgtggaatgatgttggcatctttaacgatatatcaaaaataacaaataaacagaaggttgagacagaagaggtaagaaaacttatgaaatatttatttcaggttaaaactgaaacagccactcatcaaaatgatgatttgataaatgacatatcaaagaaatggaatctgtacctcaatttacacaatatttgctcatatttatactatttaattatgaaaatattaatattaataatttcagagaggctttcgagaagaacgacgagatgataagattacacgagaacatattaaataatctaagcgaattaaccattcgtgagatatctttacactcaaattttaaaaccttgaatgaaaattataataatttactaaacttgcaatctcaactcaacgtaagtttacacattttaacttaattttatagtctaagattaagaaggttgagtcaatttatagccattacagtaatatgaacttggtaaacgagtttaataacaatttcttcaatattaatttcaatgactctaagttgctatgccaattcctaacaaaggtcaatgagatgttagttctaatagtgaactcaatcaactttttcacacttaacaactattataaatctgaagtttataaaaataagtaccaacagcaacttaaaactattttatataatataaagttgctgtttaaatttattttcaaataccacgttagaattggacaaactaatagggatttaaattctgaaagttcctcactagaatttgaaaactcccctgaattaattaatagtaaaaataatttagttgatgatgacccagctaatgatgttctggtaattaaaatcctaaaattaatgaacaaaataatgttaaatatgaataatgacgatgatgtcatacaaattaagctctactatattaataatattgtcaactcacagcttaaaagcactagttttgatttggatattgagaagaatagtgaatcagactccaatcctctattgggtgagattaaatctctgataaataaacaatttttgtactataatatactatttgaaaatgtgattatcgaggataaagaagaaataataaccctattagttaataatataaaatcgcaatttaattataagggacaagatttagaagattataaacactttttgttaaacaactccttcccagatgatgataattcaaacatagataaacaatttagttgatctaaccgctatatttaatgtaatataccatttatattttattatattacattagattataattggaaaatgtaaattccttcatcggagttgtatgagaatacgttgttataatttaccagattgtaactccatcctaaaataagattaatatcactctaattgtggtaataaataagatttgttatacctagttcgaaagttgagaggatgttgagtttacttaaaatttccaactctttgtttagtattaaaatttgtgagtttttaaacaataataaaatattttcactgcagtttacagctaaaatgtcgtacgagaaactcttactgctaacgatattcgcatcggcatcattgatgtcgtataaagttaaaactaataagtctgtgaccactgttatcatattatcccatattttacagtttgttactaggtggtatttattgtctatattaatcctgttaaccaaagctaaattatacatttcccgacttttagaattagtattattcatagtgtcgactggtttgagtgaataaatatttacacatttggaattattctcttcagtgttaatcttacaagtgactacatatggaaatttaaactctagaacattttctatatgtatggtactgttgacatactgtattttacacacaccgtcttcactttcagcctcagttaaattcatcaaagttatagtactattgcacataattaggacgtaattgttattttggatgatctgtttgtaatttttatacagacttgtgctattaatttcattattcacatacacgtctctgtgtatggtgtagcgatcaatgtcataaattactatgttattcagacctaccagagagtataatttaccctcaaaaatgtatacaccgttcacacattcgtcattatatgttgagtatacaacatatctaccgactactttggtactagagttcttgttatcacatttacttggagtagatttcgtattaagactggtagaattttgttttgaattatcaattgatgattctagtttatcaatttctactataacatctgaattgctgaggtgttggttttttgtgttagcttcttgagttttagttgatgaacgaatatttggtgggtcatccgccaatgtagtatcattatttgtggaagaattagtatgagtttcaaggtttgagttaaaaatatatgctgaaactctaccaagtgcagttccagctacaataccttccttgcccatccaaaaggatgttactgggtcacccatttgtgattccagcaccagcctgttataataattttccttcataatttaaatataatcatcagtcaaaaacaaatacatttacacatacttattataatgttatatatctggtacaactttaagtacatatgatagtatggtgtaatttctgatacacatgacgttatttacaaacaaaaataacataaaatcactttatttatgttacaataaattattttaatcatattaaaatgatttcatgggctgaaatttcacggttgagtggactcggtaaccactggttcaacatggccagttttatcagtatgttcaggagtggattccacaattttatatgactctaattgatcctttaaaattacataaaatgttggaaactaaaaataaatgtgaagttgttattagttgaatttatcaagtagaatatgaattcaattttagaatcaatgatagaaataatttgagtgtgtatttaaattttatagttttagttaaaacttacatcaagtatagtgcgattaattaaattatttaaaatggtctcgttaacgttacatttagtgtattctagtttatttccttccttaggattcattttcactagaatctctatgttatctataaataataatagtattaaagtgtaaaatgagcgtaaatgtggttaaaaataataaaaaattaccaatggatgaaaatttgtttttcttcttcaaatcgttatacaattcatttaaccttgtattctcatctacactaaatagatattatttgtgtgtaacaactagaagtagataaataatttaatgagaaagataagtgaatgtgtaggtgcttaggtgatgtaatacttgtgcagaaaaaatgctgaattattcaagtatataaattcaattgtccaaaatataacgttttttttaattttagttttgtttatcttggttcttttcattattaagggtgaagatattagatttatccccttttggctacagtgcttccttatgaaccttctactactaatcaataggtgatagtatttaatattacaaatatttagtaattaccttgaattattcagtatatatgggttaacgtagaaacgtgtggtagattctagtttcttagaaaccgaatctagaaaattacaatcactcagtagtatttcattatttatatcatcttttccaacatgttttatattatatttgttcttgatcccatctgaaacagaactggagtttttgcaaccattttggctagttttattatgtatttgagtacaactcaatgaacataacttaattaaacaatttgggcatttatatttggattccttattacatacataacatttattcataataaataataagtaatcatatgtataaattactacattagaacatagaagttgtgtattgggtttggtaaatataattccagttttacactctgataaatggcataaaatgagagaaaagtattagtctggtgggtatttaaggtgatttcctaggtgtgtaatgcgagattgtcgataatgcgtagtttctcatcaggtaagatgatatttgaaataatcccctttaatattttattgttaacaaatattactccgttttcatcgccagattctattaggttattcaataacaacccgttcacatgcacctccacatcaacttttttacacacttgaggggcatcaactgagatattttctggaagaatgttattcttgtgattagataaaatatggcccagttgattcattcctattggcttatttaatatggttaaaatttttagtataaacagttcgtcactttttatcacattcaatttatactcgtaataattatgaaccagttttattatctgtttttcttctaaaccaattgaatcacttttacctgagccatcattaacatctttatcatcaactgatttgtttgtagtgtggaaaaacttgtaaaggtgattagaaaatttgtcataattgaagttattatcgatcaaatatctgataaactcataagttatggaatgaacaccgtttgttatgttatatacgttatcaaccagcaaatctatgtgtgtactatcatgaacttcttttgactcagaacctccatcactaggattattgataatattctcattcataatatttgataacacattctttagttcagttttcttgagtctttttatatctataatcttactagttgatatgccaacagggtctttggtaccatgaacagtatggtcattattcaatactaccaatgtaaatttattactatttgggtttttacgtcgtttttcgttgtattttatcaattttttaagtagcttgtcaattctagccatatctatatgaacccccttaagctgttctccgctattaagttgaaccttattttcctttgaattaactgagcttgccttgacgatgttgacaattaatataatattataataaagattaattcctttaattagtgagtatatataactttcaaggttatccatttcactgtttattatatcctgtacgttgacatctcgaggtttagtgttacttgtaggtatattattgagtgtttgagtaccgtttagtaataactggagtgcgtttacattgttactgttataggtgttacttagtaactgttgcaatttattatcactgttcttgttatctataagtttatttagtatattaatataccaatgtaacttagggttaagtaacatcttcaaagactcctcgatttttaaataagaaacttgctcatcggtatctccatcattaaacttatcaaacccatttctagaaattgagttgttattgtacaatgatataattttatgtatcaacaatttataggtgtgttctaaggtgttgtagatcaatctgttactgtcatagttgacatataacactttataatcatcatctgtgttattgtctatatacttgtgaattaacctattattcattgtggtttcatcatttataacaattatatgattttcctcagattcttcaagtaaagttgatgttgtgttattctccttatatgtggaaaatagagatatcagctcagtattatgatacaaatgtttaatgatagtgtcattgacaatattgttatctgatgtgtttatatcatcattactatgtatctttagtttaccagttggggtataaactgctaatttctcatctttaccttttactttaattttctccaactccaataattctatcatacttgaacattcattataagtgttctcatctattaatatgttataaagatctgaacctgatttactagaactattctggaccttggcaacgtcattcttatctttagtattttcttcaggaatttgtgggttatcagaattaacaagttgctgtatattaaaagaatgcatcattaatctattggatatgttgactatatttccaattgatgtgaattcatttcttaatttattgcctaacaacccacaccagactttacctgtgcaaatccctataccaacgttgaatccaatcttcttactcattttaaccacttttaatgaaagtagtattgatctaaatgcatcatcttcatggaatagtggaggaaatcccataaatattaatatacttatccctttatcatctactattaatttgtttattgtaccttcataggaatatgtacacttttggcatattaacattatctcatttaatactccactatccacaccgcaagtatgtttaacggggtttttatcagtattggtagaatccacgttagtatcctgagaagatgtagtacttttgttggtatttgccacatcagtaatagtgctataaggaagtttattggaggtaactgtgttactggtagtattgatcctgaaattgatgaatatgatagtgatttttctcatttcattattgcaaatattaaactggttaatcaacagcctattgtatatataacgtggcatgaaaaacttcaacaattttattattatgttatcatttttttgattgatttcagacaacctcagtaataatgagttatcaacaacaagattagatgggtcaattttatgatcaaagttattagtaatgtccaagcgataggtaacagcaacatcacttaaggtaccaagagaattttgagtaaccattgagaaattatcatcatcgaaaaaatcatgaatatcagactgagaaggactattttcatcatttcccaatgataataacttatggtaggtattattatcgaaaataacctgttgagtatggatatagtctctaactttgttgtacagggtaggcgataagacagtttcactagatttggataagtttgatagtacttttaattcacttagtacatcaccgattacaacatattcgtaacgttcaaatataccgccaactaactttatctttatatttccgtaaatacaacttatgtgtattgttatattatctgacacgtcctctgagctgtgggtggtttcataattacgataatgaattggataattatttaatatgttgtgcaattcaatacagcattttatgcaatttaaacatctttccaagtccttttcttgttcaatatcagaattgaaatcggtattatttacactcagttccttggtgttattatgagataataatgcacttttgtcactatcacaaaagattgctagaatggcatcacctgagaacttgattatgtctccattaaagtgatatattaaattgataattgggtcgaagaagtcatttaaaaatctacctaagttggccacagattgtgggtcttctgaattctcaattctttgtgtcaaatttgtgaatcctgagatatcacaaaacattatgggaacatcaccttcaaaaattccatttttcatcagttctattatatttccatagaaatcagaatcaggtataattggtccattctgttcagcagtgtccaaaccatcgatagataaaccagacccatttataatagttttatcgaggtgatttgttaaaaaactttgcatgatgtttggaatgaatgataaaaatggagttaaattgacgttaactttgtttgtgatattcacattgttgttactggtgttagtatttttgatcatctttaagagctcatttagtcttctttcatagcgtaaactaagccactcccaatcatttctaactcgttcatagaactcattttcgtcttcatcataatcatccgaactatcaaaatcatcagcactatcatccgttgcgtcggctgtgctttggtcaaatcggtcatatttactatctaaaaattttctgttctttaaagaatttaaaattaattggttataaaaccaagaacaacttctaaatatcttcatttcaacagaatattattacacattagcttttaaattttggattatacattgattaattctattttacacagtatattatcctacattattttaaaatgataacattgatttagaaataatttacatggtttaaaaaacttgaaaaaaatctacaatgaagtgttacttaatgaagaagctcagtttggtaatttacacattgtacaaaaaaggtaaaattttaaagaaaattttaaataattattaaattaaaagaaaagtatagggaaatatgtgtttttaaaggatataaagtctaaagaaaatgaactctcccaacacttaaaatgttaattatggaaatattaaaagaatattttattgaaagattcacaaggttcaattaattaatttaaatttaaataaatcatagaactaaccttaattataaacaatttttattaataaagatcacgttatatatttagatctaagataaaaaatgaccggacttttacacttatctctttaattattggatattattattggatctgattgggtttttcaagttttggtggaaatatatagtattcttcccctataactcctataattatttcgttgttcctatgtttatgaaaaaaatcctattttatggcataaattcacatcatttgagattaaaataaataattcgataccatatcctccataaacatgaattaaattcacttaattttttattatgtaaatattaaactacattattgattaaaaattaaagtgagaacatatttgtgaattgagcccattctcactatttagtttgaaaatgttacaaattacaaaaattttttgtaatacacttaatctaaatttcagactaaaactaagtttctaatttatcctatttgtgataggttaattgccgtgaataaattaacctgaaattgactgcatttcaaatgtttagtttacaagatggatttataatatacaccggaatagcctctttagaattaataagttatttgttgttattcaatatatgatacacaggaacgacttgattaatcagttgtggtactgggttcttgttgagattcaggtctagataactcaggagcgctggtttattcttgctctttgtcacttccttcagaatcttcgtgtgtttctgatccactaagtgattcagaatcttcaggctgtgatttattgtgttcggtatctgatttgtctgaggttggatccccgtgttcaggtttttgtggttcgcttttaatagattgagtaccatacctacgaaccattttcttccactcattttcttcaaatgtgcagaaaatgtattcgttttcaaaccttagaacaaatttcttctgatcactgttgtaggtaatggactttggatgttggttatcttctggagtttgtttccacacagtcccatcattgtgcttgaccaaggaacattttaagttattcaagtcatactcatagacgtcattttctccgtcccaatttacattgtacttagatgggtttataaatgcaaactttcctgatttacctttttcgtatagtttaacctcagggcgagcatttgttgttttggttctataaccgctgaaaggtttccactcttcattaataaatgaggaaaagtaaacataatggtcttcacactcaaccttaatggtactatttgcaatattaaaaactacagaatcgggatagtgatccagatgtctttcagagtcatagctccatacatcatgttcgtcatatttaacatgggtacatttaactccgtagaatatattacatgtaataactggaccagtaatttcttcatgaaagcctttgagaggctctgacaatccatcttcattcgtctgatagagctttagtctataaaattccttgtttttggtcatcttggatgctttatatccatatacagaatgccacttattgtcataatatgagtggtatgattcataattatctttggactcgacaattaggaaaccattgtttctattaaaaataatagacgttggataattcgatccataatcatcctcttcgtgtttccatgcagaaattttatcatacttgacttcagtacatttcacaccaggtttcaaattatgtgtaagaatatgcccagcttccccccttctaaacttagagtagtcgagttcgtacggtctagtgctaagatctagagagaaaagctttaatttattagcatcaaatttatagtccttagtagtcttcaatttattaccaaacggcatttgtttccatttacccttgtgaaaggtatacaagtaacgatagttgtatccagattcaacgagaagaaagttcttgtttttggtaaaaacaactctggtcggatagaagtcttcatgttcaatactatcatggacccaagcatcagtattatcatactttacgaaagtgcattttacattttcattaatcttgaagattagtgagttgtaggagtcctttttctcatactcacttgttttaagttcaacaagttgatccgggtctgaaggatcgaaagaatatagtttgaatttatcaatttcgacagcatcaacttttcttttcaatttatagctgaaaggcaacaacttccactctccgttttcaaattcaaacatgtaacgatagtcataccccgactctacgacgagataatttttctttttaaccagggaaatcgttgtcggatgtttatctccatgttcacgttcgtagtgttcccatactaccttatcatcatacatcaagcaagtacagtttgttaaatagttcatattgtatctaactaaagtatctgactcttccttgtcataatgagctttagtcatctcaacacgtttgttattattaaatttatcattagttaatagtttcagtttgccgatatcgtacgtacttgatgaggaagaatgggattttaaggtgtaaccataaggtaaaggtttccactccttattttgatagacgtataaataacggtagtaatgagaggactcgaccatgagaaaactctttgatttattaaaaatgacagctgttggatatcggtgggcatgctcattcctgttataggtccatggaaagctatcttcatattgtatggaagtacacttgacgttcgtgttgaattttatggctagaacattgggagaatactcaatatcgtattgactggaatcaagttcaacaagtttcttataatctttgggatcttgagttaacaatttgaatttatcatagaaaatgttcgttgctttaaaaccgaaaggcaattctttccatttcttatcataatatgaatatacataacggtagagatatgaagaatcgaccacgatataactctttttaatattcagtaagacggttgtgggaaaatcatctccgtgttcattttcattgtatttccacacaacttgatcttcatacctgacgtcgttacaattaacgtcaggcttgaagttataaagaataaatgatggattttctctgatatacttggtataatcaatctgaaccaactcggaagtgactgtaccatctgaagtttctttagtttctatggtgaaaaatgttagtttgtcaacatcaaatttatcataaatactgtacttggactttaatttatcattggcacccaatggtttccacacattattttcaaattctaacaagttacggtaattacctgaagactcaacaactaaatattttcggatcagattgttgaagtaaattgacgttggaaacttatcctcatggtcagtttcagtatgtttccagagttcggtatcaccatactttatacaggtacacttaacaccagggttaaatttatatatggtgtctggttcctctatatcaaatttggatttgtcaagctcaacagtagtttcactgctgtctatggtgaagaattttaattttgatggatcaaccgggtgggataggcgcgacttgaaagcgaatacgcacttaaaattaccagcagaataagagaataaatagcggtaaatgccgtaacagtctaccataacagttttttcatcagtgttgacagaaattgtggttggatatttatcttcatgatctttataattataagaccatactggaaacccctcatatttgacgtcgatacacctggaacctggattaaacttgaatgtggtaaatggaccatcctcggatttatcgtattgagtggtgtcgtccgcaactggtgtaccgaacgcattcagtgtgaaaatcttcaatttatcaggatagagtggttgcaaatcctgagctttgtagccagaaatgcacctccattcatcattaatgtaggtataataatattgataatgaccttcggactctagtaaaataaaactagtggctgtgtttaaaagcatattagtaggataatgccttccgtgtttggatttatcatatttccacacagttttattgttgtatttaatttcagaacatttcgcatcaggttcaaaggtatagttcaccatactaactagattgtctttttttaatttagtagcatcgagttcttgagatgaaccatcatcagtcaaaccgaaaagcttaaaatgctcagaaacaactgcagactcttgttggacatcaacagcaccagacggaagttcggtaatatcccgaggcaatgggtttggatcatcaaggagtaagagatcaaagtccttgtcatttttgtaggcatataacataatttttccagcttggccataattgacaacaactttacatgaataatctggcttaagaaactctttaaggacatgttcaccttttctaactttggaaaacttaaacccatttttaacggtaaatacatgattgtcgttcctgtttaaataatcattattttcggaattcttcatattgttaaggtcaagttccattagattctccgatctaacctccactacagtggttgttgattcagtctgttctggttgaacatcagaggatggtggctgagtagaatctattgtggccgaatcttcttcttcaaattcttcttgttctttggattcatcttcaatatcagatggtcgaattacacctggaatgtttatttcttctgattctccatcaggatttacaacagttagggagtttctgagtagatttaaacggacggattttaaggattcaaattttgggtcagcaccatggctccagataacggtatttccaattttaatcatatgacattttgtatcaccgtcaaattcataagcatataagaacttttccaatgacacagaataattatcatcttttaagagtagatatccagttgtatcatcgtcataatagaacatcttaatgtcgtagagattaagccttgtattactgatgtctttccaatgttgagaaggatcttccttgtgtaaaagtcgaaatttgttatcaaaacgtaacaaggcaagataatttttgttaccggaatcctttaatactaccctggttataaattctttggtgtttgacgtttttaaaacgattttttctgatgagtcagatgaacttgattcaatcaaactgttgaataaatataggcctttagttgtgaatgtggtgaattcaccgtccttagaatattcaaactcatctgtacctgaagtataatcaagattaagagtaactttgttggaagtctcaatccaattgccatccaaataatccaagtgtttaatatcgtcactgaccagatgtaaaattacattggtgattttccctctcttgccttggccatctaatatgatttttttggcatgttctttcatatctctagctttccaaataatttcatcagaacccaatcttgaggaccttattaatttgtcaaatacaccactgcctattgaagtgtatgtaacaagatcatctttcttttcatactcgtactcgcttgttgtttcagttttgttaaggtctatggtaacagtctttcctctgtccaattcttttaccacctttctttgatcatgcatattaataacatatatattattttctataagatccaaatatgctcctttcataacaccaaattcttgatcgtcatcacaattgtagattacatcattaccgagtttaactagatgaaattttaaactttctttcgtcctgtatccgagggatagatgatataaatatacgttatacgaactaggagataactgttcataaacagatgtggtctcacttttagagaacaattttataccataaaaagaattcttagcatcggtaatatccaccaaaggttttctctttccagaagagtagaacaactgatattttttgctagcaagaagtataacgacatatttttcatgggttgaagactcttttagcctcactttgatgccatagtcattattgtgggatttccaaaaggttttagtggcaactttaacatcgttaaatccgtgcccaggaagtgcagtgaaggttttataaattccattgtcggaacattgatagttagaggtattctccgaaacgtttatatttagtgaggttaatttagcttcgggaattaaggcatctgaatcttcttcgagcaattcctgtagaacagtagctgtagaagtagattgatcatttgcctcagtggttttctctggttttggttttggaggtgaaactgccttattcaaatcaagtcttttgttatcattttcaaagtttgtaagaaagaacttattggagacaagaccgagataaacacctttaagggtatcaaattctaaatcctgttcataattatagattagtttatcgttgtgtttaattaaataacattcaacttcatcaccgaatgtgacaccatatgaaaattcatgcaactctaggttataacttccaggatctagttctctttcctcgtaactttcaggatcaaatgtgaagaacttgaagcctgaaaaattatgttttgaagtggttatatctttccattcttggtcaacatcatccttgtgaaatagaagaaattctccagtagtaagtagaagagcagtatggctgtcggttaattttagtctgaccattttaacatatttttctaacccttcttgggcactccaaaaaacttcttctttgctaaaatcggaggatgccgatcttattactttgttaaacaaatatccggatttaggtgtatatgtagcatattcgttcttcttatgataatcaaattcgccagtactggaattgttattaagatctagagtaacatatgaatacgatgttggcacgtgtaattgttctttaggttgttctgcggcagaatcatcagttgtttcttttttatgagtagtttcttcggattgtgtttcttgttcttgttcagttgtttttccttgaccagttgaatcttcaatggtttcaaaagccttctgaggtttttcatctacttctttccaggacggatcctcgttgagtcgacagaacatctttttgtctgatctagtatccataatcaatgttcgttttcccttatcaaaatcttctaataatatcttttctccaaagtccaaaccattttggatttgccaaataacggttgtcccttgaacaacctcgttgaacacatgcccaagtttcggaacgtatttatgaaaattgccactttttgagtagttgaattcaatagtactctcctttttgtcgatgtcaagggtaactggggtgcccttgataacgggtttgttaagtttcttaaattcaccgggctcgttcttcacaaagaaactgtttgaaataagatcgagatgaaacagcgttattaactgaaacttggtatcatcggaatgttgccaaatatcaacgtcggcatatttaatcttgagacacttgactgcactgttaaaggtgaatctaagggagtattcaactagggcaaccgtgtaatcagataaagtaagctcagtgccactctcccctaggaacttgagtttactaacatcatatttctcaccagtgatatcagtccaagtgtcatgaaattggtggaaaagtgagaatgtattattgtcaagtagaattgctatatatttattctttatttcatcaataaacgagacatttgtaccacaaacatcactttttgattcccagataacattatttccttgagataccttgttgaatgaatatccggccctagtaacatatttgtgacaatcgccagtcttggagtagtgaaacttatcagtactgctaggcttatttacgtcaagggtaataggtttggtagtaggtttaaattcaagtttcttgtactcatctacactgttatggatgaagaaatcgtttgtaacaagacctagaccaagaatcgtaattgttgaatagttaggatcgtcagtgtgtttccaaagatcatcatctccgtattttattttcttacagttaactccgctcttaaagatgattctgtaagctatcaaagaaacaaggtcaaccttgtaatccgaagttgtgatttccttgtcattctcaccatagaacttgagtttagtcatatcatgcctcttatcagtgatgtcagtccaactgccattggattgttgtaaaagtttaaacaaattgttactgagtaggattgccacgtatttttcgttacctttaaacttagtcctgaccttggtaccaaccaaattatctttagattcccagacgacagtcgttccttctgatactttggtaaaatagtgtctagacttcggaacgtactggtgaaactcattgtcgttggaataatcaaactcatcggtacttgccttcttgtctatgtcaagggtaacgaacttgacaactatcttattaagctcacccgactcgttcctcacaaagaaatcgtttgaaataacatcgaaatgaaacatcgttatcgacttaaacttagaatcgtcagtattagtccaaatatctcggtcagcatacttgatcttaaggcacttaactccatcatgaagtgaataacaaaataattgtttaactagggtaaccgtgtaaccagaagaattgagttcactgtcactctcccctaagaacttaagtttactaacatcaatttttccaacgataatatcagtccaagttccatttgattgatggaaaagtgaaaatgtgtcattgtcaagtagaatgattaggtatttcttgttgggttcatcaataaatgagacatttgtaccacaaatgttatcttttgactcccagataacattacttccctgggtaatcttactaaacgcatacccaggtttcgaaaaatatttatgacaatcacccgtcttgtgatagtaaagtttatcagtactgctagtcttgtcgatggcaagggtgaccttggaaatctgtgtgaaaagtgttttaaacccattagacccgttcttcacactgaactggtttgaaagaagacctagataaaacatggagattgaatcgaacttgaaatcgtcagtatggttccaaataacatcgttcccgtacttgatctttttacatttttctccattaatgaacctatatctgtaggagtagtttacgatggtaataatgtagctggttgcaggattaatctcatcatcaccgtctccgaggaacttgagcttcttaatatcaaacctcttatcagtaatgtcattccaggttttaccatctggttgataaaacagtttaaacaaattgttactgagtagtatggctagatatttctcatcatcaaataatacttttgtcctgaccaaggttccaaacacattgtttatcgattcccatataacattggtaccctgggtgaccttactgaacaaataaccatctttcggaacaaatttatgacaatcataactcttggagtagtcaaaatcatcattggtctgggttatattgatgtcaatggtaacagtgaaaaatagcttctttacttcaccagacgggttcataatgaagaaactgtttgaagtaagacctagtgaaaatgactttatctctttaaactttcgatcgtcacctgatttccagacaacctcttgacccagcaacactttcttacatttgactccggttttgaatgaataacaaaaggagtaatcaactatggatatcttatagtctgaaagagttagttccgcatcattttcaccatagaacttgaatttggtaacatcatgtttctgactagtgatatcagaccagggattattcttatttgattggtggaacaatttaaacatattgttactgagtagaacaaccaggtattttacattattctcagacttcgtcctgacgaaagtaccagaaatgttttttttggactcccaaataacattatgaccctgagtaaccttactgaaagtgtgaccagatttgggatcgtatgagtgaaaaacaccatccttggagtactcgaaagcgctggtagactgagtattatcaatgtcaagggttacaggtgtggtagagggagttgatacaggagtagcctcagcggttacagtagctggagttgattgagatactgggtcatttttaatagcactcccgaccaaatgagtaccattagaagtgccttctccggtatctgcatttggatcaagggaatttactgaaattttcaggtagttatataacaaatatataattaaatacccatgtatacaccttagtccaaccatcaaaaggttgactatgtaaaataaatgggaccatagtaataacaatctaaaccaatgcgtggcattttaagtgtttatttatgttattttagctgttaattgacaaaaattcatctgagaatggggagggatgttaagagtaaaacttaaacattcgttaacatttaataattaagtaaaaattaagttcgatagttgttgctaaacaaaacttacaattccatgaaaacaattatttatttaaaaaaagtacgaaaattttcgataattgacatattttggaagtccagcatgctgagattaaaacatcctgaaagtttaggattttttatacatgatcatttttttcattagaacttgaagtattgattcatttaagaatttgtaaataaaattcgtcaactaacttgtgttttaaaattcctttatggattctctgatcaatatcagttcataaattcttcaaagtttaatacacatttcaaaatcgttccatttcgttttgaatacagttcaaaactaaccattaatacgattcaattataggttttaacaatataatgatgatttgttttccttaaaacaggatcccattatataattatctggatcttctctattttgtattcaaatgattcatatgattcaatgattgttagaattttggttattttgggtttaaaatagagaataattaacaatctcaaattaatggtcactgacaaagttgtaatgatttgacttgtgagaattaagaactaacatctgtaagttagactctattatgtttgttttgtttaatttattgactgatataggtaaattaaggttggttttgtacagtaaaataaggctatttctggccatacaaattaagaatccttactcatattctgcataattatatgttctagtcaagttgttctttattttatttattattactaaaaatatatcaaaagtaaaggtaatcttgaaacattcatattgggtggaccaaagttagtttaacatatgtttattttttctacactgctcatttgggttttaaatagaatatatattgactgaagatcacattatttcaaaataacgactatttgattgaaacagatttgtatctctacatggtgtatttgacataatatttgttaattactttattatttagcaatttaacaacctggttgatttcatttagtttatctagtacttctttattttcctttaattttggacctttctttacgtgtcttaccatgttgtttatacagagtattagcgatttcacatattgcttactcgtagttgggccagtatccataactttaacttcaaattcaccgtcttctttttctgttttattaaactgtagcagtaatttgttcacgacttccaaatcatcttcaatagtatcgacttgatcgttattcaataaaaacgtgtacagggttaacagctttgacttgattacactcttcatattattagttaatagctcaaacaagtttactttacaaggaaccttgaaagttttatataaagttatcagaatatcgtgattcaacaccgttctcttagtgtacatcatacaggtcatgtaattaagcaccttttccatatctacatgattcttactcataatcttaaatgacaataccagtgcatttttcatgttcttgttattcaagacatagtttactactctgacaaccttttcactcagttcaaatttcttttcatcatccccgattttaactgtaacaaaaacgttggcgcctaagtcttcaggggcattattcttaacactaacattattggctgatgctgtggtgttttcggccatctttgtcaagaatttgtgtattgcgtgactgtaattgtgtttgaatgagctattatagtcctttagtactagatacagtctatccaaatcaagattatccaaatataacagcaagttgtacccagttatcttcaggctgtaatcttttttcttttccttttctttatttacatttggcgtttcatttatcaattcacttaagctttccactaccaaatcgtctgcatcattttccaattctgttgctgtatcttcctcatcatcgtcacttttatcttcagcttcttcgtccactgaactagtatcctcttcatcttcacttatttcagtatcatcctcatcggcatccgcatcttcatcctcgtcggtatcttcatcgtcttcctcaatttcttcatggtattcaccttgttttagtatattattgccaatcaatatgtcattgataatgttaaaatcgttgttgagagtgattttgaaaattgtttcccaaatttgactactaaatttctcatttacacacttgaataccagtttgttgatagcgctatacagcttattcatcaaatcttcgtccttatcataattaaatatgttgtatattatcatattatacaataaattttcatcatctgcctgtttgttttcttttccggtaacataacagtacatgtaattcataaatgaagccaacaggccatcctcataactacgtttaagatgagtgtttgttacatagtacaagtataatgtaaccaataatatgttttcgaatatggtattggtgtccacggacggactactattggttttaaaatctttaatatgattataaaacctttccaacaatacgtcgttcttgtcttgaactttgttcaatattttaacattatcacataatatactggtgtaattaatcaattctctgttgtttagcctcttgtttaccattatatttacatactttgttagaacactgatatacaaatccaacaatcctgaataaaaatcttccttagattcagcagtttccgattttttatctcttactctagtatagtgtgataaaagttcagtggtcaaattgaaattgttgtttaatattaacatcttgattagtgttattttaaaactattacagtctgtttttaacataatttcactgaatattaatttggggtctggtgaattcagcaacaacttgttcattaatgatttgataactgccaaaaatacgttacaattcttatcatacatatttattgaatttaggaccttatatatgttttcattgtcccaattatcaactgattcagacccgttttgtctaacttcttctttagccttattcgtcatttgtaattctaccttaatacccttattattgaaggaagttgtggcactagtacagtgtagttgttgtaatagattataataaaggttgacatatggaatgatatcgctgttcacgccactatttttatcatttttactagttattaaattatcatatatggaatttactagcttgttcccataattgcagttagtgatattgttggatagcaggtgtaggtagttattgataaactgtttaatatacagctggttgttatacttataatacttgatgataactttaaaataaatactcaagttatcaacaagtatgaggaacaaatcctgttttactttaaacaataaaattaaatagactatcaatgcggtcttaactgaatttaaactaccttccaacatacaatccagtacatttaacaacttcttaaacatctttgggtcatttaactttactataacatctatcaagtgtatatttactattgggtacacatttttcatatccttcagtatggacattatcttattctctactacattcttgttcattaattgtaattcagagctgttctggatacacttctctgtggcaaattcagttttaaaatacaataaaagactatcattattactaaatacgtctaaaatcttctcgattacttcattttttaaactgaaaattagattttataaattttataaatttacctgtcttgtaactggtttactattgcgatcaaaacaacatttgaggattcttgtaaataaactttatagttgtatgcttcttgtatgtattccactattttacatatttcactagtctaaaaaatattaagttaattatttagttactttagtgtaatgtgtgaagaggttaattttgcacagatgtaacagtatttctagccttccaaggtacagatctaatgtgcaaattagaatgtttgtgttttagatgcaacttacatcttatttcctggttcgatacgtttttgatattatacaagtccaggaacaacaatattaaattgtcgaaatcaatgtaatctttaaagttaatcaaaatttcatgaaggcatttcccaaaactttctctactcccgctcaaaatcccctttaacagacgatccagtgagtattgcaataatatattctcattctttgttaatttgtacgaatattttcgattctttattacacttttattgtttttaactaataaatcaccttcaacagaattatttgaggtttcatcactatcttttccatcgattttattattattttgatatagtttaatgtaattgctgatgttgttaattactaggttattatttttactaagtttgtttttactattattattgtctatcaatttattaaaaaatgataggaatatcttttcattgattttcattgtgaaaaaaggttaattatgaatcttacaaccacataaatgttttggcacatgattccaaattatattgtttattttgatcacatgttatgaaaaatgttattttaaagttgattttaattagttttatcgtaagattctttttgattacttttgcaatttttatttctaacttcccaaagttacacattccaaagtaccagcacgatgtcgctgtaatcaacaataattttaactataaagatgaaaataaaagtaaatatttaaaagttaaaggtagaaaatgtttaaagggggattacaaattcccagtaactactttctttggatttttgaattgcaatcctgattttaaccctaatatacagagttttaatggaagtaacaaggttgaaagcgaagaatttgtgaatatagaaaagttaaatagattttggttaatattaataccatttataacctgggatggtgagagatttttgataaatagtttgaataatttaatttacacaaaggaagaatcatgtgcattcttccctttttactcatactttttaaacttaatcgcaaatttcacacaaaaaatactcaaattcttcaacattttagttcctagtccttttttattaattttaattggcttcattttaaacaatattttgtcaattttcaacagtgttttaatatatttaatattgagtaagggtatttttagtacagaatccagaatcaaaacacttccgaataaggttaaaagtaaaaaaactcccaaagtagttgaactcaaagtgactgatcaagatgaattcaccaaatcggcaggttcatttaccacattagtctataatatatctccagcatttatattcacaactgcattgtatactgagcctttatatacaacattaaattattcggtcttattattggtatataaactaaactctcaattgaaacaacaatctgacagtaacgtagatcacaataaggtacaattttctgaaagtagttttaatcaattgttgactgagttatttgtagtttttttaatatttgctaattgctttacaagatcaaacggtatacttttattaattccattttctttatacttgcttaagactttccccctgtacaacctgattaagagtaaactgcttagaacccatctaactacaaatagggataacaaaaatttgaaacgatcagatgaaaattctaaggttaattacatattgaaatttgtattaataaatgcatgttaccttttaaagtttttgtgttatttgtacatactgttactgccatttttgttaatacaattgtatgggtataaattattttgtaatcaattagttgaaaataaaacattaactcaaaatgtcagtaactttagaattgatactttcattaaaaacaatatactaattaatccgatcagtttgattaaattatttatacctaaaaaactaactaaatccctttatagctcagttaagtcacgacttgatagagaaagacgtggtatttacgttaatgaattctgtagagatggatttaatttaatatataaacatgtacagagtaagtattggggactgaaattattttattcctttgactcacttaacaattttgtccacttcatatataccttcccgaatcttttagtggtgatgatatatttatcaagagtacgaaggaacttaaaaagaaaacgaatgggtttcattaatttgatgttcgaattcgttgaaaattacgaattaaatctcatcttccacttaattgttaccttcctgtctctgattttgttttcacatatacagattttcttcagacagtccttgacattgatacaattctcattccaatttacagccatattacactatttctctaggaataaagggaaattgacaattttttataaattgctgtacatttataacataatactatgcttcgtgggagtcatattattttcaaattttgtcggatggacataatgtctttttatatgatacatgtattatttatttatgttattttaaaatattcattttttaacaaagtgagcttagaaattaagtttctggccaattctagtaatgtacataaaattaagagaaaatactaacgatattgtcgcaaattccagaaagcaaacccggctctgattttttatcttcgacatggcctgaaatccgtttatcaacttcatcaagagaaaggatcctttcatttattattgaatccatgccagtgatgggttgcatggtaatatcatccaacttcagggtctcttcaattatatctccaagaactataccagtgccgctgattgtaacaaattcatagccagataacttggataaatcaattgcgctttggagagaataatgagtgtaggtaatattttgttcaaataagtccaaaactgtagtgaacttggccttaaaatgatattcaagaggtgactgtatcttgtacatagccaataaatctaccatgccattttcatcacgaatagatacgtcctccatagttttaagtagctcataaccagattgaagaattaatttagcgtaaagcttattttccagaatatcttcaatcctatgtaatgtcttaattagtcgtttttcatttgctgcttcgtcatctttatttgagcatttactaaagcgcttcctatactccattaacttctcagtatgcattttggcaagttgaatgtacaattgcacagcatttaaccttagaaaaacatcctgaacgatgtcaacagtttttttgagaggtggatcttcttttccattcccaagtgatgccaatattaaaggcgtaatcaattctccaaccataatcttggtttcattaagataacctaattctcggtcaaaaatcgttgcagattttataagggatctaacatttttaaatatttctgtcaatatctcggattttgaagttggctctcctggttttggggttttaacagttgtcccctcagaattttgggattcattaggtatatcttcatggtttcccatttttaaacgtcaaattcaaataaataatattctataatgacgtaggttgtagatctaagtagatctgaaaataaattcagatcctacaaggtgtaactaattatgatattgatagtgctgatgaaactaatgtcaaagattaaataataataaatctatgtaccaaaacattcaaactttaattcaaaattttacaaaagtgacgattggagtcgtattaaactttttccaataggcgagaccctgtagatgggtcaacttcatcatctattgagtcacctttcatctgatccaattgtttctcttgttctctgagcaatttcttttctttcttaatttgctttaacttttcggccttttcaagcttcctctcacggtctctcttggtctggatttgcttctcagccaaccgaattttcttctcctgtttgtccttctcggcctgtaattgttttactctttttgcgataaaagttccggcctcttgcttcttctcaagctcctccttttccttctcaagtttctcagccaaaatgcgatctctctccttcatcttctccataatggtgttgtcggtcttttccttatactccttcattaacttctttttctttttcaactccttcttcttctccttttctgctaatttatcttccttggtcttctttgattttttggcattcttttttgactttttgccattcttcttggactttttggcattcttcttcttcttcaaactcctggtttgtgctccacctgaaaactggctggcggttaaatcagtaacacctcctggatatgacaatgaaacgaatttgggggtagttgggccaacaggaccctttaatcctttaacaacaactggttcgtatgtttttaaggccatttccttgttataataagctgggattgcagcagattgggattgggattgggatgctagtctgcgttgttcaatttcagccaattttctcttgaccttttcagcaggggttaaaacagctggtgcatcatcagcagatccgtactcaattggtaatggtgcagcatattcaatagcctcgatgggaccttgagcttcttcatcagctttaggtggaaatacaggcgaaagtctagattttactgaatggtccatctttggaattgctcccttgtggtagctaacggacggattttcagattctggagattcaagatgagtttccttaacaccattctttttgtcgacttttttaaccctcaagtactcatattcatgaaccttcttgttcttgtccttcttatcttcggttctaactctgatggtcttgtcttcaaattcatctttattagtggcagaagggaccatctggagtccagaatcgtcggatgatacttgtgaatctgcaccttcgggggactcaccaagtactacttgtgttggatcgtttaactgctctaacatctggaacccctcgatcatttctggcacttcttgaactatttccttggcagatggctcaggttcttgttgttgagacataggctgttcatcactttttgcttgttgttgagacatagactgtccttcgtctttgtcctgtttctcagatccggattgtgatccttcagttttgccgtcatcaaccgtaccgaactttttcatggtgaatttgaaatctccgtcatttgaactacatctgcactttgccttcttgaacctgcagttttttcctgaaaatggacagcttagtctgttggcatccttgatttcagaatcgaaaaactcatcaggtgatgtgtcctcctcatctacttcttcgatgtcggtatcgatatcctcatctattggagagagatctggcaatgggtcagcatcgtttggctcatcgtattgtgaaaagaccccttcggtttccatagggtcaaaaattgttagcgggtcatctgatacatcttcgatgcctacgcatgacactacactaaaggaaagcaataataaagttgcgatattcattttttctagtttaaagttgattgatttaattaaatataaatatttactaaaacttagagatgtactttgttaagaatttactcaaaattcaccggtgatcggcgaaaaatcattcgtagatttagaatcacggttacagatgtatttaaagcatattaaacactatcaaattagaatttagtatttttaaacgtagatttacgtctgattagactgcatcctctcgattctcttgagcctgaacgttatttatctcgtttaagtatgtttgacacaggtatgaaattcatccactttctcggacgaattttcatttccactttatattttcatttatattaattttagatatctagctatttaaactaaattatgtataaaaggcctcaatgaaaatacaatccatcgtgaaatgtgtatggtgtaccttagtatttcagctgctttctttctggcttcttgtaataatttcaagtcgtcttcctcctccttttgtctttcgttgtctttctttgattccactactgcatccctgtcaatatccatcatattttcataaccttgatccaaatccatatccttcccagaatctccacctctaccatctgggttttgtttattttgtgatagatcttgagtttgtatgaagttttgggaaatatttcctcccatgaaattgaatatattctccatttcatccgcttcagtaactgtagtcggaggcatttgttcaggttttttgttcatttgtggcttatctttagatgttttggcttgtgctggttcattactaactgtactggtagtagcagaatctgtagtggtacgatcggtagtagctgtggtgggtgtgtgtttcaagtttgggttaaagttgttagtaaactctgaaaaatcatgtgtgaaagtgttaaaggcaacgaagctgtcaatataattatcaacttcttccttgttcctgaaataagttgccaggttatggaacctgtactcacaaaaaaaatcaaatcttgaagtcactttatccatgtttttgacgaatctggtcaggttcatgttatgacccttggagtcctggtatacttcctgtaatatcttattcctgaactcgttaaaactttttaatagttcatgtaatgatttcctaattagctgattcttagttcttctgtaatctgcgaattccctaaatagatgtctaacgtgtttatttgattttaagtgttcacagatttccctgttaatattatcagttctttgggatttagtggtatcttcaaacccagaatcatcatgtgattctggtgtgcccaaatctaattttattctaaacctgtccatcacgactctaatcaacttatctaaacatgcttctacttgttttttatgttcatcatccagctcatgttctacactatttacagaagagttatttagccttggatctgaatgatctcgtttcgttaagtcaatctgattatttagggagtttaatacattctttttacattctactatgctaagcatcagttgtgagttcatcatttcaacttgtcccttatagtttccaaaagatagttctcttatggaattgtatatcataaagtcccagaggtggtttttgagatcatgcttcctatcatctgaccttttccaaaaagtatcggtagaaaacggtccgaatttagcattttttctacgtgaaaactcatctacacctccacctactaatttttaaagttaatcataaaagggtgaaaaagaatttaataaaattaagtatgttcttacttggctgtgctttttcatactcctcctcattcagaaaaagatcatcgtcatcatcagcaaataaatcatcagctgtgttagctgcaaattcgttaaatgccacggtgtcgtccattggatgaattaggccttgtttcacttaatttcagtttttaagagcagaaggtcccataatcgaccatttaaaattgataaatataaaaaaaataagtttatacagagtatttatttacatgtgtttgggttataatgtgtaatactgtggtgctgtccggtgttgttgttttattaatcagttcaaatttatcgctttttctcagataattaatagtatagtagtgtttttactgtgttatcgaaaattatacttgattttcctattatgcaattaactcttctgtaatgtagaaatgggagcttcttcttccaaatgtccaccgaatggaggtatattattaatatatttttacacttttttctttcaatttttattttctgcccatatcaacttttatttaataattttaaccctttaatttaggccttcgagtgcatagagtctatcccaacggtcctggaggtaattttccttaattgcgctcatttttttacatcattctcataatataatattatttatatagttttaactttactctgtatttcctatgcaaccatgtggtgtggaaaaataaattattgcactagttttgtgatctaccctaaagtaatgtttttagatgttgccggtgttgaaccctttttcgactacatattagatgtcgatggttacacatacacagacgactcggatgagactttgaaccttttcactaaatatgtgaacgaccatgagaaccaacagatagccttgtcaatatataacgctcgcaagaagaacattcgggacgtatacatcgttcctcagaagtgggatgggatcgggttgcttggactaacactgaagttcgggttgtttaactgtctggatgagggcgcacacattgttcacgtttatgataagtcaccagcacaaaaagcgggactcatgccaataactgactatctcttggggacaaatttacagttattttatggtctagattgtgttcggatccatgtggccaacaaggtggacaaggaggttgttttgattgtgtataacagtgttactgagactgttaggagagccttaattgtgcctcgagaaaattggggtggaagaggcacactaggatgtgatcttgcaaagggttatatccaccgcataccatatgttaaatcgctattcacttaccctaccatcgaaactttcccctcaatcaactctcaggctaccagtacctctaaggatgttgttgataccattgatctctcagttggaaatgttaacaactactatgcaaacactgaaaacagcaccattcgagatgatttgtcttcctcagaaagacataacctgtcagtgagttcagattctggtagaccagaacaaaaaaaagtcgagcttgaggttgagaaactccgtgaacacaaagacgataatacccttgaaaatgtttccctaaataaacaattttctgaaattaacctcagtccggatgattcttccagcagtttactagatgttagctcaagtaatgactccaatgatacgactaatgataatttggagtccagctttgaaccccctgagaagactgaagaggacgatgtgttggttgaagaaccacttgtataattaaatttcaaaaataaaatagtataaatggtagtttaatttttaatatattattattctattttatgtttaagagttgtttcatgcgcaacaacgaatcttttatatgccctgactcatgggtgaggtaattacctgtgctcctatcaaataagtggtcaaaaactgatgaaaaatccacagccatcttaaaaggcttgaaaaacaagttcgattccagcctcaaagactctattaagagaatctccatgattaggttatacagtagtttagcattttcttgctttatagtactggtactcttgtaagacaagtttaccatactgctccactcattcacgcctatcttcagctctgaaagtattttatacttcaaggcctttagttttttaataatatgaagcatctaaatttaataaagggttttaaaaacttacgcccgcaagaacatagttggtagttttagtgctagtaaacctggaaaaattctcaagaattgtttgctcgaaatttgagatatttgagtcgttttcatttttgcttttgcctttattgtaagagcttttgacacttgctatgatatccttgattttatcatgtttaaagtggttgttgatcgcactttcgtaattcttaagcctaaaatctggggaactcaagttgatgttaaactcattgatgtaggtttcaacatatttctccggtaattcaaccagtctctacgagattattaaataaatctttcttacgtctgaagttatttgaatagtgttgatggaattaggttcaatgaactttttagccaagccagaccagattaaatcctccccgactagtttatcatttgttaacagtaaatattctcccaagtttcctaaagatatgaaaatcatgaattatataagaatacctcttaaattcgataacacaaaagtggagccgaagttgttaaaaggcgtttcatctatgaacagatgttgtcttaaaacataaatattacctgtgttagcttgatatgttgagtgcttatagcatgaagaaaaggaggatatgaagcacatgtttgagccaaaggactctataataatagttaataaaccgtaaaactaggtgaaaaaataacaaaaatgtaaaattacccatctggccattgccgtatataactaggggtttccggtatgttttaatgaggtataaaagatgtaaaacatttttaacgtagtcttctagtgcttttttaaaccgttccaggtttgaatttatcaaatccaatttaaaatctggatttttcttcaaaggtgtttccttcaacctggttaatttaagaatagaatcatgaaacaagtgaacttcagagggatctagccctttagaaaaaacaactctgttcatggaagtgagaacaacaaatcttttgtacacattattctctaaatcaagtaactcgcgatataaatttgaaacacagttacttccaatatattcactaaataaatattattcatgtgtaacataataactgctgtataactattctgtgttaagaaaatacctattgagtattagaaaccctaatcctacgttatttctggtaagaagaggtgattctgatacgcagcttgtacgcaaatccaagggagcatccaaatagttggcttgaatgtgttcaaaataaggatcagaaaactaaaccaattacaaataattaaaacataccggtaatctctcgatttctccccttgaaaataaacggaattcgtccttttcataacttgtatggtctttattataggttgagaatttatttattctgaattttgttgaagctcttactttccttctcaaagtttccagagattctctacaaaacgagccaagcattttgtaaaaaatgtcataaaagtcagtgaattttctatgttggaatgtgtaagttatagggatgaaaaaatgaatataattaataatattagtttttgtaccatagttttgtttttaatttatttttttgtcagttttaatttatttaaactggaatttttggttgtttttacactaaacattcatattatccagaatctaaaacacacaagattccatgaattttcctcaattacttcccatatttaatgtaaattattgagtaaaatattcttaatgtgttttataacatattattactgatttttgaatttatacacgaattttaggatggaatatgcaattattaggattgttcaacaactcgttcaaaaagagacacattataaaaaatgttcttaaaaactgtaaattgttggatgggaattcatttaaacctagttcattggttttaaaaagggcaaataatttaattaaatatggaagaagtaaaacggtaaagtcaaactcacataaaaataccttacaaaatgtcaataatactaatattacagttggttctgataatagtgcaagcaatagtagaggttttttgtcaagatatttggaaagtttgaagtgcaatgtgactgtttgggggtcatcagtagttgaattacaggttaaattaaacgatttaagttatttgagaagtaaaaaatcgtttttaagaaggtttagaagtgtaaaacttcccgtaaatggatcatttgttcttccaaatgcagttcaactggcctcaattaggccgcaattgaccggctctgacttgcttattaactcaccaaaaggttcaggcaaaacatttttatatcttcttccacacctggtacatagttatgtattcaaaaataatgaagttgtgaatggagtagaactcagaaaccaaaggatggttgtactgctgcccaccattgacctggtcgtcgatgaaagtagatctgccaacggttgttttattagatttaataaaagagtttcaacattactgtataaagatttagtcctgaataatctttcacatgctttggattctgaaattgtctattcaacccccaaaagttttctaaagttacttgtgagatttccatcacttgcctccaacttcagattcatagtagttgacgaagctgagagaatggttattggtgagtttgcttacttactggttagaataagggatatgctccaatcggatgcccagtttgtatttttatcgaatttcagcaataattacttgttacaccagttcacttcaaggtttttgaagctgaattttaaaatcatatcattccaaaatgaaaatgattctaaaggagatgataataacaagttgagtgtcataactagacatttatacggccctataagaaatattgatcaatatgaggaattatacaactctattaactcgagtaatgccacacacctaaatcctataaatttgaaagaaaacactcatgtggaagaaaatgataattgtgctataaccttaccagttaataatgagtctggacctgaaacagttagtgaaagtggagggattgttagtgatttggaaaagagggtaagaaggaatttagatttaatattaactaggaacagcgatactgattataaaatagactttgtattatatgaccctaaaatgttcctgaattccttattgagtgaattggacataaataaaaagactctggtatacttccctacagtgaggatgtgtcagttctgttacgtttacataaaacactatttaaaattattcaagaacatttcaaatgtaaatggtagtcctagtgaaatcgattcacagtttgaattttttgatttccatagtggtttgagcctagataagagaaggtatgttatggatatcttcaagttagctgacaagggcattctattctgcactaatttatcaataggacttaatttcaatccaaataaaatcatacaagtctctttttcatttaaccaatttgaagtcctgaacaagtttgcgtttaccaataatctagttaatggtgggaaagatgacattgaacgggtgcttttattaaataatttggatgggcatattttgcacgagtattataaaaatggtattaatgttactctcaagggttgttttccatcctccaacactgattctactattaacacagagtttgaaaaggacatatatttaattaatagctgtgaattaatgtacaggagtttacttggctactatagtgagaattcaaaaagactaaaaattgaaccttggacaattccaagtttttttaacgagtttattaaatcttttggtatttctgaaactttcaaggtctcaccacagtttgctgcaaggactcagctactaaactcaccagggttagaagttagcagggcttataacaaaaagtccagccttatcgcagctctgaaagcgtatcctggtttcatctctaaatctcaacaatgccaaccaatattttaatcttattaaccttatttaattgttcttattacatattgttatctatattattttatcctttcgttttaaacaagatactatacactctatactctatacgtgatttatatggttatgtgtatattactaagcgtgtaacaagtatatatgaaattaaacacaatttactcccaaatacttaaattattaaaattgaaataaaaatctaatcaattgattaaaagtttctattatttcagatctattgacacagccgcaaataataactttaccgcttttgaaaacaagacatgagctggacctgttaactgacttaatttcagtttccaaaacacgttctagctctaaacttatatccaagtcgtagtaactactcttaaaaaagttcatgtcagtgcggttttctttgaaatcactctcaaattcagtgttagggctagtgttttccaacgcgaattgaaacctcaggtaatttggaaacaaattaacgttaacaagcttggcatcaagcttactgaagatataatcaatgtctaattccttatctaagactattttacacaacagttggtcgattttaaaggttttaagggagtctgataccttcaagatattctcgttgttgacatacctccacaacagcccatttccgtcaaaattaaacctttttttaaaatcgctataatacatttctccactttcacttctttcttcattattgtttttatttacttgcgattcatcgtctgatgcatctttataggttggagcaaacctgtgtttactcgtgacaacagaattatcagactcaggttggctaaaataccggggagaaaacggcagatttggcactttaactttccattttgttctatactttatcttgcgaactgttttcgctagtctcttgtaggcttgtttctcagttatggcgcccataattatgattttgccgttggagtagattctgcagaaacactgcgggttaatgaatgcgattattactgatttttttgagtattcacttctactcatgcttcttgcgatgtgtaagaggtcgttatgtgtaagattcccgtttgtcaggagtgcggaggcccaaagtacggtgatttctgaggatacgagatcaaagtctcctaaaacgaaaaattaaattctaattattacaaatctatagtaattaggtattgggtctgagaattttcttaccttggaaattacattctttctttaaattcagggttgtggaatcacattctctatagcattctgggaacttcatgtgctaaatttatacataaaattaaaattacatttttaatacccagaataagaattaaaatttgcaaaacttacaagattatttatgaagtattgtgagatacacattactcaagttcgacacaaacgtcgtattaaataaatattcaactaaaacccacaaatacaaatgtaaatatgtataatagtagcaaatttacgtacaggaacaacgataacattaattttgccacatagagctgacattattactggtgttggagctaccgaatccataaaaaggctgtggagtgtagtaactgacaagtcccggtggattttggaggcgctcattggagtaggggtaattgaagtaaaccccgccgccgaatcccatgttatcctttgtcaaattgggcaagttcccagaactcattgaaccaccgttagctgatgaggaaggttgctggtgtgttgaagttgaagaagtttgagttgacgggactggaaatctgtcatatttcttagtgcctggatcgtcataatataccattgatttcctttcatagtagtttgggaaaacttctgattgtagtctgctactggttggccttggcttctgaaaatcgcgatgttgccaatctggccatggctttgaccatagttcatcttccaagcatccgaaagtgagtttactttcagagaagttgaactccttgggcatgactactggaggcctcattcttcccatacggtcgttaagcctcgatttgtcctccattctctgttccctaagcgatccaccaattgaagtatttaaatcagagggcataccactcatgggtgggttcaaattattaagagattcaactgaggtatagttaagtgagctcgcagctgaatttgtagactcacgtgctgaagttggctgggatttattctgtgaaagagtaggtgttgcgttagcgcctgtagccattggctctcgcttcaacaacgaagcccaggaagtcaggagttctttcttatcctcctcagtttcagacttttctggcttcgagtcaagccgaactttgggtgagaccttactgttcttcttcaaaacttcatcttttacatacggtttccctttaaatttagagctgttcggcaagggcctatgagaattcgactgtgttttagttgtgcttttttcacccttagtattaggcttcacaacttcccattccccttgttcatgtcctaaattcatctgtactatcctttcaacctcgacttgaatcttatctgcgttgtaatcacagtttttgaccagcttcactatgtctaggtagttatagttataactctccaaaactggaagcaaattgttgatccatttctggcttcgtggagaacaggggtattttaattcctccttcttaccacgaggctcctttttaaaatcagaccgtgtcatttttacaaaaattaacaatatttagctcaaaatacaagacttatgcaagggcctagtcgcgctagatggccaaacaaaacaatatttccaaaagtgtgcctttaaaataaatttacatgtacattatctgcagaactgacaattaaaataccataaatttataccacacccgcgtactgcagtttcaccggctctaatctcgtaaatatctctctacttatttaaaaaaccatatattaaaatatgaatcaaagcatatgtacgcataaccgaaaataacttttgtagcaatcttaactctagagggcatcaattaaaacattgggctttgtcaacctgttaacttagaatcgtcgttaacattttaacacaattactatattcctaaaatattgtttaccttttccaaccggtaccatatacctaaaactaccatttcttttcgttttttatcaatgaatctttccactatcacattttttataaatttacccataaaattctacacaaaataaacttctcacaaaatatatattttaaattcattttcctctaattttacctttttttgggtttaaatttcatttgatcactaatttcaaaactgcttcctcacttctcttcactttattcaccttctttttcattattccttcaccatctgttatataaacgtttaaaaactataattgattatatttatctccattattccagttctggtacttatttttttcctattacacatatggtgactccttcctctgaaccacttcatatttttcatgtttcacactttattttattaaaattataacgaaaatctgtaaattatataaaatttataaactattgtagattattttttttatttagcgttttttgtaaattataatagattcccatatgtatcactaaatcgccctaataaatgttaaaaacatgagatatgcccagatagtcttgggtcctgctgggagtgggaaaactacctactgcaaggtgttccaggactatctattttcctgtaaaaggaactgctacatagttaaccttgacccagcaacagaggacggcttggaatttgaaaatgagaaaaacaaaaataaaaccaattcaagcaaatctagtaacggtaaaggtaccggattctataatactttatatcattagccattatgtataattctttagtcaacccttttgatactgatattcgggattttgtcgatattggatcaataattgaggaggaggacttaggaccaaacggcgctttggtgaggagctcagaacttctggctgaaaatttagagtggctttcagaacaacttgaatcaacttactccgacgagtcctatcttttgtttgatacaccgggtcaaatcgagttatttctccacattccatacgtaaagactatttctgagctcttgaaacgcctaaatattaattgcttggctgtttacctattggacgtctcattcatgaatgaccctgccaaattgatttcaggctcacttgcaggacttgctgccatggttaatcttgaaatgcctcacataaatgttttatcaaagtgtgatttaatctgtgatcgtaacaacaagatttctaggaacccgttcattgacgtaacaagcagtaccttcggattttcaccaaatgatctccagtttcaaaaattacacatatctaatcctatttcaaaccccgatgaccctgaatttgacccagattcagataaaatggattattctgagttttacgaggttgtaaataagtctagcaatgatctcatcgacagtttggataaacaccttcccaagacttacagaagactcaatgtggcatttgcctcacttttggaggattttgatctcgtttcattcatgcctcttaacataaacgatgaggaatgcttggaacagcttttagtagctacggacgtcgcattacaatttggtgaggaggctgaaccttcagctaaattcgacctatctgatactatttaatcttgtcaattttaattttaaactaatttttataataaataaacattcacaaatattaatatgttacagaattgattaaaagtttctagtagactttagaaatttgattatttttttcacatcatactttggatctgagcatcataatcttgtctcctaaattacctgtaatctccttttcaagctctaaaaaacattaaaaattataaaaattactcttctcctaaagaaatatttatttaaatgataacttactggttgttcgttatgttcagcatcttcatttgtccaatttgccttgagctttttaaaattgaatagatgaaatcttatcttggattgcaccttaagttaatcataaattattatattgttacttgaatatttctgtttgtcatcaagtatcttctaacatcaatgagactgaagaaaggttatcaactcataacttactcttgaaaagccaaaaacctagagtagtagtgaacatcacctctttcaaacagccttatttcaaacaaaacaatataatcaagagatcctaaatgacatttaacttatattacattatttattgttatgaggaaaaaataataccttgactcgtgtagtagagtgagtataaaacagctttgtgtatgataagcacaaatgtacttgctcctggctgaatataactttgaagtgtggtcatcaaattatccaaaccaactataaagtcattcgactccatctcatacaaattctcctaacattaaatatgtgttttaatgaagaaagatatgtaaatacagtaaactggagtatagaaacatacgcaaaggtataaaccagggaagtttttaatgacgttggatgtcaagtacgaaatactttgcgattttgctttacattcgtttataattgaattgaggaggtttttattaatattttcgccattaattattttagatgaccaggacagtattagccatttagcctctgagggggtcattttcaagtatttgaaccttttagaaggctcaattgaccacaaagcctaaacattcgttcaacaacaatttaaatagtaatttaaagtacaattatgattaatataagaataataaactataatgaaggagtcacatcgtttcttctataccctatcatattatcgctaccttcagttgaaggagcaatggtacttgaatcatcaaacagatcattgaagtcatagcctacagatataattaacaactaaaagtggcaaaaagaactagaaaacaaccataaaggggattttaacgaaaatttatgtatataaactggaattttacccataattgtgaaatttggcacgttagaaccctgtttggttccgaagcagcaagttaggagttctctcactgcgttatacacattacaccgatttttttcataatttttctccttttcacattttcttttttggaccagacaacttttatggaaaaatccttccgaggcgctttccaaatcttcgtagaaacgtgttggacccacagagcagtctgaagcctgggaatatgtcattttatattcattatattacaaaaattaaatttcaaactttcgtaatgcaaaaaaacagggaaaattttaaaaataatcctttatcatcttacacattcccaacaatttaatttcaataaaataaatccgttaatttaacaaattaaataaattatacaataaaatacaaagaattatgtgtacaattaattataataaaaataagaggaaaatgagattagtagttggaggaagtattctttggtttaaactctctttttttctcggttctcttgtagggctctaatgttatattgcgatcctggatttgaagatcattggccaagagtgtttccacagcttccgtcgagtctaattctacaaaggcgtacagcagtgactcgttactctttctgttaaccttttggggctttatagcaacatccaccacctttccgtctgaatttagctgtgccaatctcttgttaatgatttccgttaagatgacctccgtcaccatcgggggtattccgaaaatagcaaccttcaatccatccttattatcttttctataactctaaaccatttatgaagcttagccagttaaatattgtttatcatactattagtatatctaattattattataactatatttagtatggataactatataacgagatgattgagttgtataaaaaattacccttgatgaatcatgaagataatcttgagatttgtgttcatgtgattgttcaggggttgaggtagaatgggaggcatgaacatgaggggtggttgtggaatgagtgttgagtgtgttcaactcggtcaataaatcgttgatgatgtggtacctgctcctcgaaacgtcgccagagagtaacacagtctgggcaaaaagtttcgtctgctcagtgttatccttctcgttggcgagtgtgaaggagccggtgattaggactaggaagagtggatgcgaactaacgagttgaatttcaatgttgtgaatgttggaagtgaatacgtagttggcaaattgctgatagtagttccttatctcgttatgatccgatgccacgaccctgttaccgttaacgtcagtctttgacaactgtgcctcctttgagtaaagactgtacatgtaggtagggttattgttgagcatggagtaatacttgtaggtgaaaaagtacgcgatttcctccagggttgaagagtccaagacttgatccaccagtacctgagaggtgtttacaggcaccggtgcaggcatgttaccatttacactcatcctgttatcacccaccaggggcattgttccagagtatgcatgaacgtagctgctgttactggtcgtgttacttgggtaacttgttgtgtttgctgcgtaggtagtggtgctagctgggtagctagaggtatttgcagggtatgtgttagtgctggaagggtatgtcgtttgataattgcttgtatagcttgagagtcttggctgatcgaactgtacattttcggtccaattattactgtactgttgattctgataagaactaccgtaggagtacaaattactcatttcgcttctattattttgactatgtttgtaaactcttgaatttctctgaaaatttctatctctgttccggactccgttcagaacagggtcaacatctactcccgtattcatatcattgacctggttcacactctcctccacgaagttcgacatttttaaatcagtatgatatgcaacatttgatttaaaagagttttttaagaaattaatttactggcaacgctataccagcggccccacccagattcccatcattgctctttctttgtctaccggccactgttattacgaatctttattattaaaaacccaaacacataaaataatctacgtgaacatgaacatataattacattaaatttagctatgtgtagtcctctattgtccaatccttctcgtcgtactggtcgagcttttcaaacatgagtttgaacttcgggattatccagaatccgcaagctatgcatatcaaacactccacaaatactccgtttattcctaatttttctaaaaaatcatcattagtctatttttcctcaaatttagtttaatgatccaaattacttttataaataatataaatactatttttatcactattacaccattattacactatttataatattattatactaatagtggtgggtgacttactgaatgtgagtgtatctactagtaaaagagctatgtagtttgggtagaatcctccgaagtttgccagtgtgttaaggagggtcatgtaaattgctccaattttggggtccgagaccttgttaaacaacgctacgtccgttactgtgtttaatagctgggctattcttctcagaattatcacggacgataataaaaccacgtacacgaatttggtctcggtataatgatcatgcttgaaatagtactttgtgattatcaaaaaacctaaaatttattacccagaaatattcggcaaatagtaagtatatttgaacatatgtatgaaaatacctgttgatatgattaatgatccgaatctaagtattagagctcggtataaagtgttgctaattccgtatagtacaatgtaataagaagtctgaaaacatgttaacttatgcagaaaatatagtaaacattgaaagaaatagccataattactgttatataaaacataccacaagtgggaagacgatatctacgacgattgtgaaagacttggttatggcatacaagtcctgagagagtccatatgatagcattttaagatcaattggattttctggagagaaaaatagatactttgtgaggagtaaaaatgccagagtcttgattggcgccagtgtaataacttttttaagggttttatagctattccacattctaaaccggcctttaattccggtctccaaatcatactctagtatttctctaactgattccaactcgaatatctccgccgaatcctttgctacatccatatcacgacttgaagaaccaatatctttgtgtttccgataactaaaggaagctgggatattgagatccactgtcggatcactataggaaacatcactgcaaactgtacttggtgtgtttgatgtataattcggcgttgtttccttcttaaacattaagaaaaatgtcgtaattaatataataattccgaagaatctcataaaacctgaaattgacactacggggtcaacgcacttatggcatacgcattcagcgctctttaaatgactacaaaaagactcaaagtgattgtgaaacgtctttgaaaatttgcacatgttgttaaagatcgagtttgaaccaagaatcaagaagaatgcaaggttcgctccgaatgattgtcctgcggagttacaggctgaggcgtgtactcttaaatgtggccttaaaatcgtcagggcccatccgtcaactgcgatatcctgtgtagctagtagaaaatagagtactaagaagaataaaaatatcttcccgctcattatttgtgttgaagaggatttattcagaagactacttccgtcctcagccaaattaccagccagggtatcagaagggacagggaacagccatttatccatccgtttatcataacttccgtacagtaacaataaaccacaaattacttgaacagggacaatccaactctttcgtttacctatcttttttatgtagaaaaaatccaaaataggtgcccataagagcttaatcgagaaggggaaagttaccaaagacaaaatcgcaattttagagtagcttactctattatttaacatgataggaattgtgttctgaatacctattggaattccctggagtatatataaaagaactagcaaaaatatcgatcctatgtcccttctgtcgaacttttctccagaaaagttactcaggacaatagaattctttaaatctgcgatgaatcccatgattattcggaaattattcttttatactagtagagaatccattcactctagtatcaaatttattttaaaaaataatgttacaaatgatttaattttaaatttaaaaaatttatcaataaaatctttactcatgaatcaggaatatgtttaaggaatcttcagaattaaaaccagaaagaaactattttacaagagttaaaatttatattaaaagcaaaccaaatctaatggaactgattccatataataagaaaaaattctgtatattttctacagaaattgtattatacaaaaaaatcattttaaaaactataatttatccgttctttgtcaaccgcacagaatcaagtttattatcacttttgcaactttttattttatataaacattaatttcagttattttttattttgaaatgagtaaagaatcagttttaatgtagtttttgacctatttaatttttaatttaattttaatgtagaatagtttaaaatgtgaaattacaagtttaagcatgtaatttagaatattttattctaaatttgtactataattataaaatgaatccaatatggagaaattcctctatttcaatcatttacattctctatatttcaatttcaacctcctgtgtaaggttagacacacattacacaggaaaactcaattttatactacataaaaacaggaattcaaactcttttaagaccggaattgatgagtactacgacactaacagcaaaattggtggttttaacccatattttctcaattctaacccctcagggtttcttaatatactaggtactttaacggatagtttgactaaaaagccggattctacacaaaatttgagttctccacttgatagaaaatggttatttgatataaataaaaaaggagctcgatctttaaagcctccaattaagcaagtagtagagtccattataccagatatatacacagtgttcaaagccagggaacattttggatccgggcccctaccaagtcttctttcctgcagtggcggagtggactcaatgtctttattacactcatttgggatcataaagattatgtatgaggagttaataaacgatattataactgtttttaacagtaaaatgaatagcgtacccttcaaaatcatatctgagaccagtaaagtggattataaaactaagaaagcagagctgatgaagtttttaaaggaattttacgataattttaaagttgtttactttaaccataaacagagagaagacattgacaaagatatccaggtcatcagagctgcctgcgaaaagtacaaatttgacttaattatcgaggaattacctcaagaacttcaatcaaaaaccgaagtttcaaagtttggaccccagctaatgttcagaaagtggagacgtgagacttgtatgaaaatcattgatagtttgagttcttcagatagtactggtggaaataagggagacctaaaaaacactgaacgtgtaatgaactttccggatgaaaacctgatagacttacacaccataaagactccggaagatttaattggtttaaaggggttggtgttcatggcacatcacttaaacgacaattttgagactcttttgcttaaaatttcaagggatacttctatattcaatttggggtatttttagtatttacagcttaataattgcttctatgtattaataaaatgtttaggctaatgagactatatgacaatctagaccacaaaaactatttgctcgtcagaccatttgtctctacaataaaatcaagattatattccttcatggaggtaactataccaactaattttacaactaatatctaaatatctacaacatttttattactttattttcaataattattgtactgtaatttaaataattttcaggacataaatgaaaagtaccacagagatagtactaatgatgagtcacactacgaaaggaatattttaaggaaaagtgttatcccgtcaatagtcgctggaattgatggaaaacacactgcctgttctgatgcactggaccaatccgtgaatggattctatcaaagcattaataatttatctagaaggtgtgacacgcttaaggagtcagtggataaggaggttgaaatgtactttcattacattaactcaaagtacaaatcccaacccgttccttacagttcaaactacacttcaaattcacattccacagatgctgaaaaggagtcctacaggattttttacgagaccttatttaagagaacttatggagataagttaaacagtttcgagataaggttcaggaacaacttggcttattttaacaggattggacttaaattcccacggattttctctttaaaggagctgaacattatacctaaccaaattgtaaaggaactggttctcaaaacttacattgagtattttaatggatcaagtgtatctaacaacaatgtccgctacatcctggatcattttactaaaaatccattctcacagttcattaagcaatactgcgttgggaaccactttttagtccaccaaggctactttgtcaattttcaatatacccattctgatttatttcggagacctaaggttaaaaagggttcaacgacgtcagtgggtcgtgacaacaaggataataatttagtgtattatgatgaaaatttaaatatatacagtcatctggaccagctaaaagtccatgttactcgagaaaataatggacaacatacttctaaaaataattatgaaaataccaatggtaatggtttcggaaaatactatgtagaactgtgtttgaaggaaaagatgaagaaaatagatgggaatgggtctgagaatttaagtaccactgataaggacaatactaatgataggaaaatacacattgatataagatatttgaatgaagacgatgttgtacctagcataggaatgtggaagaacaacgcccactctgttttggccaatgctgatattcataaactcatcaaagatgagataccagcttttgtaatttctggcacaaacaaagttataggcatatacgggattaacttgagagctccttatttctgcaatggccatcaaactgtcgagtacggatctgatcaaatcacactacccctgaaatataggataaccatacactaatgtaatttatttcaacaatcaatgaattgttattctattaaactttaatatgaataaatgtgtacttgtgttataacaaaaatccatataaagatataggattttttaaaataaaagaatttatggtgttgttttcttaaaggttaaaattaaattaaatgtgtacgacactatcagtttttttcggaatcttgatattcatatttttttattaattcagttgaaattttggctccttgacttaggcagtttggccgagtggttaaggcgacagactcgaaatctgttgggctctgcccgcgcaggttcaaatcctgcagctgtcgtatttaagtcatttcccctcagttcactaatttaaatacattaataatatgtgttaactggatataattggtctatgacattgtaaccaacaaatctattttttaaacacaatttaagattctattggtatttaaatgttgattattatattgaatcgcccttcttcactaaatcggatgttatatttggtattacttatttttaacgcatataattagaaaattggaactattgggaaggcagcttggccgagtggttaaggcgacagactagaaatctgttgggctctgcccgcgtaggttcaaatcctgcagctgtcgtattttaattatcatgaaaaatgtaatatttaacatatattttatcgtcacgattatttaaaactgtttccaggggtttactcagggaatccatccaacacatttattagagggaaggcacttgaccacattctcaggaaatttaccaacacatttttatcactgtaaaatatttttattttaatcagcaaatgattggatttagctataaatatgtaattaattaagttattctataggtaaattattaatttaattattttgctaatttaaaatttactagttagtttaaatttcctgatttataaccttaaattctgctcttcacgtttgacaatctccttctgattacaaggatggactgtaagatttaagaatccagtgaaaggatgcctttccacagtgactgttttcccaacgtaaacctcaggaacgtcctcaaacatctcgtccttactcagaggaagtccaaactgaataattaagtccaattaaatattgattatatagttaatagtatatatcgaagagttttacataggtgctaattttttacttgattatatcctctaagccagaacctagcggtttcattataacggtcatatgtaatggttagagaataagttctccacgttgtttctacagaagttacagggtcctcctaaaccaatttataactgtaagttagtacctcgtaaagattatccggtacgttatcttgaagttgaggaactacccatgattcatgaagaacgctctcctaaaaattatacaaatttaaaaacttacaggtttaggaagctttaaacaagctacattgtcacaataaaggtattgcttatcttcaggaagattagtgtcatacattgactgggttttaccagccctgaaaccagtacaattagaataaatttaaagtaaaatatagctaattaaggctggtatcgtaattaacaaacgaaccacctccatcgtttgttaatggagactaagccatctccatattcaacgaaattagaagtgttcaaagagcctttgagccccaatgctgatccttcgttgtcaaataagaaggaaaaactgcttgtaaagacctcgtaagctctcctcatggatcaaaaaactgagaatatataaaaaattcatagaattttggagaaaggaaaggaatttttggatagacgcttcacgttaccattaaacatacaaaatctataggattttaatttacaaattcgagagaaacttaaaattaagcgttaattaaaatatagttaaaagtagagatccttctatattatattacaaagattaagaaaaatttaaatgttagataaagatagtggaaggaacgaaaataaacagttttaataaaaataaattattttatatatctacggcaaaatatagaatatttattaaatattaatgaaatgtgtaaatgggaagtttattttcacatgggaacaattttgcataatcattagatttatttattaaaatgccaattgttctaatagtatcaattaaacaaaaaatgtaaaccacaatccagttatttatacttaatattattaaaaatggtcgaaaacgatcaatcttactcccccaaggataactcactcaaggctgactttatgtatgacctattggtaacaaaattaattattttaacttcaatttagagcattggagaaccttacggtcatttaaggttccaaaaatggaaatccatgagtaacaggggaattgaagaatttgcaaatgcacatccaaacacattcttaagaagaactaacaggtatttacgattaattttctcaatataaaaataaaaaatctaggggaattcctcagagatatagatgggaaagttggaaagtcgccctaaattataaccattatttgtcaattgttggtgacttgtatgaatcatacagtacaaagcataacgaatactcgtcaataataaacatcgatgttccaaggttataaaaacattttctaataagatttagaacatttcccgagttaaaagttttcaataaagattcccagaatcaactacatcgcattttggtaatccacttttatttaaacaatttttagtcagcttatggtaattatcaaccagaaattggatattgtcaaggaatgaatttcgttgcaggtatttctggccctttataatttgttttattcattttcattactcattattatattaatagttttattcctatctatgaagttatgtttacattctaatgccattgtatttttatctactattgattaagactttccataagaactttaggcctattattattggtcagcggatttaacgaaaaagaagcttttgtggcatttgtaggcctgatgaacgaattcaaacttcttgagttctataaaccatcatttccaatgattaaactctacatcgcaggttttgccttaagattcagtgcaaaatagcacataaatcattaactatatatttaaacctctgcattgctggttagggtttgaaaacttattgaagaagttatcgccagatctgcacaatcatctgaaaaaagaggacgtttcagtctctgtattcttaaaccaatggtaacaactaaaaatttaaacataatcaggtttttaacgatgtttgtggcaagcttgccacttagaacagtggttgccttgtgggactatatgctatacaatggattatcaagcgttttaactgtttctttgggcttaatatggctattaatgcctcaaattacaagacttaatttcgaggggatccttactttgcttaaggacatcaaatcttcagatagcaaggatgaccttagggtaggaagagtaataataaatcaagcacacagaatatcaacatctacaccaaatttaaaagactacattaatccttctaatataatctctgataaggaagataatgcagactaagtttaataaatgctgaagatctaacccaagaaaacctcaaccaccttttgatattcaaaactcattttaagaattttaatacctaaatttatcaaccactttatattttttaaattaaatttctaacagttatatatttaaaaatggtaaaaatcataaaaattgtaaaattttagagtatattcgcataattaagataaaaataatgtttggtattctacaagttgtggatcatggaaatatgttgttatccaagattccctattcccacttgttatttttttcagaattctatagatttagaatcaacttgtaaatttgatcttaatattaagttattttacttatgtgcactagatttatatatattttattcttttatatccccatctgagttattagatccgccaatcggattgattttttttaaatgaatataaatgaagaatttatttttattgtatatcatactacccatatgcttggtagaaagtaatgaccccaaaattttaaacctagctgccaaagaattccctggttttcatgttaccgaaattcctcatcctaattatcgtcacttacaatttgaattatcatctgaatctatgataacagcagtagttgatagtgggtctgatatctggatagctgaagaatctgaaaaatcatttctttttagggcacatgtttacgttaaaaacaaagttgctcatctggtcgagctgaaaatttatgtttcaaatatcgatataactaaatattatgtaagagaagacggtggtaaattcaagcacacgaatcaagatattttcaatgatttaaaacagacagatgtttacttttgtggagatttgattttagatttcgaacgtggatttgggtttcatttttttaagaaggaaaaaattgtagtatttggtcaagattttataaagtttgtacccagtataggactagatgtagttaaacttaccaatgggaaagatgtgatatgcgatagctccaaaaacagaactttttcttacgccatttacttctatagaccaggcgttgatgagatgattaaagttgtagttgaggatgctaataaagatcacgtatatttttactttcaattttctaaaaatcgatggattagatctggtccagcaatgttggaacattattataaaactcctcaaccatcagcagtggctacaggctcccttttacctgtaactattaaagatgagaaagctgaagacaaacttgaagtttacgaaaccacacctaaacctgaatcatcaaagtctcttgctttaccttattcagttgacaaatttgaagatacgggagctgttgaacctttcacaaagaaaatagtttccgatcaccttgttttgacacttgaaactgcacttgatgatccaaatttcgatgcgtcagatactacttatgcaaatgggcttatatttagatttgtgttacctaatgttcaaaatttaaaagaaatacgttgcaatagttttcattgcaaagtcgacggggttactgaagtatcttacgacttagttagtgcttacctttataaagatgtctttcatttgataaaaatagttcttacaaatatatatggttctacagaggaagattatatcagagtttgtgacagttcgtacattaaaaaaacacaataccatttgtatactgatcgtttgactaaagcggatcatgactctctatcggatccagcatttcttgctaaaagtgaaggagatttatcaattcccgacgattcatccgaaaggcttattgaatttgatttagagtctgatgaagtccagttcttgaaaataacgaaaattgatgaagtaaataaaaacccatgtcggatatataaacctaacgacgggttctttatcggtaaaataagtcacaaaaagaaggtgctttggagagcatatttgaaaaatgagagagcaactaaggggactttgtactttttaaatggtgagcctggatttttgaatttaattattccaggtttacctcgtcccgataataatataaccattgatgttatatcgggtaaaaagacaccaaatcttgtaagcggagtgttaagtcgagtaatcaggaaatatgattctgaattttgcatttgctttaatcttacagatcccattgactatactgcatttgatattgataagcagcaacacagatgttttgtttctaggatttttaaagctggatctccgatcgtttctgtttatcaccataaagaaaaagttacaccaaataacatcatacccttttatgatattaaagtttattattaccaaagggctcccatatcatttgtgactgaccatgcttcatatccccgagtttttattaacgcggcatcaggctggagaacatctaacctatcatctctggagagtgacttagatgatattaaaggttatttggatggtcctcatatgagaagttctctttctctttatctttcttatgaagattatgatcctactgatttcgaagttgaggttacgataaggagtcagataatttcaaagactttcatgccaacttttaaaaacctcatcacgctgataacttgcaacgatgcacatgtttatggctctgatagtttaaaatcttcaggtgttaggttttaccttaaaaacgagaaaccttacaaagctgaggtgcacaaatttattagggagggagtgcataaattaatatttaaagtttatgatgagacaggcgacaaaccaaagtggaaagacatcgacgaagatgattttacccgtctttagtctctcatctcctgtattatattattctaccttttctaaacccgaaagtgtaaactaactttacgaaataatatttcttgtattgcacattatattgtattacacattacgtactcgtatttatcaaattagtatacatcaaggtggtataaatttgtttatgtagagtttaagaatattaatgttacagttaaaattttattttactcaggcagtttattgacgggttggtacctctttgacaggaataatctgacaaacagacccttatctttaaacagacgtttacacagtgatacaaaggcgtagtaaaccaacagaactagtgcctaaattcatttttatcatctatttccacatatatttatacacaatggttatatacaatggttatatactagttatacatattggttttataatgtaatttttgtttgaaacttacaagtgctaggaaaattattgcaatcttcactagatagtagccgatattgattgagcgtggctcgagttctggtttctgtatgatgattccagtttgttcgtcgtaggcgatttctctgtgtgatagaatgtaatttacaacaattgccactcgggctcctgcaattacgatttgcagtcgcattaggaacccaagtttggaatctaatctctctgtgaacctaattgctttggttctaggcgtatcatttagataaacaaaatcttccttatcaaagattgtgttattcagggatgccgtttctgctgcccacacttcgagacactcaacagtcttattattgaaaagctcaagttcagttgagtaacgcaacccaagtgttgacacatgcgtccatgaaccataccatgcattctcatttacttcgatgtatttgggcatataaatatgctttagaaattcaccatacaatggtctttttgtgtttaatgcttgcatactgatattctcccagactggaaactcactcaaatcaactaaacacattttaatcagggtagctatgtatttaattacaaaacttaactaagtgttcaattaatcacaaagggaaactaagttacaatgcttaatcagcttaatgcgtaattaacacttaataaaagttaataaaaattagttaagtgtgtataggattatacctggaatggtagcgatagaatcaggttgattaaaatctagatgtaaggggtgatgtaaatcagaaagtagaacaactaaatatttaagacaatcagagggtgagaatttgatttttctaggatatcccagttgcggtatatcgaatttttgtggtttagcagttccaactggatacccagaattcattagtactgagaaaaagtactttataccggccaataggcaaagattattgctacaagtgaaattaaaattattagattttttatctggttgatattgataatgtaatgggagtgattctgggattctttttaaaacctcgtcggcccaccaagtataatccaccaaatcttcgcccctcaagagcatctttagccttctcagtctcatgtatgttatagcgctcatggcagttgactctaaaattaaaaattattttttaaaaagtttttataaacaatacgtaataattaaacagtgtttaaacagaatcaaatacaacaaaatatgagtcaatagaatcaaaaataacgataagtaacaatttattttttcgaactaaaaaattacctatagcttctctacagagctcgttccagctctgtacgaagttgactagtactgttgtgaagaatacacataaaattaaggcacacttcatcttgaactaaatctcaactacctcatcattttaaattaaatatatataatacgattaatccgataaaaaattaaaattgcaaatataagtaaaagatcaggtttagatacaacaccacacggagttagaaatacagtaacaagtataaaaatattacgactattattttcaatcttctctattctttacagtgtagtgtgagtttttacatgcttcgccataaatttcattgttcagggcatctactgcttttgttgtggctgcttctgctgacaaacttgcaatgtggtccaagttatacaaattccttaacttagtttgtgttttgtacattgtgtcatcacttggtaacagttggttaagattcggctaaaaatttttataaaatttattaacacatggtatataacaattgagtataactgtttatcactgagaaatattaccttgtgttgatagaatcctactgtggcatttccacctctaactgggccagtgtagtcatagtgtgaagttgttttttcttgacccactcctgctataaagtggagttttgttctcttctgagtcttcataaggtccttgaattcctttaccaacttgtttatattttgaaatatttgctaaaaatttattattcacttgaaagggtttaacttatatagagataattattagaggccaagtaggttaaggattaatcaaacttacattaactctgaccttgtgcccgggaagccactgaacgttattatacccttgaatctcctccaaaatgtcagtggttaaaaaagttaaagaatcgagctacaaaattacattagtttaatgaaaacattattgtaaattaagatgtctaaataccgctaattatacataaagttaattatgtataaatttaacttaatattatgaaacatacgcaatcaaaaccggcgttgatgaaatgctgtgctatggtagaagttgaattgttatgcttgaaaaactcgcgcacattctgtttttcaacatccagctccttatctaaagaatttcaataagattaaacaaaaaatttagtaaaaatataaaaaaataaggaaaacaaaccatagtgccatatctttgcaaaataaggagaatgtgtaggataatatgtgcagagaacgtcaacaatgaagtgaacgacgttcgctggcttgttctcttctactttctgtaaatttatttagtatattattaaaattaaatatttagttttaaaatatcccgggttaagcaaattacctttgccaaatatgacaataatttgtcggccttttctgaattgttagcgcttggacttgtcattttggaatttccattataccaaaacagaaaactttgtaaaatattaaaatatttaaaatgtgttagaatttgataaattatcaaggaggggttatactcaacgtgcactcggtttccctaaaattttaaggcacagttcaatgaattctgtaaaatttacacccctttaaaactttggttggattaagttcgtttttgttttatgaacttataaaattctgaggatataacgataagggtataagtataagttgtgactttgctgtaatgccagcaggtgcagaatgactataaactaatttttctcaaaaaaatccaaattaataaaatttaactatatattatgacttgttcagaaattatttaaattcctgagattcgtaccaaagtgtaactcttctattaaattttaatcagatgataagaatttcaacaacaacttaaaatgaagttatatataaaacaagcgttaaaaataaaatgtgtaaatatacaatggcaaaattgtaatattatatattagttgggctctacaatttgcattccgcagggtctggatacaattttaataagacatatatattaatatataccaaaatatttattttacattttaatgtttataaagaccctagttagtgacaaagtaccccaatattaaattatcatttcgtcccacttgtcacaattattttattctttatcttccctattttatggtccacatccttcaatttagtcttctggttttatgatgaattttattttttaatttttacccgattttaaaaatttcttccactttattatttaataatttaaaatgtgtagtctgctttttaaaatttttctccactccacttttactaaaaattaactaaacaaactattatatgatacaaaaaaatatgaccttgaagaagaaaaaagtagatgggagctttatgtaccagcaaccctattttaactacgcttccaagcgagttacacatgacccatacaagtccacaatgtgtaaagatctctcagatcacctgaatctccaaaagaaaatagataaaattgacaattccataaagtccatgaataactcactgattagtagcaaaaattccttcttaggtggaaaaaatttaattaatagtaagttatcctcaaagtgtttattaaaagggttggggaacacatttgaaaggaattatcatgattttaaaaaggcgccagtgaagaatccattttcattatatggacttaaactggatacgcacaaggtaaatccgagaaggaagacaaactcagcaccaccattaatagattttgatgacccaagccaagaatataatttacactcttcagaaaacaataaagtaaatcgtgaaatatcccaattcaagtcagattctatgcaaacagataacaattatggtaaaagtggactagaaagtgaatcggcatacaagaaaacctctttggaatcatccagaagctctagaacagactacattgacacggcacggcaatcgaaatcggatttagtggacacttctaggacctataaatctgactcaatacatatagataccatagcaccttacaaatacggctacgagtctaaagggaagattggaattgagtttaacccagttaatgaagttatagacagactttattcacgaaccaataacgtgttttttgttaaatcccgcaaacacttatcatctatgcgagaaagtactttgaacccaaattatgattcaaccacatcaaaatcaagagcactcgagactattttaaagaacaatcctggccaaatttgtgaagacctctttgaaagactggaagctatagtgtcatcggactctggagaccacattgaagccgacatcattgggtataataatacacacagggataaaagagtggacagaggtggttcaatatccagaagaagcacaacagaccaattttcaaatttcgatgtttacattgagaactttcagtcgaattcaatatcttttagaaattatcaagacggaaataacattaagggttcatatccaattaatcaacttcaccatagcactggttctggtgtcaatgactatgaggagatcagactggatatgactcctaacaagtatcttggtgtttctgatgacgccattctgaaggtctcaacagactcagcatatcgcgcaatggtgaaaattaagaatgatcggaaagcattgaagccatatgacatgaacgatgattttatgataacagactctgaggagtatgcagttttaaacacagctttcggccacattatatactcacccaagtttcaagatgataaatacatgtaccggtttatggttttaacaaatgaagcacagagacaagttgaaaaattatctaaaacatctccgaaaaatgggtttaatataggattatcggcaggcgggaagcggcttctcacttaccatgagattgtccataccctgggaataaaaatgtctcccggctggcaccacttcttgtacttcaaaaacacacaaaaggaactcatcctacggaaaccactataatttttaatattctaaaaatttactacttatttaaaaatttactagtatttggtaataaaaatttatctaagatattaaatgttagggttcatctttggtttttactatatttagtagcgattttctaggaggaagggctttagtagcctcaaggttcatccttttggaaagaggcggaaggtcgacatccaggtatgttgtgttggtcaagcaatcgtcgacaaattcatccatatatttaattacataacctgaataaaatttatttatttggttattattattattaataataaaacatacttccatcaatgtttctgaatctgagtttgcgataatcaccaagaatgggctcaagagtcctgtacacttcaacggcagtgccaacaagtctcctaaaaagattataaatccagataaaattattgaaatagtatattatttaatgaattactgaataaataagtgaattttccagtgaatgtttagtgaataagtgaatttacatgtaataaatgcctagagctcttaagtatttgtaatcttcatttttaatgtactcgtgaacgatctccatttcaggctgtatttgaagcattttaagtacaagacaaataaaaggtgaaggttgccgatttccgccaaaagtgcctccaacatactttatttgaacagctttatcaataagtgattcagcagttaagccgaaacagctttccttccagtaaaaggaattataaaccttatccctgagaatcttactaaataaaaattgaggattagtcccgtgtattaaatgagcagtaggatcagtcctatttgccataataataatttatgttgtgaggaaccaacactgttcacttggggagtaaattcataataaatattcaaaactattctaaaaaattcaaaatatatttagataaatattttacacacatatatattaaattagtttaattttgaccctttcctacctagttatttagaggatcagattataacgtcaattcttgacattataatcccgcttatcgttctacaataacaggtgtatgctttacgccttaaaaacgtcaatagaacttgagtctttatatttctccttaatttaatgtacttgaacccattggtttccctccatataccatccagaagttcgtccctcagagctacaggcatagagtatccttctacgtacatatatttaaaacacgagggagggtcaactttatatggttctgggcagtagaatccggcaatttgtttatccctcaagtcaacagtgcatccaatttcctctccattctcgattatcttttcagtatccttaaaaaagtcttcagaaggctcattcactccacatccatgcacccatgggttagttgctcttattttaacggagtggattccccaaacttccatcttcctaacgtctgctttaggaggttttttcgcccttttgcttctaaggtttccatcgtcacccgtactggacgaagcaccttccgtactcggacctgccctttccgaatctttagaactttctgagtttgacttttcaggttctgaaatggatccggaagcatataataagtctatagaatccaaaatatcgctcttgataataacaatactaccaattggaaggtacataataatgctttcaaagaacggagctacacttgctttagtgtaatggataacctttagtctaaacccaccaatattagttgcaattaagtcggaatactgcactggaaccaagtagtcaaactcgcccaaggtaagtcggtaggtgtacttggtcaaatttacggggaaaaaccttctatttgagtatgaagcgtctgtatacaattgttggggaatatcggccctgccttttctcactcctgtgaaagttaagtctggactggctataactggggtccttagatgtccaaaatccacttcattacaaaggtacaacggttttggctgaacaactgatatcttgagcttaattccctgtctcagttctaagtgataagctggtacatgctttggtatcgttatgaattcaatttcgggcaaagaattcgtgttatttcccctctgtgtgtaccttgtgtgatcaaatggcggcagaaacattttaacttttggtatgaagagaatatattctccaaaattaaagcacctatagtttgcatgagtctcataacttgcatagtaaagagtcagtctacttttttctcttcctaaagaatctaagcaacttgcatagaatgttgtaacattcattatctgccagctttttttcctaaaaatcttgaaattttgaagacttggaaattccaacgtcttaatctcttgatctacatccacaatcaagttcagcctgggatctatcataaaaccacccaaacctggtggatacaacacttcatcatgtgcgcacgctattccgaattgtaaatggcttaagatatcaaatgtgttatgtttgactccttgtttctggcacaaattaaagtgatgcgcacagaactctgcatccttgacgttataaaagattccagaatttacagtttcacaacctgcgcagatatcatggacctgtgcaaacaaaatattgattttaaccacaatttcaggtatttttgaccattcgtacttaagtatccaatagtaatagatgtcatctacacctcttttcaacgccattggtttccaccccctttctatgttcaatattcccttatgcaattcactatcgtcgattcctaacgcttggcctccaaataactcccatattggcacctgattcacatactctccagtataaatgaacgagttagcttgccttttaacgtcaattggagacaacattgtgtaaaaggggtacctacgtatttctctttttttataaccgggagatctaaatgtcttaatgatatcactgtctctaaatagtactctacaaaacggatagtctggttccgagtcttcactatcagttgattcacttgattgttcttcctcctctgaactacttttcacttcctctccacctacttcagtatctttaccatcttcttcatcttgatcttcatccttgtcggtatcctcactcacactcacactctcactcacactctcagtctcactctcactctcactctcatctttatttttagaaggtaatctggctccaaaaatagctttcgagtttcgtttatttattctatagttcatacttgtgatgttatccacattgggaggcaatataatcttcactttatctcctggatgcattgttactgcaaaccaatcacctcttattggctttactctatttttcatcagcatttgaggaatatccaaaacgtgttctgtttttctttcaacgatgattttagctgatactttcccttcttggtctaagcactcacaatatcctctaaaaggggcataagcttgctcacttttataacttataaaatagagtttaccttctattactccccaatcgtaaatcatatgatttgatactgtcatcagctggttcggaaaatctgattttaagacaaataagcactctggtggctgaacaatcccttcacaatagaaaccaacaagagggttaatcatcatatcaactttacattccgtgtacccatctaccttgttatggtcttggaaggttttgaaaaaattgtttggcacgttaccgcatccgcttacaatttttggaaacgagccaggtataataaaggctactccaattctcacgtcttcatcgacttctcccagcaggggtatgtgtaatctacgataatcttcactagaaggcgtatataacaatttcctcattaatttaagaaaattatgatcaattttcttgaaatgctttctctttatgcacgtatacatcattattttgtaagttttgactgatgcaaccccgtcgcttggtggtttcagtgttaaaacttccttctccgcatctgatgttctgctaacgacattttcattcttggttccaaaaatctcccaaatttcatatctttcaactttcgttgcatttatcaattcatcggttactatcacgtccacctcttcaatatcctcaggtaataatgtatactcttcatcgtcattatccggcctaactttattctctaaatcgttttgttttatttttccaataattcttctaaaatcgatgaaatattcatcttcttcgtattcttcaatatcttccttcaccattctcggatcaactcttccttttggattcttcgggcatattatatcaatttttgttcctaacccaaatcttcttacacacattgataaatatttgtttgacagagatccttctccggacgtaaaatcacacgtgagctcttccagcccattagctaatttactaaaaactgcaataagtagtaattttattatgaacttcatttttttatagttataatatattttatcgttatttgaataaatattatctaatgataggattccattttccaaaagagctagctaacgagaaaatcagttgctcattgagaattttctcatgtaaccaaatattaaataattatatcagattatatattttttaagggcgtttagttattccatatttcttcattaatcgaccgcaaagcttccttcttattatgaatcccagtggtttatgcttgcttctggttttgtatccatctttacagattccccaaattgagcatttcggtctctttgttccgcttttatcatttccgcctaaataattttaattcttcacttattacctccgtgtggatgactatttgggttcattgcgattcctcttaccacaggtctccatcccatgtttctaaataaaaattatacacatttatttattttaatgtttaattaattcttttaataaaatttaactcaataatagaccaatttaaggggaaaatagataattaaataaaatttacaaaaatttaccttctggttcctgcctttttaagtattctttcattatgcttaatgtttgatatttggcctattgtagcccagcaatcgagtggaaacttcctcaattcagtggaggaaagcctcaaagttgcaaatgtttcatctttcctaagttttaaaggttaactaaaatactaaaatactctgtaacggtgcagtaaacgcctcctgatcgagcgatttgtccacctgctcctggtctcatttccacattgtggactatagaattaacctaaaataaatttaataggaatttaaaagagcttataagtagagtaaggtaattatgcgaaaagataagtcaatttggtaggtacaggaatgtgcctaagagggagcgagtttcctggcaaaagaggcgcgtttgaactagaaaggagtcttgttccaggtaaaactccagctgggcataaaatataactcaatacgccatcatcgtattggatgagtgcaacatgtgcgcttcttgttggatcatattcaatcctcaaaaccgttgaaaatatatcctttctctgtcttttaaaatcaatcagtcttattctttgtacatgtccacctcctctatgtctagttgtaattcttcctgtgttatttctaccggcaaatttaactcttcttacagataattgctcaacaactctgcagtttgaaagcgtttgaggcgtttctaggtttttcaaaaatctcaagtttttctcctaaataagcaaattagataaattattaaaaacattgttgctatatttataaagtgaatggaatcctaacctgtgtatacggtactggcaataacggtctttcaattttgacttttggaaacttagtttcgaaatctacatattcaggccgtatcctcttcaaattagcgtacacagctaaaattattgtgtgtaaggattaaaggtaagaaggtgtaactaaaattattttttaaaaaataactattcaacgaataaatttaaaaacttacaagaaaaaaatctttgcgataaaaatttaaacatatataaaatttaaattaaacaatagaaatcttcctcatataaaacttgccacccactaatctgcttcagtaaataaaaattcttaaaatgaggttatctcaaaattctttattttaaaattaaatgtcaaaaaacaaatcaaaaaagccaacagttggcaaaaactcagtaaatccctttgaaaaatttgattctaaaataaaaaacaaggtaattctcacaaaacctccataaatttaaaatattttaggaactaaactttgataaaaaaaccaagagtaaatttattaagaaagtcaaggattcagacatagtttacgactattctagcaaaaagagcaggaaattacagctatataatttaaatgagcctatcaccctgacccacaaaaacaaacctattgaggaaaattacgattctgatgtagatttatcctcagaggaagagattgacttgaaaggagactactctaacatttcagaagcctataaagagtataaggataggcgtgaagccaacagaaaggataaattagaccagaaaaaccttttacaaaagctagataagcaatttcaggagattgacttttcacaattttacaaaccttcaaaaaagtactttataaaatacaaataatacactttaggtcccccgaattttacaaaactgagaaacctaagaagttagatgagtacgaaactaatcttagagacctacaattgaatacaaacacagcaaccccaagagtaaacctagtaaaagagttcaagtcagcctctaacatttctgaaaggtccgaagtcgtagataagataattaagtctgactcagactttttaaattttgcaaaggattacataactctttatctccagtcactggttgattacttgaaaggacaagatttaactaagtttcatcactattttctcaacttctcaagaggatttttacacctctctaataggtcctacaaggattataaacagtgtttagaggatgagctttcgaagattaccattcaagcagctgatttatacgagtacttactactttatttaattgtaaaaactgttgaaccaggaactgaaatttataactacggactaacacttgtggaggggtttctagttcgtttttatcaacttttggccagtcaaattaaggataagaataatcctctagataaacatttgttgataaagtctagattactgttattaattacctacaattgtgtaatcgagacaggatattacatgccatacttttatcacgttgccataaaactttgtaccataccctgtgtagatcgagatttaattttgtcagttctaaaaactgttaaagtaactctgaaccaactttttgataagaagtgttacattcaaccgatattatcgctaatcatactcccatctcttgaagaaatcgagtcaaattttactagcattgaagcctctaaagactctgattccgccaaattaactgaatttaccgaattcaagaaatatatgcacgacctggccaacatcaactatccattaaaatcacttgatatatataactcacaggttttttacaccttcaatttaattaatttttagaaattgaatcctgaattccccaaattgaacacagtcaaaaccaagtccaacaaatataaactggataaaaccaaacccgagtcgaataggaaaataagcaagagtgataagcaggagtataagaatttgaagcgagctttgttgactgaatcacttaagaaagctgagtttgacatcaaaaagagggctaaacaacgtttggataccgataaaaggtacaaacaggttgtaagggacgctatggttgagcaggacatgctcaagaaactatcaacttcaggtatttaatcatctcattgtcaatttaaacactaaaattaatgacaaaattaattataataatgataaatcaatagtatcattaataatattattagtaaaatgatccaatattaagtgctaatattattcagatgtctcagtgtataataaaaagaagaaatgatgctaaataaattacgtttttttggaaccaatttgttcaaattcaataaacttgcttcaaatcaattacaagtattttaaactcaaattacaccaaattataggctatttatgaaaaattggaatatttggacgaaatcgacaacttagagttcgacggctccatcttgaacatccagtttcacaacaataagtttatcctaatcaacaaacatgaaccgtctcaaaagttatggtactcctcattttcaggttagttttttatatttatggttgatttaggcctggactactttcaatatcaagatgataagtggatatctactcgatcaggtacctgccttccctatcaactaattctcgtaaactaatttatgaataggattgtgcatgtttaacatattatcaaatgacatatacaaagcggttggagtagacattaagttcaaataatctcttctttcaaatgtattcatatatcctaggttttacttcaaattgacaaacacacgtggtccttagtacacaccagctcagactgttcctctagagatctaactgcaccttcaacctctgattctaataaaggattattataatttatagttatagataagaacttgtaaaaatgtaaaaataccttgatgtgtatgcattagagcctgataaaggggcgccttcttagagattccctcaggagtggatttcaagtacttaataacgagaatctcaagttcgttttttatatggtcgtattcaggacctaacttgacctctttaaagtttccgacgccggatgggccaggcatgtccgacaccttaccgacgtgtttattctgtaacctcagtctttcgctcaaatccaaattgtaagctgcgtaggcaacgagaacgttgtgatacttaatcctatcttctacagctttagagtacttaccgtagttaatcaaatgctgagagtcgatgtagaagttgtccatgctgagaagaaccagtgatccgacaatctggacgtagtccaggtcatctaattcaagagatacattggaaaaatggacctttatcacacctgtggagtcgtctaagtcaaattggaaaacggaaggaaacttttctaaattcttaacctggccaacaacacacattccaaaaacaggagtgccaaaaattttaagtttctggtttggatctacaatgttcgacaaaaccttcccaacgacaactggcacgagactgtcgacattagttggtttttgctgtttttgaaaaatgggctgaggtacttcggaaacatcaggaggaacgtactctgttgtgtattcatacttgttatctgatttctgactggattccggctcttcattaacttgctggtttccggaaaaaataccgcccagtaaaccaaattcaaatccgtccatttaaaattataaaaaatattttataaaacatgtttttgaatttacactacacatttactaccaagtctaaccataataaatgttattatgcaaatttgtaaactattattaattttctactttatatttattaaatcaacagttgaagttaagtttactaggattccaagctattcgctctcggtctcaagtttttacataggccaaaatacaacttggttacttaacaataaaatcgaaccttccgtgaccaatataataaaagaggagttattatcgcaagtaaagaattttaagcctgaaaagtccgttttatctggagcttcagacaagattgataaaatcgcacttgatatatctgagaaaatagctaaaaagaagaaaaaattcaggttaaagaatttatttcttttagaagatcttaaggattcttcattattaactgagattttttcatatttcagagaaaacccagtggtttactccatttggaattgcaataaaagcattttatcaagagaagaagagtttgtgttggaaatacaatataaatttccaataaaattaaaaggtgtgccaaaattttatttttcaccagttgtaacatacaaaataactcttaagccaggtacatctttactatttattttgtatacactaatcatagcaaaatttaaatttatatgttcagacaaatacggattgacgaagttctcaaaagggcttatacagcttcacactcaccctttaatgccctggaaaatgcataacatcggttcatttgtgcttcatccacccctctttaattttaaaaataatttatgagaaatctaaaattttaatttttatacacttttacatagaatatactttgtagcatatacttcatagaatgtatttctggttctaagttagattaagtgattttataaagttagagtccttggtcttcgatattatcttgtagagagcatttagttgagcctccagtagacttgcgatatccctaaaattcgtacccatttgatataacattgaagctttattcaaatttgcctcaaacggatttgtggaattaattctttgttttatgtatgcgatattgttaggcagaaaggcactaactctactgagattggattccataattcttatattcatggccaaagttgggtctctccttaactaaacaaaaaataaagttatttttgagcttacagagaaatagtaatgtgatccggaactgatctaataaatttattagagttaagatagaaaactaaccagtgtgtaaagttccttaaaatgtgcggtagcctctttaatggagttgtccaagcttataacactgtcaatttgtgaaataagtttaacgatttcctgtggtaaactagataattgcataaaactattgtatattctatcaacaatttgctttgcttttgaaaattcatcaatctgaattataaaattcataatgtaaaacttacaactacacgatcatatgcataaaaaaatctgtgaggatagtttaagtattgaaaacaggagtttgactgatccataagcacacggagatcaatcacctgaattaaaatataaatcatttttaatggacgagcaagtgtgaatagaaaccaaccatgttatcaagtctagcctctaattccttgacccagtttttataagcaaattcggattcgaaagcatcaaaaagtgacttacttttaaacattaattggtcctaaacaattaatattgaaataatatgtacccttgtgtttagtattgattttgatatattctcatcagctttgacacacatgcttgataccaaagactccggttcatccattaacttcgagaacacaaaagggagaacgaaattcttacacattgattcataagagttatcatggacagctacaacattcatatatttataagatcaaatagtaataataaagtaataattaattactaattggctaataaactaataaactaataaaccaacgtttaatgtaatgtgtgcaataattttgaaatccaccatctaaacagtaatttcttagattcagtcttcttgaatagtattggcacaggttatagctttcaacgatttttgagcagtattcatgttccacaggatcaaattgagtttgtttctcacctaaacacgtatgattatacagtttataagataccattcaacagtacatagtttgttctgcaaaactccagtgggttgaaaatacttaagttttctgagtttatcccagaacagtttttatccagaacattaagagtatcaagtgagcaagattttacaattttaataaatttatcctttatgtgttcacagttaaagttagattcatatggctgatatttcaggttacacaaaagaaattgtactcccttatagcaataattatcgcttctgttagacatactaaagatcctttcccctaacaattcataatccttacacctttctttattaaccatttttaaaatgccccttttatttaggatttgaagggatgatacgatattatcacaaatccctgaaagcgtattactatccgactggagtatgttacagtatgtggaatacatcaatgaaaatatgagaagaatgggtaaaaaggccattttaacatttttaaactcaaaatattataaatctcgtcctattggggaaatgtgtagtttgtagaaatgattattattactttcaatgaaatcaaagaataatctagaataaaatgaatacaactccatccagtatttataaaaaattattttaaacataaaaattattatttaattgaaatgtgtgagtgaattacctgaattttagaaatacacataaccctactaaaacaacatcaaagtgactgttatttacctatgttttacatattatatttaaattaactaatgcaattaaatttattgcataatttacaattagataataaatattccgaaaatggaactagaaattcaacctttgcaaaatttggcaactttacttctgacggatcctgcttttctattacatcaagtgacaattcaatttcattctataatgtcgacgaagatgtaaaaagtatttgttaattttagataatttaaaatttcagatacacattctcagctttataatggcactaccgacttgattccttcccaaattaacccatttttaactctgaaggtgaaggatgatattagggacttttgctggtttcctaattttaacaaaaatgacccagattcctgctgttttttaatcgcatcccgaaacaaacctgtaaatatttttctttcattattattttcagattattctctacgattccttaactggagctgagcactttacttacaaacctataaatgcagttgctgagatcgcagaaagttattgcatcgacttccatcctcttggaaaatactttctttgcggctctttatcttgtatatacgtttttgacattcaatctcctggagaacacatcgaggttattattatttatcatatccattttccttttattcatcttgtcaggatttattttatctattttatctagatttctttaatttattctcaattatactgtaaattacgtttattttagctgagaagactttctaccaggaagactacaggtcaaaaaggaataatttctaccatttctcacaacaatttcgggtctgaaaacacttatgcttgtggcagttataatggttctgtttcaatatatgaccataatatatcaaggactgtcagtctaacaggcgattttctggatcctgagtttcctctcggtccaattactcacgtacttccttactatttctatatatatttagtattaatgttcttatacacgattgttataatattattaacaacttttcactatgtttttagattaaatggattgataacactaaaatcatcattggatgcagaaatgattactatttaaggttatatgatactaggggtgacctcagttctcccttacaaaggttttatagaccagttaacaataatcaaaaagtcagctttgattacaaagataacttactagtttcaggttaattactaccttattttttatttggattacttgattattccaaataataatttattaggaacttgtaaaggtgatttattagtctacgacttacaaggcactgttgtttactccgagaatttttctgatttacctattccagtttgtactttcaatcctaaatttcctcttgttcttatctgtagtggaaccaggtactttttactattttaaactctttttattatttaggaactttgaggatcacagtttagattctccaaagggaccttctgaaccttctatctccattaaatctattccatttaatagagtttattcttgtaaaatataatatatgataaaaataaaactacattattttcgtgttaatgatgtatcacgtttagtatgagtgtgttatgtacgagaagagctcaatctataagtacaagttatcgggaagtttcgtttgcttttttgaccttgaataactcttcttgttgtttcatgtaatctccgtaggtacagctagcatgtaaattatacctctggccaacaatgacgatatcaccaaactgagccgcgagagccgatcccccaaggatatcctcggaattgaccttttctcgcaagtccgttaatgattttgcgttttctctatggactttcttatgccattgggcttttggcaaatttagtacgtcttggatcagacatttgatcctctttgaatattcctttctctgggccagttctttgaggcgtccaaaccacaaatccaaaactggtcgtaggtttgggttcttatcgatatagtaacctaaacaataatagtatgtgtgaaaaatcgtgttagattgtgtaaattatggtataatttagtgatagtacctgttccatagatcaactgtatgaaacattctatgaggtgttcatgtggttcttggttcattaccaggtcgaaaacaaccttgtttacaattttaaatccgagcattttcctctgaaacaactcgccgatcatcttcactgtacccaaagtcctcgtttttagcttcttaactgaaacctcctgatcttcagtgaaggttgtgaaatcgaagttttttggtgtactttcatattcacgttggattttgttcagaagtgcgctggaaaatgacaccttttttgttcctatatcgtattctcgtgatctccagtacagaatctataaatttgttaatatttactaaaaaaattttattaaactcacttggcataaatctgaatacatttcggaccagtcaggttccaaaacggccttatcaattataatatcaactattttttgtaattcttcgtaattgcttaaagattcacattgaattgcgattttttctgccaaggtttcgaacttttcgatagtcagcttgtttaggttaccctgaattttgcgacaggtaatttcgaaagattcgagctccccattctttagcagaggtttccacttatctataaacaactttaaagaaaaattaacaacaaacccggcttggatgatgtatcgtttgtattgttcttgttaggttgatcagtttccctaaaaagaaaattaacgtttgaaagcaattttaacaaagaaatttaatatctagaaattaaatcaaaatacttcttatatgtgacgattttaggggagttatcatctggatcaactgtaggaggtatattgaagttcaaatcactacaggtctgagattctattttgtccatcagttacggattaatattttacatacgaatcacttaatataggattctttccatcatctgaaatctaaaatttgcgtcgagcttatatccatagaccccactagagtaccttttccaaaaatatacctatcttttaggatatatcttattttatttaagaaaatttatacacatatttctttgcactttgaactagtatctgcatcagatttttcattttacacattttccattttccctctgaaaccttcctatttacgcatatttccacagtatctttctcatggttatttaaatccacgctccttttgcttcacaaataagtaccatataagtaatttatttatcattattatttacttatttgttttccttatcctggacgatcttctaactatcgctgatttgattttatttatcccttcattgatatcttcctcacttattgtcacagatccctttgatatacaaatcacagtcatcatacttagaaccttctttgtctctaatccgtttttctaaataaattaacccttttattcagtgaaaaattacctttattagtttaattaactctttctcatcaattttatccattttacttgaagttattagaaaaagtgataagagcgttacttttggttcgtatgcctttagtattaaattttctattttcttcaaaagagccaggaattcaacatatcccttgtacctgaaaacagtttaatttatgaatattactccggatttatagattctgagaatatagtagataacaattcaacgtcagcttgctggattttttctgatccgtaaacaccaactaaacacatcatattacaagatgtaattatttgtagtttatttccgtaatattaaagtaccaaattcataagataacgctgagatgcattgttcacttgtaaattggttatctttcattgcatctgatatgatttgcattatatccgttgaaaccaaagatggtaaatcttctaaaatcaacttgacgctagaaattattgatcggcttcctctttgtttaaatgttttctgaagtaatagtcatgaattaagtttggtacttttcttttaggaagtttgactctattagttactgacttgaagcttcttatatccgtgttttcaaaagtttgcgggtatgaattcagtggagaaaagtatttttctgactttaattcacaagcgcattttttagtttttagtttatataagaagaatgccattgacgccacggtgactactccctggagaccaatggcatacgcacactcatttagatgttcaataatcattttgttacttaacatgaaacatttatttagaataattttacaataaatttcaataaataataagatataacatcagaatagcaataaaaaataaaaatttctcagggtggaaaatgtataaattaataataaaatattaggaagaaaatttaagttcagttatttacagactttcatccttgttgtttagcggcagaatttcatattgagttggaacctctttttctaaaattgatataacaaactataatacttactcccttctacatggattttaggaggctgaacgttatatagagaatcaattttgatgagataatcgtttaaagtttgtagagagtcctgagtgatatctgtaacagttggagaattaaaacatctcattttgcagttgactggcgcttctgagttagaaaagtccttgttgaacttcggagagaggctcagaacacagcaggtttcgcacatatttttatcacaatttttagcgtttagaatctgttcatttgcacaatccaactcaattttttctgaaaatttatttagttttaaatgttaaattacggagtctcgaaaacgtgcaagtacattcctttggaacttcatctatgtccagatacgtgtttcttaaaaaacacacattgccttgaaaaaattatattaattgtaatatttaaaattacttgagttcttgtctttgaaagtgaatatttttgcgatttcgttaggtatgtcgtttttttccaaactaggtgtgtaactaccatgagtggatgtagaatccaattgaatagattcagtgcgatcaataaaattcaaaatgtatagaaaatatgaaaaaattaattttataaaataaaacagtttcatggatatttttgtgtaaattatttcgtcacagcaatgacataatcaggcaaaacacttgtataaaatttaggttacgagtcaatacatatgtaaaaaataaaataaattaaaattaacagaaataaaataaatatgtgcgattattgggaacaaaagagaagaaagggatattacttaaattctttggggaattctaaaaaattatatgttaattaaaaggtaattttaaattaaagagtacctggagactgtggaactccgttaacataatttgtctgcttcaaattgagtttatatcgtgctaaagctttatctctgaagggatccttgaggcatctaaggaagatttgataaataaataatatcttgaatataaaaaggtggaatgaaggcaaaatagggatataattgatacctgcaaagtaattgtgccagttcgatagaatactttgaaaatgaagtgtttatagacctccacatttgaaaattttatgaaaactattttacaaaaatataaataaaattatgatactgaaaaatcgaaaaacataaataaattaactaattatttactttgttgtgtttacactcattgatgaaacatattttatataatgtagtttattatgttactttatacacatagattcctatcgcaattaacaacaataaataaaaaatgtagtaattttagttttcgattctttagtaatattcggaatgttgcagtagtagcacatgttgaccatgggaaaactacccttgtggaccaatttttgaagtatacaggagggaaattatcacatacgagaataatggacagtcatgaattggaaagagaacgcggtattacaattttatccaaagttactagaataaacttgaataactataccctgaatataatagatacacccggccattctgattttggcggtgaagtggaacggattttaaacatagtagattgcgtatgcttgctggtagatgtagtagaaggacctaaagctcagaccagttttgttttgagaaaggctctagaggtattttagttaccgaatttaattattatagaaccaatcaatgagggcattggtacttataaataaatgtgatagagaatgccataagactcaaaatgaaattgaaaatgaattatttgatttatttttggattgcaatgcaaatgatgagcagctggagtttccaattttatacgtttctgccaaggattctgtagtctcaaaaagttatccactttctcaaagtcaaaactatgatatttcacacattttgaaaacaataattgaatattctccagaacctaaggtttccaccaatactgacttgacattccaagttagcctaattgacattgaagaaggatcatatttggtaactggtaaggtatatagtgggactgtttctcctggatccatgctttatgttcgagattacctgggaaataaaaagggtacaacctatgtaaaggatgttttcgtcttcgttaacggcaaaagagtaaagatgactgatccaatattccctggagatattgtaacaattcagtgttataaaggaataactcctcaagtaagcatatcatctgttatattatttataggtaaatgatactgttagcacttcaatagatttcgagcctatccctccagttaaggtctcagacccagtgatttcggttcttatttctgcaaactcaagtccattttctggaagagatggcaaatttaaaaccacatcagatataggcaagaggttgaaaagagaggctctgacaaacctttccttgcaaatacaggagagtgaagacaagaattcattccttgttaagggtcggggtgagttacagatagggatacttttggagaacatgagaagggaaggatatgaaatgaccgtatctcctctttcagcaattacatttgagcatgaaggaaatattgtagaggctttgcaaaggatgatagcctatgttccatcagagttttcagccaaggtggttgataatgtaaactcaagaaacatggaaattactaaatacacaggtaattttaatacaataattaacatttagagctggaaggaagtgaaaaatatacaaaacttgagtttgaagggagtaccagtcagatgatgggattaatgccagtactaagggacgtaactagggggagaggagaattcaatgtaacaatgattgggtattcaaaagctggaagtaaaatatataacgctagaactacaggatcactaatatcatgtaacgcaggaaccaccacagcatttgccctagacccagtcatgtcaaagggcaccctgtttgtttcagaagggacacatgtgtaccaaggcatggtgataggagagtcttatactgacaaagatttactgcttaacgttaccagggtcaaaccagtaactggaatgagaaataaatcacacgaacaaagtattaagatagtaactaggccacttaatgtggagcaagcccttgcattcattaactcaactgagcaactggagttgacgccgaagcgcatatcaattcgtaaaaaaattttgaatcaatcctgttgaaaatatttatatttacctattgtaaaacaatattaggacctcagttatccgaccttcgcggatggggtgctaaattcttttttaaacattatatttattatccttttccccaaaatttgtatttatagtatatattttttatttgttttgtgtttccaggtttaatatatcctggcccgccgacaagtttttgtcgtaagcattgcattttagtatatatttttatttgtatattattctctgtttgtttcaataattgtgaattaactcaaatctcataattttttaagagataaaatctataatatccctttattgctgtaattttatacgtgtttttagtaactatggctgctctttgattaatttattataccttccgttttgtctttccatcttgtaaattattctttaattttatttccttttgtttgatattaatcgatattcaaatctaaaaattaattttagaagtacagccacttcacttttgtacttatatttgactttgccattttttcattacaatcatttcacgctttagtgattataccataataatttaacacatatttcaaaatcatatttaatttgaagacttcaaattaatatattacatttaaaattttgctacttttttaaaaaatggttgattctacttttagtgatcccaaccacagattgctcgacaaccgttttgacgatgttgagatgagtagacagtatgacgacgaatccactttggttaattcgtttagacgtgtactgactaagaagcgtgtgactattatatgcagtgttgttttttctttacttgttgtgattggtgttactgtgactggcatattagtttccagagccaaaaatgtagttagtttcaagagtagtcttgagaaccacgttaaatctgatttcaaatccatagacccagagcttatggcttcctacgtggatgagttaactagtttatatgaggatcgtcaaatttcttctgaccatgttcttgagttcgaggttatgttgaacttcgaccaattcaacaaggaccacaacagagtccatgcaagtcacaatgaacgcaaagataggttcttgacattcagaaccaaattcttgaaggttaaaattcaccaaggttcgtcactaaatatacattagatattatggaaacgatactagttattataggtacatactgcttattttctatccctttattttttactgataatttaatttaggtcacgagacttatagcagagagatcaactcctttgctgatatgactgaggaggagttcaacaagttatttccaccaattaaggttccagagagtaaatcaactaccagccacgtcgaccgtctcatggccagaatggtttctgacgaaacctacctgaaaaacctgaagaaggctttaaacactgataaggatgttgaccctaaaaatataactggggagggtcttgattggagaaaggccgacggagttagtaaaatcaagaaccagggccttgaatgcgggtcatgctgggcatttgcaagcgtcagttccgttgaaagtctgtataaaatttaccgaaatgtaactcttgacctgagtgaacaggagttggtagattgtgagaccagtagcaagggttgtgagggaggttttggtgatacagctcttaaatacatacagaataagggtgtaagtactgattctgaaatcccgtaccttggtaagaaaaacaattgcctcgtaaaatctattgataaaacatatataaactacttcacaatcgcatacggccaagatgttttaaaaaaatctctagttatttccccaacaatagtttatattgcagcttcaaatgatctctccatgtaccaagctggtgtgtacaacggggaatgtggctcagccctaaatcacgctgtactattggtgggtgaaggctacgatgaagtgttagataagagatactgggtcattaagaactcttggggtccagattggggggaagacggctatttgagattagaacgaaccaacaagggggaagacaagtgtggaatcttatccgttggtataacaccagggttttaatatacattattagagttttaatgtagtacaaaatttatatataacatccattacataaattctactgtatcaattcacctaaataagatttgcagtgtgtagaccaaaaatttgggtgattcctttagacataaaataaaataattataaaataataatgagatttaaaatatcaaaaattaactaatttaaaagtgaaatgaagtggaataaaataattatagcaaaaagtataacaaatcaaaacataaatataaataaatagttgtcatagggttcaaataaacttataatcttattctgttattttatttataaatttaaaggcgtaaataactatttagagaagattgttaatacaatatgattctagtgagaaggttaaaaagcagaaaaaggaaatggcacacacaacgtctaacggtacacccatgcatattaaaaaatatgctatttgaatattctgtgggaaatttcaattatttgagaattaaggtgtcccggtctgaggcgcctacatagacatgaaaacgggaataagggtattatgcaaaaaaagtcggtggggaaagaacgggctgttttgataatataataaatgacaaattcacactaattggacggagaaatatgtacgtttcgagatgtaattgcatattattgtctcggagccctacattgcgaaaagtctgtattcgtcctcgaaattcggaatttcaacacggcaaacattttttaataaataaataaattattctgagccaagaacgggagttgaggagcacccgtatccacggtattcggtttcccatatttttgcatgacgtaattcatgtcgggttatttaaccttatgtatttcacagtttttataaactttccaagtcaatacttgtttgattcgatcaccttttagaaaaatggctgatgcagttttgtctaacccaaaccaaagattggtgagcaacaggtttgatgatgtggagtgtcacaaccaagcaagtgatattgaaattccatcctcttctttcaagactatcttgagaaagagaaggctcattatcatctcaaccctctcacttattctgattgctatcacttcaactattctttccgcagttttcattgtcaaggcaaaccaagcaaagaccttcaaacatgaccttgagtccctcattgacaaggaattcagcttcttggacgccgatgcaagggacaagtacgtcgatgaattggtcacactcttcaaaaagggctatgtatctgatgacttcagattggagttcgagacctaccttgagttcgaagcctacaatgccaagtactctgtgaagcacaagaacgagaaggaacgcagggagaggttctcatacttccgcaacgactaccatgacatcaagagcagaaccggaaaggaattgtacatgaaggaaatcaacaactacactgatatgaccgacaaggagcttcgtctcttgttccccaagatcaccaacttgccaaagtccaagaaggccgaagtcaatcccgtttccaagatcaacgtcgaaatgtctgctgactacttgtccagcttgaaagccgcaagagatggccaagaagtcggtgacgttgacaagatcactggtgaaggtctcgattggagaaaggctaatgctcttacctatgttaaggaccaaggcaccctcgctccatctgactgggccgttactgtcattgactctgttgaaagtttgttcaagatctacaacaaggagaggagcgttcacctcagcttccaagaactcttgaactgtgacttcaaatcccaaaaggaaggaaacatctcctctgcctttgactacgtctcaaacggtatctcatctgcctttggatatccctactctggtgtcagatcaaggtgcaaaaacccctctaactccaaaaagtatgagattggctccaagatcttcatgactggcaaggatgtcttgaacaaatcccttgtcatctcaccaactgttgttgccatgtcaatgcacagggaattcttgtcatacaagggcggtctctacgacggaccctgtgccaagtcacttaaccactacgttttgctcgttggtgagggctatgatgaagacaccaaatccaggtacttcattgtaaagaacaccttgggacaaaactggggtgagaacggttatgccagactcgttaggactgacgaaaaattcgacaaatgcgatatattgactgttggttttaacccatccttcactaaagtcgaaactgaggaagccaagaaggagagggagaaacaagaagctgagaagagaaagaaggacgagaaggcaagaaaggaagaagaaaagaaggccagagatgccaaatccgccgctcctaaagctcccgcaaaaaaaccattaagaaagtaataaaatatatccatttttaatatgtttgtattgtcacttacattaatatttatttatcgtttatatttctgtatttttattactccaaaaaatttgaaattcatatttttgtgataacaattttataatttttacttgatcatttttatgagtattttctgtattcctccccaagtcgggttcatgttttcttcagttctttaactcaaccatggctgatacaatctcttccaaacacgatttcgaatcgtctggatttgataagggaatgaaattagggagagaactcacgggggatgttgaatcgtttccgtctagcccacggaaaatcaagttcagaagtgtcctcgtctctttcctgatatttcttttcctggccatttcagcctcaataattatttatacatttgtttccgagtcactgtctgtaactaacttcagccacaagctctcggaacatatggataaaaattaccctagaatgggaaaggaactcaaggaatcctacaggaatgaactcatcagactctacaaaaacaggatcattaccaacgactacgcattggaatgcgaaaccctggtagaatttgaaacattcatggccgaattcaaaaaaaaatacgatcatgcagaacgtgccaggaggcaccttatcttccgtcaaagatacttcgatattaaaagacaaaagggttagtttattacttttaatataaaattaacgattttataggcgataagggctacaggctggggatcaacaagtttactgacctcaccgtggaagaaaggcgttcagtattgtcggattatccaccaattaaagtcagcatggacttaaatgataaaaccgagcgtaatcagtttattgagaggcatatgtctgatccaatgtatcttgttaagcttaaaaaagccaagaacctggacaacagcatctacgactcctccaaaattacttcagatgaccttgactggagacgtgcagatgttggcactagagttaaggatcagggactcgattgctcctgctgctgggcctttgcttcagtcgcagctgtggagagcgtctaccaactgctccaggatgacgacctagatttaagtgaacagcacctcatcaactgcgaaaatagatgctcaggatgcagtggcggatacgtggaccttgcactcgactacgttaagaacaagggcctaccaaagtccagtgccgtgccatacctctccaaggaagaaaagtgtgtggagactgataggggtgtttattacattgacatgttcctagtcaacaaaggcattgacgtctttaacaaatcgcttctctggtcaccgactgttgtcaacattggtgttacagacagttttttcgactacaaaagcggaatttacgacggagaatgctccgtcaatttaaatcattcagtgttgcttgtcggcgaaggctacgaccccaaaactaagaagagatactgggtaataaagaactcctggggaagagattggggtgaagacggttacatgagattggaaagaacgatgacagaaaacgacaagtgtggaatcttaaccgtcggattaacccccttgtttaaccactttctcgcaagtgaatatgtgggccacttcgccatctagtcccaagttttgaaaacgtggactaatttgttcgatttaatttatttttaaatcctttaatgttttgttttgtgttacatgtacgctcgtaaacacacttatgcagtctcatttgcattcttaacctaacattcagaggttaaaataaaaattatactatataattggcaaatacgaataaaatgtaaaaaagaatcatgaaaatattccaatggtatgtgtaaagtaaaagaatctaaatgaagtgataaattaactagaaggtggtagtttatcaaatattttaaaataatcaataaaacaagggtatatttaaataaaaataatttttaaatgtgtttcaagggttgagttgtggaatctgggtgtaaggggtgaacgagtcaatattatcccaaacgactgcgcgaccgaaaatgaaacattattttaatgtatactatgctacatggagtcaaatgcatatttatttagagagattccggccacagacatcgttgcatggggttatttatcatgtactagtattctttttttattccaccccattcttctcagattatttgttgttcccggttacgccaattcttgatttttaattcttgctttaatttgttctgggtacatatttgtattttaatcttgttttttagggaagtacagttttaatttttgattcatagccatccatataagtttcactatatctcagggaaaatgaccattatagatgatcatttttcctatagagatggtgaagaccgggtttctcgatctagaggtgatcctctgctcaaccagatgaaaagaatcgttattaagaaaagagtaataacctctttcttcgtaatattctttatattggcgctcttcggtggatcacttgcagcatatttcttccttggttctaaaaccataagaagcttcaaatctgcagcaattgaacatatcgaatccacttatccttatatggagccatccaagagagctgaattagttgatgaaattgtgaagattcgacaaactggaaagatcacctctgaagcttccgatgaacttgatgtgttgattgaatttgattcctttgttgagaaacacaagagagttcacaagacttttgaccaaagactagaaagatttctcattttcaggaagaacttttacattgttagagctcacaaagtctccgaaccttattcattggaattgaataaatttgccgatttatctgaggaagaatttaaagcactttaccctgtcataacacctcctaaagcatacacttcactctcaaagcatcttgaatttaaaaagatgtcatacaaaaatcctatttatatttccaaactcaaagaggccaagggtgttgaagaaataaaggatatttctttggtaactggggaaaaccttgactggactagaaccgacactgtcagtccagttaaggaccaaggtgatcactgtggttcatgctgggcattctcatctatcggttctgtagaaagtttatacagactatacaaaaacaaatcgtacttcttgagtgagcaggaacttgtaaattgtgacaaatctagtatgggttgttctggtggtttacccattactgccatggaatacatccactctaaaggaattagctttgagtcagagattccatacattggaatcgatgctccatgtagaccaagtatcaagaataaggtcttcgttgattcaatttcaatattgaaaggaaacgatgttgtaaataagtcattggttatctcaccaactgtagttgcaatcgcagccacgagagaacttaaattatatcaaggaggagtatacaccggaaaatgcggtgatgcattaaatcatgctgtattattagttggagaaggatatgatgaggaaacaggtcttagatattggataattaagaattcctggggagaagattggggcgaaaacggcttcctaagattggaaagaaccaaaaaaggtttagataagtgtggaatcttaacttttggattaaatccaatcctttattcggcatagaataattgtactatacttgtctataatacttgtatacatatttattctcaatattactatattagcatagaaatatgtattccgggtatcgatatgtgttaactttttgggtatgtattttggttcaaaatggggattactattttgagttataaataattatttgactttcaattaatcatttaattatttttaatatttggttgaagtattaagaaacttataaatagcaattttgactattacacttaaacctttgtcattatattctgcttgctattcgtcgtttttactttggaatatttccatattcttccattattttaacaggaactgtttttatttaatttttaatttttaatttttgttaatttgtattaaccatggttagttccgttgtttctaacccgaatgaacgccttgttaataacagggtcgagaatgatttggagtcgtctgatgatactttatctactcaggccaagcctgtttctcgtttattgactaggaaactccttttgggtgttgtcgttttattctttttggctggcgtttccgtcgtttcttactttctctttagtaaatacaagatgttaaataagtttaagagggagttggatgaccacttgactaaggattttccgaacctagaaaggtctaaacgtgacacttgtttcgacgagttgactagactctttggtgacggtttcctatctgacgatcctaaacttgaatacgaggtttaccgtgaatttgaagaatttaactccaaatacaacagacgtcatgccactcagcaggagcgtctcaacagactcgtcactttccgctctaactatctcgaggttaaagaacaaaagggttagttacacacacttaatattattttataggtgatgaaccatatgtcaagggtatcaacagattcagtgacctcactgaaagagaattctacaaaatgttcccggttaacgaattttcttattccgatttaccttacaaggatcatatattagataacgtttctaatcctacatatttaaaaaatttaaagaaggctctaaatacagttgaggacgttgaccctagaaatctaacgggagaaaatcttgattggagaagggctgacggagttactaaagtcaaggaccaagttatggacgaatgttattcatgctgggcattttctactgtggcctcagttgaaagtttatatagaatttacagggatgaaactgttgatttgagtgagcaggagttggtcgattgtgacaaattaagcggtggttgtttcacaggttcaccttttactgctatggaatacgtctgctccaaaggcttatcatcctcgagagatgttccatatagagctaaagttggaaagtgcagttatggaaaatataaaaagaaatttgtaaatacatactttgtagcaagtggactggatattttaaataaatcacttgtggtttcaccaacagttgttccaattaatttatcacgtgaatttttaacataccaaagtggtgtttataatggaagctgtggacactacccaaatcatgtagtcgtgttggtaggtgaaggattcgatgaaaaaacaggtcttaggtactgggttctcaagaactcttggggtccagattggggagaaaacggcttcctgagattggcgcgtcctaagggcatggataacaagtgtggagtactgtcagtgggtttaacgccagtgttatactcatcctagaataattgtactatacttgtctataatacttgtatacatatttattctcaatattactatattagcatagaaatatgtattccaggtatcgatatgtgttaactttttgggtatgtattttggttcaaaatggggattactattttgagttataaataattatttgactttcaattaatcatttaattatttttaatatttggttgaagtattaagaaacttataaatagcaattttgactattacacttaaacctttgtcattatattctgcttgctattcgtcgtttttactttggaatatttccatattcttccattattttaacaggaactgtttttatttaatttttaatttttaatttttgttaatttgtattaaccatggttagttccgttgtttctaacccgaatgaacgccttgttaataacagggtcgagaatgatttggagtcgtctgatgatactttatctactcaggccaagcctgtttctcgtttattgactaggaaactccttttgggtgttgtcgttttattctttttggctggcgtttccgtcgtttcttactttctctttagtaaatacaagatgttaaataagtttaagagggagttggatgaccacttgactaaggattttccgaacctagaaaggtctaaacgtgacacttgtttcgacgagttgactagactctttggtgacggtttcctatctgacgatcctaaacttgaatacgaggtttaccgtgaatttgaagaatttaactccaaatacaacagacgtcatgccactcagcaggagcgtctcaacagactcgtcactttccgctctaactatctcgaggttaaagaacaaaagggttagttacacacacttaatattattttataggtgatgaaccatatgtcaagggtatcaacagattcagtgacctcactgaaagagaattctacaaattgttcccagtaatgaaaccaccaaaggcaacatattctaatggttactacctattatcccacatggcaaacaagacttacctgaagaacctgaaaaaggccttaaacactgatgaagatgttgacctcgctaaactcactggtgagaatcttgactggaggagatcttcatcagttacttctgttaaggaccagagtaactgtggtggctgctgggcattctcaactgtaggttcagttgagggctattacatgtctcactttgacaagagttacgaactcagtgtccaagaattattggactgtgacagttttagcaacggatgccaaggtggtttattggaatcggcctatgaatatgttagaaagtacggtttagtatcagccaaagacttgccttttgtagacaaggctagaagatgttccgtaccaaaggccaaaaaggtcagtgtaccatcataccatgttttcaaggggaaagaagtcatgactagatccctcacttcctcgccctgctctgtatatctatctgtttcacccgaacttgccaagtataaatctggtgttttcactggtgaatgcggcaaatcacttaaccacgcagttgtgctggtaggtgaaggctacgatgaagtcaccaaaaagagatactgggttgtacaaaactcctggggaactgattggggcgaaaacggctatatgagactagaaagaactaacatgggaacggataaatgcggtgttcttgacacctcaatgtctgcatttgaactttaataatatgtttttattggttctctaacattgctttttataccttggatcgtgtcctatttcttctttgaagaattctttaaatcaatgttttaaacctttattaatctattccatccatatacacttattcattagttttattcatactatttatattatacttacaattactgaaatttatggcaatttttgtggaattttgaaactatttcatgagattctacctcacacattgtagatacacatcatgattctttgttgagaatgagtaatttaatttctatagagaaatatgtttttaaatttatttaaaaggcatcataaatatgcagctcctccaggacccaaattacaatcactcaaggaagcaataacgtcgaaactaaatccgatatgtttctatgtcaaaaatgacccaaactattcaacatatgtatatgatgaacattttaccgtatgtttaaactattttaagcattttgtttagggaatcttatgttctccactttttgaaggaaaaacatacgccgaaattaatcaaatagtcaataatattcttgagcctttaggtataattcaacattcttaaatgttttcagagttaaagggaagagttcatttgaactgccagcctccatcgcaatacaatgtaaactcatagaatatactctaaaatgaccaaatataaacatattttagaaacttaaaagacatattcgtcttcgttggagtttagaacgctaaatattgaaatttacactcacatttgtaacatataaatcacataatttcatacctaaaatgtgcttcatgttattactcaattctaattcataattacatttatataattaattattaattaaaattcaattctatatataaatattttaattatttgggccatatattccgaattataaacgtattaacaatggatgtgccacagcgtttttcatgaatgagtaaaaataattaaaaacgtgtaaaatcaaagtttttaataaaaattatatgaatattatacaaataaactataaatttggtaaattaaactattatgattacaatttattcaagtgtgtgttaacctctggttaaaatttttaatttttttaaaatttcagttctttaactaattttatataaaaatagatcaaaatctatagaaaaatcagatttttaagtgaaaattaggggaaattgagcaaatcgtaaattaattgtttggctagcagaatgagctccaaaaaacggctagctaatgctatgaaaggggcaataaccccaaggttagagtcattcagtagaaatactaatacgattaagcaaatttatttgtgcatttactgtcaaatcattttgataaataattgttttaacctatagccctgtaagactgtattcaagtcatttttcgttaaatttgtcacatttttatgtaaaacagaaactcatgttttacacattaccgtaaataacaaattaaaccaaagtgtactcgttttgagataattttcttattaacaagtgtttcaaaaaggtaggacttaattagttaagaccagatttatctcaaattctctgagattaagcggtcttggattataaagtagaatcactaatgttatacgaatttttattcacttaattttatataaattatttataaatatcacctatcaaactaatttctttacaccttcatcctatgcttaggtgtaacattgaaatttgaatttcactttccgacactgaacgatgcaaataactcagtttttgctgatcattccggtcttatttgtatcagcaggggacaaaatgcctacggaggaacaaccatttccttctaggcttggtcccctagtaaccttggaatcagccataacacaacctaccgccgtgtacacaatgaggacagttggtaatgtggcaaaggcagcaaaggcatggaagtcagcagtatcatcttcagatgtctctaccactattcccactccagtttcggaagaaaatatcacatcaactcttcaaacacaaacggaagaagttcctgctgcaagcggctcagattcatacactgtaacaaatttggtacaaacacaatcccaagttcaggataatgtaaagcaacagcaagatactaaggggaacagatcagattccgaagaagaaaatgaagatagcacccttagtacagatgtctctccgaccattcctactccagtttcggaagaaattatcacacctactcttcaagcacaaacgaaagaagaagttcctcctgcagacctctcagatcaagttccgtcaaacggctcagactccgaagaagaagataataaatccacctcatctaaagatgaaaaggaactcaaaaaaactctacaacccggaaaaacatccacaggtgaaactacatcgggccaagatcttaattcaaaacaacagcaaactggtgtatcagatctagccagtggatcacactcttctggacttaaagtacctggagtaggagttccaggtgcagtttctccccaaggaggtcaatctttagcttcgaatacatctagagaaggtcaggcgcagcatcaacaggtaagagatggagatggtagagttattgagcctaaaattggattacccggacctccatctgcgccagtaccatcaccaggagcgcccggaataattgttagagaatcaggtttgtttttttgagtatatgggttttaggcaatagggcaatggatattgtacagtttttaggaagatttaaaccagaaccaagggcatatgaaggggaaagaacaaatgtagcagaactaaaaaaattcctatttgaagaacttgaatctttggtaaacactctaatagaattgaaattagcaattgcaagcgactttgttgaaatcactgatggtttgagaaagaatactaaagatcatgaagccagattgaagttgctaagaggtgtagaattcactaagaggaaaagtgtcgccaacgtagtaaagggattcagttctttgtactgtgtgcttttaatgaatatgaacgtcatcaaagaaaaaacgaaagaatctgaagtagcagatggcatttggaaactgtctacaatcccagataaagtagcaaatgaacttttgttagctatggaaaagatcgtggtcccaccaaaaacccctgaactagaagaagcgtttgaggcaatcgagtttggtttcaaaatagcatactacgcaaccaaagacatcctctcaagtatagaaaacacagttcacaacttgatgcacgccaaaaattatgaagagaattttattgctcaagtaagaaactctctaaggatggtaccacaccagatgaacttgactgaatcgtcgtttgtaattaaaatctcagacatgatgcgcagaagaggaacagctagtcaggacgaaccagcaggagctgggtccggagtaacaccaggacgaggatcatcaggtacgggacgagcagcaggaacgggagggggatcactgaggggattagacttaagtgaagaagaagttaagaaaatcttggatgaaatagtgaaagatcccagcgacggagaacttggactcggagacttaagtgacccaagtggaagatcatccgaaagacaaccctcactcggaccttcacttgtaataactgatggacaagcaggacccacaatagtatctccaacagggcccacaatagcagctggaggagaacaaccaccttcagctcctaatggaaccgcaacggggccagcaggaacacaacctgagggaggagagaagaaagaaggattgatacagaagctcaagaaaaaactcctggggtctggattcgaagtcgcgagtcttatgataccaatggcgacaataattatcagcatcgtccactaacaataactcacctaaccacccacttatttataacacacacaatatacgttagaacactacacattcagtaaatatttaagaaaatggtgaataatgtatgtgtcattaattggaaggtcaaatgtaggaaagtcgcgactgtttaactcaatcctagcgcaggcagggaaggcctcgaacatactcaagtcgatagtctcggaaaaaccaggaacgaccagagattccaaacaagcacaattttacctgaaaggaaataaaataacattagtggatacaggaggatttgaagctttcctgacgaaaacccagaaaagagaagattccacactctccaagatcattgagagagaaacgcacaaggcagtgagaagttcaaacctgattttttttgttctggatggatctgaaggagttactccgctggatgtccacctggctgaaaaattaagaaactggcttgaccaggcacacattaagcctgaagtcaaactagtgatcaataaactagagaataaaggatcagatgagtattacgaagctctaagtgactgtttatcagactgtcacaccctgtacatgggtgaacccgtgtttgtgagtgctcaggaacgctcagggatagataagcttacaggaattatggaaagtatgcttccaaataaggagaccagaaaacttgaggatttggcaataatgccaaaaatacacgctgaagagcctgaaaatactcaggagttggaagaagaattggaagatattgaggatcttcataaccactttgagattgagaaatcactcagagtctgtaatacagtgaagggaaactatagaccaagtgacagatggattaaacttcttaataacgtgtgtggaataccatttatcagtaaagaagagggtgaatatgtcattccttcaattcactcaccttcagaaagattagcaaatctatatttatcagataatcatgaaactcaacctgtaactcccagtgacgagttagtaaatctaactttaaataactcttttgaaactacttcttctgagaatacagatgaactaggtaaggatacacataaattagatgaaaagaacaccttttcacaccaaactataggtgaattagataaagaaaatccaaattgtagattagtaaataactctgaggagactgaataccctaatttagattccagtaaggatccaaatttacaaactgaacacccaaatttagagtccgaacaaccaaatttagaagaaaataaagcaaaacctaaaacaaagatagtggatgatgtaataaatccgataaatttattagtgttgggaagtatggatagtaatagagataagttattatcaatgctttgtgagaattacggcgaaactgaattctcagatacttcgccaaattggcattcattttattccaactggccagtaaaagtgaaagatcaggaggtaatacagccagtagaaattgtagtttcgtcacctttgaacttgggaggaagtatagggaaatcagctgtactacagacactttcacttcttagaaagtgtgatttcgtacttttctgtataaataacgaggacgagaataggaaatcgcaggatgagactaagaaagtgaccttgtcaaagagagaaatcgcatggctttcaagagcaataaggtttaataaacctatagcaatcgcagccttggttagagaagggtataaaaactgtaaattatttcttaataaggactatccactcagttttgagtttcaaaacataccaattgttccagtgtttccctcaggaaatcccgctaaaaagtcaattaaaagattaaaaaatgacataacatcactgttacacatgagtaagcagatgattgagactagtactttgaattcatggcttagagcttttatcgcaaagtggcctccaccttggaaagacggttcaaagattaatttaaagtttgcagcccaggtaaggtcaagtcctccgacatttgtcctttggtcaaatgtatttgccaccttccctcagcattacttgagacagttgaaattggcactttcagaggagtttggttttttaggtatcccactcaaattcgtactcaaaaccacatttaagtataagccaaactccaacaaattaaagtcaattaaactcaaacgtcaactcttcaactaattttcccttttatcaatgtacacactaactacagctgcaaacaatcgtcattagcattataatataataatgatattatattcatgtacagttggtatatattagcattataatatacgtacaaaactaagtattatagttggtaagctcgtagatgcgatcaagtcttcccggacgtaatagagcttcatccagtttagcgggatcatcttcagtggaagcaactatgataattgagacgtctgagactggtgctttcttactaactccatcaagaagtagtaaaagagttgataaaattctcctatccaaatcagcagaaacatcttttgagttagtgaagttatgaagaccttcaagacaaatacataatacgccgtcacaagcgttttcaattgcaaaatcgaacataaacctaagcttctgctcactttcgccaaagtacggcattaaaatctcagaaaacctaatcacactcagttgcaaagttttggaacactcgttaccttcagagtcaaaattaactttttcctgtacagacttgaaccagtcaatgaaaatattcccagaattagtgccataaattagtatattattgtatccatcaataccgtaagaatcgaacaggtgtttatacttcagagtattgaggaaaatactacacatttcacgttcaaattctgacttagactcaatattaacattaggaacactcttcaaatcaaccttttgagtaccctttaaatcaaccttttgagtactcttcaaatcaaccttttgattactctttaaatcaaccttttgattaccctttaaatcaactttggaaggaggtttcggagttagtttagtggattcaggagccttaagtaaatcttcatcttctataaaaactaataattttagaaaacttaccgaatctcagggaaatatctgataaagataatcccactaactggcaaaccctctcaagagtctgaaaagcttcatttaactgagatgtgctgaggaatcttagtctaaaaaaggaaatttcaaactcagaaacgggtttattgagtaaaatatgctttaaaagagactctagaaccttaaaatggagtgattccacaggattcgcgataacaggattcgagaacaaaaacaccaaatctaacttcaaactagacatataatgtacatcaaaaatttattttaaattattataacagactaatgtgtttacaaatgattttcattattatacaaggtcagttgtgaagtgtgtaagaaattccactaaaatatttttaaaaggacgaaatatcattattatcattgttttcaacgtttaaaacaatttcgttagttattacaacaatctcattaatatcatcatttcagaagtgatcacattaatcccattattatcattattttcactgatattatccaatcagggaagtaccatcagctactttgattaggttgtcttttaagatttctggtggttcattaacttcatcgaaaaggtatttgttatcagaagataccatgagatcagctctggtcttattaaatttaaagtgtggaattggtttgtatccgagatcaatttcaggtttaggaacgaaaacaagtccgataccattaagaaattcatatctgtaccgataaaacctttttaacatttgaatctgatcaatagctttatagactaaccttcccagtttcatgccctaaaccaattaattaattagtgtagatgttacctgtatttcttctggtttatagaatttggctacagttgacgttttaggtattactaaatctggaggcagggtcatgatcgggaaacctctgaaattaatgtaccaaatcagccccttttcaagcttatcccaggtaaaagttagatatttaagtccatctccccagttgaatccgatatggtctagaactggtctcctaagccaatgttctttgccatcaatatcacctattctgaacctttctataaaaaatcctaaaggcatcccttgaagctcagaaggccaattttcattctcaggtatcctccaactagtcttcaaagtattaaatgttataggcttaaactcttcaccagtcctctcacttcttatcaacagatccttattataatcataatacatatcctaatatcaattattccattatttatactactatttagagtattatttatactattatttagagtattatttattctattatttagactattatttagagtattatttagagtattattgtattgttaatagtatagttatatggtatataactaaaattctattagttggaaaattacattgaatagaacgagtgcttgtaggacttgttcaaatgaccagtgaaaaaatgcgtagtgatatgcaccttcagtttcagctctggtgtcacgtttaatcagaggacatgtagccttgtttttatctaggatttcacttactattttccttagtaaatcaggtcttggagtagctttgttagaaggttcaggaagtatttgggaatacttaaagggcatttcttctctcatccgctgtttcctctggagcacgttctctaatattatcttcttcaccttactgatacggtcgaggttctctggtaacatggtgtcatgctccccttcctttaaatctaatctgcttactgaggccagtcttgacacttttgtggtaataacattatctcttcctaaaatatcataattttgtttcaattttacgtattgttttctgtcgtattttactttcttggagataacttttcgttgagaaacccaaaagccacagtaattttggggcttccagtaaatcggaatctaaaaaatccctattcctcctcctcagccgttctctatactttttgatgaaacttgctcctttttgctgtaaatttaggagctgtattaaatatcctagattctttcccagcttatatcctgataaatgacccttttcgctctttttaaactcaaaatcagtgtcaattttataatcaccaaactttgtctaaaaatctctatacacactgtcggaacttactctatatgctaacagcgctgttaacaatttccaaagccttttcgatatcataaatttactctcacctccttcatctccattggttgttgtttttataaactcaactaattcatagtcattatctttattttcggattttttattattttctgattccttttcaattcctggttctttatcattttcccgttcatttttggaatccagatcaaattctcccctttcttcattatctttatttttactatacaaaatacttagttttttaatggaattttggcattctgggcctcttttaccaaagtgtgttggcacaaatgttacgactctagattccagtacaaaaccctcacaattcactgcgatataactaaaaatgataaaatagaacaaaaacattaagcatcttaaattaatttacaaagcgtaaaaaatttctactgttggtcagaggccctgactctcgacttctgatacaccaccagagctacacagactataactgagcctatagtcttcttcagcgtgattggctctcctaatattatgaaccctagtatcattgtaaagaatggcctaagtgtttggaatattgacacggcattcgctccaatcacctaataaaattagttaataaagttaaattatgttaataaagttaaattaggtaaaatgatttagataattaaatagtgttaagaataccttaagacagtaaatttgtattctccaagctattaacaatattgcaacgacagaatacagtgaacacaatatttgcttaactataacattattagtatatatttaatattatataactatgtaattagtgcataactagttaattattacaattgtaatgtataagtgagtgtaatgctagttttactgatttgagtttccaaattgagttaaaaattgagcctggaaggcacactattattgatactgcgacttgattcctcaacagtgaaattgaatcaaatttatcactagacatttttaaaaatactacctacacataatttaccgagtcaactcatttgatataggtaaacagaattatgtattgtgagtacttggaatgatttagtgattgggattaatagtaacaagaggtaagagacttccgtggtgtctaaaatgattatgaaaactcgaaaaattggtaaagttagtaaaaattaccatcaaatttattgtataaatcaagtcctaagaagactccgacaaatgacaaaaacaaacaaaatattgtaactggaagtattttttcaattttgaacaaatgcgagaatattgctgtgaagattggaattgatggtgagagtattccgatggttgaagcttctgaattttccataataaacggtaacagtgactgtcgaattgcgcctgaaaaacaaccggcaagcattgtattattgacctttttatcctcagttaagactattattggtcttttctggttaagttttagtccataagttaaaaaaattagaaatgggatacttattattgatctcaggaataggaatgaggagcctgtgcctcctagtactatgaactcctttacgatcactgaatttgctacagaatattatcagtccaattccttacctgagtatagaaatattgacaacaccattaacaaatttgccaaaactactggatggcagtttcttgaaatccatgaaaatgtcgaattttctgaagattctgggccgctcttaccgcaaacttcacaaaattcatttgagcaacgttgttcacatgtacatgggattaatggtatttctgaattggtatttggatcttccacgttcaaatcccaattcgccatgattcctcccgcttaaaccttaattaccaattaattaaaatattaaaaattattatttcaatttttaaacaaaatttaagttacattgttaatttttgtttctttctcacttccacacccaatttacaccgaacaaccaacaatagcattagtacttgttatactctaaattatagcatatacataatattttagtatattatatacttcctaatatatgttataatacacacattatctctactacacattatatatactatactatctgtatagctgtatgtatactagtatatgtatggtagtactagtattatagagttcacactatatagcagattatacaccaaattaacccttaatccagtcccaatcaagtcctatcaattcttaacactgttaaacatcgtatattaatgttgttttaagagtaattaactcttaataacacattttaaaagtaactctaaaccctaattctcaattacaccctacttaatatacacacattttgctagccataactatataaaacccagacaccaactatcaaactactcaacacatgccacatggcaaataaagtattaaaataaattaaaattatactcgaaattccattaataaatccccaattatcagtaaatatatccccaattatcggtaaagaaatccaaaaaagcctataaatgcctcaaaattaccagaaaagtgacggcggctatgaaagtggatcatcgtcttcgaatgttttttcctgtgccgtgtgtgcgaattgtatgaagtggagtggtctgtggatcggatcataaaagggttttgggacttcaatttgtaactgaaagttcatatgcggtgagtgtttcgctcccataaagttataattccaggcgccgtctactggtaccaggaaaaaccctttaaacgtgtcagacactagaacttgcaccttctccaattgcaaattctgcggcttttctaatgcgtttactaatcttttagctgcgattgcacaggatcctggtgtaaatgtacatgtcgccatcactgctgagggctcccaactaaaatcattaatcatcttctggtgcatttccaacgtttgttgttcaatttctccctcattgggacgtgtgaatatccagccaattggcactaactcactcaatgcctcgtgttctggcttcaattttggcaacacaatgctcttgtgcgttcccacttgtggcaccaataccatacacactattgaatagactacagaatattgttattagtattatataactaagtgtagagtgtccgggatggataaataactgaataaccaagtccttgtggtggtgataactgaataattaaagaaccaagaacccccgagggaattactgagtattgaataactaaatagcataaatacatggtcctcacctgtatgatctgttttttcaactttggcgtataaataagctccaacttgtgttcttaaatcagcaattgatattaacttctttatcaaattatttggtagtacaattacctgttccgactccactgggactacataaatatgtttagctctcaggtgtaatgttcctgatgccagacaacggttcctccaatcagttttactggcaaacacttgttgttcatgtggcgactgtgtggtaactacaatctcatctccatgcacatttaccgttttagtggtcacagatttggggcccacttctatattctcttcaatttgttgtcgttgtacatccggtggcgctatttccattcccaagattatgtctcttatttccgtctgagtcagcgaggttacggtgactgaattcctcttggcgtagtccgctagaatcaagtcctttagtgctatttccacatttatccattcattatctgtcaaattcggccacacatgatgcggcagggtaatagttgttttattgggttttaggatacatttggctctctccggattcacatgaattgctctcaaaattaaaattaatctgctgaatgctgtgtaactgctgatactcttgagccagtcgtcatagagattgaagagtaccatttccggctgtgtcgctcttaatatcaggtcgccaaacttctccaacttcattattgactgatacggcaactgtaattcactacccttgatcacaatgttggggaagtccactaaatgtacctctaacgggtctaacattccacgtctcgttactattatttgcttcggttgttcttccacgggcagtgatctgataagtgccacgacttcttctgctgttttccacttagaaagttgtgatagacgtttctgtcctgcccatacagatgtgtgaatgacttttaggaacaactgaccggtcttcgggttaaatatgaaaatcgcaccgtttacgggctttgttgttaaattaccttcaaacgtcttatgtattgttacacggtatacattcgtgtcatccacgaaccagatcgtctgggagccaaataactcacccatgttctgtgaggacagatacggttctgtcggctcactactgtatagctgtaaactctttcttattctttctctcaacacaaataatgccgggtttgccttcatgattttattcattgctctgaccattaactctctcattccttcaaaccagtacccgtatccgctgtgtaaattatatgctaaatccaccgctatcaggcatcctgttggacacgggtatatcgacatgctgtcccccgtgtagtccagaaacttcgaccttgagtatctttctatatcgtgtgaatcgtaatccccccaacgcaactgcacgtctatccaatacttggttccattctccactaaaacataatatacagggttaaaacataatatacagggttaaaacagtaaataggggttaaaacagtaaataggggttaaaaccgtatatatgggttaaaagggtaaatatgggttaaaagggtaaattaaagctaattagaagcggattaactgtaaatgtataaaaatggctaaaataagacttgaacaataaaataactatcaaattctgtaaaatacatttttcaattggtgttgtatctgtgagtagtgatggtttcccgaatctccacttgtacgacgatgtcactagtatatctgcgcatgagctattcattttatatgattttcttgggtggattgtttccttttgcaccgtttcaatttccaacgagtccaactccatatccagcacctggcacaaatccatgacgatactttcgtgtattttctgccacagatgtgctctgaatatttgaatcagtgagatttttaaggtgggcaatttcccgtgcatgaatattcccgtgaggtctagctgtacttggaatccaacatacacattcgctctgtttatcgttggcgaccaccagagtgtaaatctacggtttggtatttgtgttagtccgctgcgctgtgcgtttgttaattttttatacttcattgactcctcaaatcctgacgccttttcccagaataaaccttcccacgttgagaaatatgttcccttaaacagcgtgtgctccagaattgcctccactccgcccagtgcctggatcatgtctgtcctgtaattgttcaaattccataactttccatcatggcgttggtgtgtccaccaaaacgggttaaatctcagcacttggtatttcctgaaatacaacgtcacacgccagcccttgtcatatgccaacgtgtgtctatccttctgaaacaacgtgtttattctcgggattcctctgtcccatgagtcctccaaatcttccaatgtcagacgccgattctgctgctgcgcctcctgacgcttcaatgcatactccgcccacacgcgctgactctctataaactcactctcccacgtttggatatacctacggaataaattaggttagtatctaagggtaaataagtatgagtagttaagggtaaataagtttgagtagtagttaaaagtaaataagtatgagtagtagctaaaagtaaataagtatgagtagtagaagggtaaataatactaaatatggcctaatcaagggcataactatgtaaatgagtgtacaggagtgggtaaataaactagaggtaagcattccagttaagggtaaataaagaactaagtactcaagtagggggtacaagcaccgtaacggaaaacgcacctgtaaagatttggtatgagttgattatcttcatgtgacatgccactgcggaaatgtgtgatcccagcatcagtttgtttactatagcgtaaatcagactgtggaatgagaatatgtcccatggaaagcatgcctaggccacccagctccttgggactataaaagaccactggtgggaatctgcttggcattttactatttaacccgattttgatcctcgtttgtatcttattctcacatttgaccaggaggtccaagagttcattggtgtgtattgttgcttctctgaagtatgtcattagtgatattaacgccgtattccatttatttgctattttcgtaaatgtcgtgcttccactagacattaatatttgcctcactctgttctcaaacatgctcatgctctcgtttgatacacgtagataggctattgcacttagttgtttcgtcttcatattctgtagtctccaactactctctgataattttacggtatccactgtgcccactgtggtatcactcactgagttagccgcgccgtacctcctaattctaacttcgaaaccgcataaggagaagagtaggttggggttatctttactgtagacggatacgaaagagtctgaccattcgagagtggtgatggatcttggcaagcgtgattgcatttcccagaatgccgctcttccaagattaacgtcgtgtttcattagtctcattctgcaatctttcggccagcagcttttattattatatcccaccacattttcgttattcgggtctgggttctccgtcaaatacctctgtaccaactgtctcgcctcttccgcggtgaatttaaacagtatatacaattcgtcaatgaacctcatgaacattcggatcgggtggcgtaattcaatttctgcagagggaaacgtgaggaattcattttcagcgttgtagggacctgcaatttccgtagccctgcctagtcccagcaacagcaaatccagcaccagagaataatacatgaagacaaacggtgaaaactgcaatcctcttaaaaatccaaaactattcacgtgtgacatgtccttaaacgctattgacacattgttcttggccgttatataatccgctatattatgatccacgatcaaccttaacaatctgtttaacagggtcagatcaactttttcatacactttatcatatttcgtacagagcagtactacgtaggtgggttccccgctaacggcgtcaaaggtatcccagatgttggtaaaattattaatgccttggcatagtttgtataccaggagtggcggcggttctgagtctgaaggtttaatccaatttgggaacaacttcctattatccgcttcataccataggtactgattcaaataggcgtcagtaattttttccagcggatcaatatcataaaccggtatcaagtgagaatacatgtcaaaaaattctatagtaacttctttaaacgctcgctgtgtcaggagatgacgtttaattctacttaaacactcatgtggattatcatacgcctgttctatcaggcccaactcttctctttgtgactgatttaacctacccttggatgcatacggctccttcaactgttctaaactcaatattaatatcttagtgtcgtgtttataattcaagggcgggaatgggatatgcacgaatttcctcgactctagccagtgtacggccgtggtataaatcgccacagcttcctctcctgataaatacggcccgtcttttaaataattatgctgtctctcatgctcagatttgaggtataatctggtcaaacggcccagattcttacgacacactgttttatctactgtggcgcctctttttatacgttccctgttatagtaacacgcgttagtccaccagtcagcttttaacttgacatatctcaagatcatattctcgatcggtgacggcaactgtggcactttccagggtatattcgccttccaacaacgccacgcctcagacaaatgttgcaaaattgttctactcttactggcacgtattccttctggcatcatatctaaaatatcatgcataactgctgcacgtagttctagatcgaagtgtgactcaactctttgtttcgtcacggttttagccacgcctttggtaattctaccttcaaattgacgtgctagtaaattcccaagccagcgttccaacaggggtaaaatccctctcaggaaaaaacaccatacacgccagccacagacccagaaaccacatcctggcccttttcccacaggtccagtgttaaatcgataatatatcaaatgcttcaaatccttacacattcttacttgacgcattaaacggtatttataccggtacattcccgtcaattgacccacatgggagaatatatactgtagtccgtctgccagctgatatgcatccacatttcctaatctgtactgcacatgcgagtctactaccaacttcgtcagcctcagtatctccctgcacagatgaaacgcattaccaaatcttgacttttttctctccttagtagtcaatgttttcacgggctttaggttaaaattatagtctaaatggaggtaattgagattcttcctgtgtattagcaggtttagcatattgtaaccttggcgacacacctggagccctacttccacccagtccaactcagtgctctgaaagaatttagtccctctaaacaccttgaacaatcttcttttcttcattccttttggtctcttactgtgtaaattactgatgacccagccctttaatagtttctggtaacttactctcactttcaccggataatcctttggtacatgttctctataccatgaattcactattggtaaatctatcgctcgacgacacatcccgctgcgcttattaaacggatgtggcgcccagtataaacttactccattcccagtcctctcattctccaactccacaaatgataacaacggttttatttcacccaacccatactccactggcgtatgggtgggagtaatacttttcgtagtgtgtggattaggtgtataaacgttgttaatgtgatttgcagtttgaatagtagtttgactagtagcatcattagtggtatgatttgtagtagtgtcggcagtgggtttcacgggtttagtgactaaaaaattattaataataaatatttgataaaggttggtgattttcccctaaatttcttcataaattaactaattataattcttaccagtgtgcttgtcagtattagtatttttacttttatccttttctctagtagttctatctctagacctactcctacggtctcttgatcgacttcttctatccctagacctatgtcttctatctcttttacttcttctttctcttgatctgctacgacttctctttctttctctacttcgacttcttctttctctcttcttttccttctcaacctttttatcaccttttacaccgttaacaccatttacaccgttaacctcatttacaccgttaacaccatttactccatctacaccattgataccattaacctcatttacaccattgataccattaatacagttggcatcactgaattccatgcctttgatgctgtagtctcctacaccattgaccatggtgccaactccattgacggcactatccagccccttgatactataatccttaactctataatctatattatcaatggtatacgaaggaatggggttaataatgggatcaaaatgaaagattggcaggtctggatcttcatgtctgatgtacgagcacaacttagtgtgataattggccatggcgactttcctgggtctagagttgtataagtatggaaatgctattttatactctgttcttatctgttgtctaatgattagtttacttatatcattgaactcattccagtcttcgtcatcatcgatgtcacggtacagaggctcaaatttcggcccgcccggaatcgccgtattcagcgccttcgccgtgtaaaacgccttcaaattaaacaagtaaaagtaattatcgtccaaaatatcagagaacagttgtgatgccaggcggaacagcacggccatttgctccagcgttagaaaccatcttctgtaacttgtgccgttgatgtgtttacaattgtattgcagcggtttatgatcatagaaccactcaattacgctttgatcctcttcaggatcaagttgcatttgtatagcttccagcggttccaagtccaatatattctcaccataatctattggcggttcttcgtcgtcaaatggcggaaatctcatgcgcttgaagtggcgtctgtctcttttctcacgacgcatcatgatccacatggtcccccattgcgctaggaagatcggatcagccacccacggtatctcatctacaaatgttatggcgcctgttatgtggtacagcgtccgcacattcctcacttgctcccacggcattggcatgttctctaacagtttatacactgcgtgcggtacatactttaacgctcccaggtacacacgcttgtcatagcgatacctgcgactactcatgtcaccgtggtcacgaatcaccttcctcacatgctccggcggcatttgtaagtttagcgaactcgccgccgcggcgtttgagggcttagaaaattttttagtgtttagtttttgccactttcgagccttatcctgcaaacgctcaaagtccccaaagtggaacctgacctccgaactaccttcagtaccgttaacactattcacagcatttacactattcacactatttacactattcacactgttcacaccattaacactgttaacaccgttaacaccgttaacagtaacagagttagcggtgggattgaatcctggtggaggactaatgggcatgttaggaataatattagtgggcatcataggcatgggcattggtacgggcacagtgttaggcattgggggcatcggtataccattcggtataggcatcatcggcattggtatagtactaggcattggtatagtaccaggcattggtatagtaccaggcattggcacagtactaggcataggtattggaaaaggtacggtacccggtggtggcattggaatcatagggatattacctaaaaatttatatacaatttattaggaatagagtatatacttgagggtaaagaattacctggattgaggatgggtatattaccgggtggaaagggcagatttggtacattttcaggcataaactgaggatttgtagtaggaacttgaggatttccaagtgtaatctctgaaatatcagttatattatgagtgttatcagcaatattatgagtgttctcagctgtattgtaagtgttattgggttcaaattgagtatttgtgtttgtaaaatcagtgtttggtgttggaatttgttgattttctgtgttgtggttggaatcttgtcctggatcatttgaaggatcagattccaactttgaatccaactccattgctacactttttacactaatttaacattagaaattgcgataaattttcaacacaattaataaaaatgtaatggaatttgttacaaattttcatcacattgtaagattaaatttactcaattaactaaagttgagtggggaaactcatctaaaaaattattaaaaaattattaaaaaattattaaaaaaattattaaaaaaattataaaatattattaaaaaatgataaaattaataattaagaataaaaaggtgtaaaagattatgaattggcttgttgtgtggtggcttgagatttggcgtcgttgatgagttcctgtggtatgatttggaaagtattgttggaatcagggcagatccaggccatttgaacatcactcgtcttcagtgaaccttcgtctctacactgagaaattatataacaaatatccgacaacgattctttacactttttttcctttaaatttaatttttccagctccgtttttgctatgtgctttccctttccaattgccatcccgccatacttataacacgcgccactaccctcaatacaatacaactcatctaaccaaagtataacatgtgtatgtgtaaaagattttactcgtgataacagaattaactatttctaataattagttattgttcagttaaataattggaaatttcatgattttggaaataaatgcaaaagttgatcgggctacgaaatggagaggaaaataatttccatttctgctgcttcaaccacttatttaccaaatttaattagtaaataataaataaaagacaataggttgcaaaatggataattattgggttaaaacaactggtaaataactgtagaactgagtaagtggtacgtgaattattttcattggttcctgcgaggagaattgagactccaaatggtctaacgtgccaatacagcgtgtaagcgtgaacgaacaatgctacacgctctgctatgactcttactggtgcttttgtgccatattctttgaggaatgatttgcattcttcttgcgctcttctgactacgcatttggcgtctggtaataaacctgccacagccgctcccatacgttcgtctactgcgaaaacacgccaagccggtttcgcctgtaacacgttagcgtagggtgaatcgtcttgagcgccacaagccagagaatctgcggcgaaaacgatcccatcagagaagacagcggcaacagctgtcggcgctgaatctacagctttagtggcgtattccacctgaaatacccggccatccggggaaaacgttgatacagataaatcataccccgctccaattccaaccataccaatttttcatacaataaaataatcaaaatatttaataataaaaatatttaataataaaaatatttaataataaaaataatttgttaaaaaatttgttaaaaaatttgtgggaactgacggcaaatacaaataaaagtaaaaaaataaaagttaaaaaaagtttaaaataataaaataaatgaattgagaaagatttgaagggttaaatatttttggattctcgttcacgattccactgctcaatcatatcacgacgctcctcactagtctgacgcttccttctataaggactcgcactcctacacattttaaaccaccttttacacactaactatgttatacataactaccattgacaagtgataactcgtgatcacaacaattaactgtgttatatgtgttattatatgtgttattatatgtgtaactgagtatattagtgaaataaataattgttaacctgtgacgtggagttctttttttatattctgggaattcttgatacattcgggtcattaattttcttctcagtgatcttggcacatgttttatgtgcataaaattacaatatccgccacgtctacactggccttctacaaattgcctacaacgagcctcacgaaaatccgttacaggcgtatactcacactgtatcggacgacctaacacatataaagagttaataatgtattaaataatactattgttgactaaatttgatcataatttacaaggtttaattgttaaaaatggataaaaaaataaaatatcaaaattgatcgggttacaaattagagaggaaaatttcctccgcattgctgcttcaaccacttatttatgaataataattgtaaataataaataaaataccaataggttgcaaatctgagtagtaactggggtaaatatataactagagtattagataccaccgtagtatctgccggagagagatgtgacggctctacaggctgcggcttcgtcagagtatttaatgtatacatttccgataatatgatcgccgatgttatcacagacgatcatatcttcgatttctccgtacttcataagctctaaaaaaacctcctcaaaaaactcctcaaaatgatccgccgccttatccaacaattcatccgatactaaaaatatttatttcattatacttagaatcacactcattataactaattaaggcgaaaataaagggaattagtggaaaataaagtatataatatgtaaagaaggttactcatttgtccttcagcgattgcaattgcgactggaggattttggtacatatgacgaataacaagtgtttgtgccgctgaaggtttataatgtgttctgctacattgatctccatggcgacaggctccgatcttccagaaaaaagggcaatttactctgtcttcctcagttccaattatcctagccaaatgctccgccatttatgtgttttattcccagtaatattaattttattatttataatttattattatttttattattctcaatggggactaaatatcataattaattttattttttaattctctacaatttaatatattataacactatattataataattttaatttttcataaaatttggtaataatattggtataacctaggaccatgtgtaaatagtattaatctgatgttgtataaaatatttggaagattaaaaaaggaacatattttcggcggtttagctgttacaggaacactgttcttcggctataagaatttacaaaattatctccaatacaacaacacaactcccgttaaacttaataaaaatgtaatcaatcacacgtacagttaattttactttattttatctcttttaagaggaaattttaagttttaaacctctctttaccccttaaaacttaattaattataccctatactcttgattatgtgtttaggaactgctgaatgagaatttgagcagtatatataataattttaataagaaagacttaagtttgaggactggcgatttaatatttataaagtataatctggacaaattatcgttttttaacaaatataaattattattactgaggaatttatccattaaacgcatttttgacgacattggcctcgtatattccaatgataaaaatgtttacatcttactcatgcccacggtgggtattaggaatagaagtaatatcacagaactgggcattagtgacaggggcagaggcgtatttgctatagagctggatgactttttaaaggaaaatcgacctgatttagtatcagttagaagactcatttgctccaatacaactcgtaacaacttaattaaatcccttaaatctactatcactgagttgaaacatggagttaacagtggaatttactcactagtcaccaattggctgggtaatgtatcctattacagtgataggagagaagagtttataaaggccctaaccctttccgatgatctcaattatacaatacaattactaatcaacacaacaaaacaacttttcgacacattatcacgcaatttgggacatgatttgggaactattgacactagggggggcgaaaaatttgaaaaagctaacacttcatattctagtgaaataattgacagtttaattgacgtagaagagaagttaaaccaatatgaagctcacctacaaaagtacaacaacataatcaaaaactacacccaatccagtaaaataaataaattaaagataaataatgtaaatttgaaaaaatacattttgggggagatggatctggtgaataaaatatattctaaaaccaatttgttgcctaaaaatggcttgaattttagtatgaataacttcttcggtatggacagtttatataatggaaccggcgagtctgaggccgatttaaggttatcttctccctttaacgtttacactggcagcgttaacaaaatcaggttccaaaatctcaaatatccccaaattcaggatattctcgattataaacattaatccacaatttaattattttttgattatttattatttttttattattttttaattatttgtagtgtatgtggatgtgtgtataatttgttctttgttttcggtaaataaataatttatttattaattttaatgtataaataatgtagtaataatttacaatcaattaacaccaaacactattagaattcattctctttcatttcaacaatgaagtcaattatttcaacctttttttctaaattgtaaaatttttatactctcctaaaaatttgatcattctcttaaaaattctattattctgttaaaaattctattattctgttaaaaatttgattaatttgtgaaaaaatttgaaaaaatggttgaaagggataaaaatgtccaggatctgtctttatcttcaaaaaataagtttgaccggctgaattctaattttaacagcggaagaatgaagtttatggactcgatttcaactcgatccggtgaagatcatttatcgtctcataattatctcgataattctcctaaaaactcctcaaatctattaaaaaaagacacacaaattaaattaaccgaatgcaaatatctagatccaaattactcaaacctctcaaatcactcaaacaacttaaactactcaaattactcaaatgacccaagtaactcaaataacttaaataattctaaaaatttgaaaaatttgaattttccagaaaataagccaaaattgctcaatcgactcattcctcacaaagtcaatcctaacaccgtaaacatgaatactgtgagtaatgtgaatagggttgacggtgtgttgtgtaatgagctgatgagtgttcgtagtaatgaatgtgttgataatattaagtattcacacttaaaattcattaaatctcaaattcaacacattaacaactttaaatccaacggtattaactctgtcaatagtactcactctggaactaataactctgtcaataacagtaaagataaaaatggagtggaaagggttgacagtttgggttggttgaggttgggtaagtttaacatatcgaaaatgattaacaaagagcataaaacgctcaaggatatcaaaatcacttcactcaaagaattatataaccagcaatccactcacacacaatacaacacacactacaacacacactacaacacacactacaacacacacattaactctgtaactaatgcggacagattgaagagtttgaataatgaagactatgatttaaactctgagaataacagcactctcaccaatcactccaacacacacgttcacacacttaaacccaatctacccaccaccaatcccagtaacatgcctaataatattcctaataatattcctaataatatgcctaataatattgctaataatatttctaatacggtggttactagttctaataggcgaaatgtgcctgtttacggccctaataggggcaaaaatacgccaaatttacccctaaatcctaacacactaccctctaacaccgcagctaacaccgttactaatactgtcactaatactgtcactaatactgtcactaacaccgccgctaactcggctggtaaatccagtactaacccctttgcaggtgttagatactggtacaagcccttttcaatgagtaaatttgaggatttaagcacctttgaggggttgcaggtgctcgaacgtttatcgggaaatgtgcaaaaatcctggcatctcgaggctattaaacacctggacagggttaactattcacgtctaaaaatgcccatgctacgtcttagcaatagtaagtataacatccatcccagtaggttacttgttagttgcagaggtgcctgggatattatccaggaaggctcatttggctctgtgtactacggatttatcgagggctgtgggccctcagctcttaaaattcctaaccctcaaatgctcaaacttgaccccgtcggtgttatgaaacggtttatcaacgagtgggacatcctctcacgctgtaatcataaacacattgtcaccatccacggcgctattgtactaggattgtacgatatctggctatgcaccgaactcatcaacggcgtagacctacacaccaaaaaatatcacacacacctacacaccaattatggtgttaacaatggtaacacagttggtaaggttaatggagttaatggtaacacagttggtaaggttaatggagttaccacactcaacactattcgcatggttggcacggtgtttccgtgggagtgtgggttacgtatgtgtcgtcagttgtcggaggtgttgttgtatttgcacacgcctacgagtacgaagggtgtgataatccacagagacattaagcctgagaatattatcgtcgactcggagtggaatattaaactctgcgacttcggcgacgccttcgagtcgaattcgggcaacgccaacaatgtcttcggcgcaacctggctctacgcaccaccagaacttcttctacacctttccacacacaccaatacacacatcaatagtttacacagtaatacacacatcaatccacacgccaatagtgtacacaatgtcaatgtgtacagtgtgagtgagaagtgggatgtgtggtctgttggatgtgtgtttcaggagatgtttgggtttatgggtccgtttcatcatattgtggacatgaatgactctgcgagtgtggtttgtgagaagatgatcagggcagctactagaggattagtgccgaatataccaaactccttagcaaagactaagatgggtgcgttgattctacattgtctggatccaaaccctgataacagacccacagccaaggaaatttatcacaccctacaagctccagatattctctaattttataactatagtacttagatatatggagttagtatattacattggatgcatttaaaaatattgtctcaaatcaactacatttggtgagatttactatggtacagcagcatttaaatgttagttttgaaatctgaattaaatcattgacaaatatagagaatgtttctaagaaatcaagtgttcatgtagatttcttagcttaagttgatggactagatctggtccgacgtcctgaagtagtagaaccagcagttgttgtagctggagtcgatctagttccagtaccagtctggccagcaggagttgtagcaggagtggctgtagtttgacctgtaggagtggctgtagatggagtggatccactctggcctcttgaaacagttgtagtagtactagtaggagttgttgtagtaggtctagatccagtctgaccagtaggagctccagtttcaggattgggtgtagtagctccggttgctggttgtgaagttccagaaccaggtgtaggagtagtagttgtagcagcaccagaagcaggtgttgtactagtttgacctgttccagtagtaggagttggggtagctccggttggtggttgtgaagctccagtaccagtctgacctcctgaagtaggttgtgaacccccggttgctggttgtgaacccccggtgccagttttggttttgccatcagattttttaacttctactttcttgtgatgagattcactcttaagtacgaaaaactcgtttgagataaggccaagagaaaacatactgatgtccttaaactcggtgtcatctgtactgttccagacgtcatcacctccatacgtgatctttttacatttaactccactattgaatgtgactctgtatgggaaattaaggatggtaactgtgtagtcagaagtcgtaagttcaatatcgttttcaccatagaacttcagtttagtaacatcacgtttcttatcagtgatgtcagtccagcttccaccagttttcttttcgaaaagtttaaatgaattgttgtcgagaagtattgccaggtatttttcaatatctgtggtcttatccttcttatccacagtcttagtcctgactaaagttccataaacatcttctttcgactcccaaatggcactatttccctcagtaactttgttaaatccatgacctgatttagcggtgtatgtgtgattttcaccactcttggagtggtcaaactgggcggtaccctgagtcgtattgatgtcaatggtgacctttgtgacctcaggtttagtaacttgctttgtctgatctttactatttgtgacactaaacaaattattactaagatcgagataaaacgtcttgatcgactcaaaattgctatcgtcactacttttccaaatatctttatctcccagctttatagtgagacaatttactccatcattgaaagtaaaagtgtaggataaatttacaatagttatcttataactagatgaagttagctcagtgttattctcaccaagaaacttaagtttctttaaatcatgtttctgacttgttatgtcagtccagggcttatttttaccttccttgtatagaaatactaatttaccactgttaagaagaattgcaaggtgttttggattgtttccagaacccatgagtaccacatttactgcgttatcattacccgtggaagtccatacatcattgttaccttttactatctttgaaaatgcattgcttggtttaggagtgtatgtcctgtagttaccatccttcaagtactctgactcatcagtactgttactcttctttatgtcaagggtaactggttttaaatttgctttagcagcgggtgtagctgctgcagaggagggagtagtagtctgagttcccggcgaagttgtaccagacgtagtttcagatgaagttgtttgagtactaggagtagtagcctgacctgttcctgaagtttggtcggaatctgctgtagttgattgcgatgtaccagtggtgtcactggcgtaaactaatttgtaggggcatgatataatgactgcgatcaaagctaatttaacaattttcatttttatcactattaactaatagattttaaagttattaagtttaccattgttacaatcactaattctaattcctattcctaattacctaactactacttcttcttccccattcattcgtctgcattcatcttcttttcctgggtttcctccaggaatgagttcttatagataatattacttacctgtacatattatataacatacaaaatgcatactataaaacatgctcctggtaaggattgtatagtatatcaactgcccatttaataaatttaaaactctcaaaaactcccttaaacattctttatttgagtatgactatagtataaactgtaaatattattatataccatacatttgatagtatgataatagtatattaaagagtataatgtgttagaaatgttccttaaaattttttttcattgtaactatctaccactaaacagaccattgtcaccttgtttatcagcacatattacataattaaccagtataaatatatatgctacagtgtaaatgtgtagagtgtagtataaaattttatctgttaagtcattttcttggttttttgacggttgcaccgtagttgtggctttttaaaaatatcatagtatggtcttcaaaataaactaagatatctcttgatatattaataccaaccatatttgggaaaggtttgctaggttttcttttccaaactaataagcctctgtacataactttataacactttacattcttcttaaatccatatttcaacaatccttttggaccaaacgtgacataataatcgtcttcatttagttcaacttctttacctttatctattttgtaaagttcaagataacctgagcgtctgcgtgagtatactctccatctccctccttcgcggcgcataaatgtgaatccatccacatcttgcattgtaagcacattataatctttataatatgttaatgttaaggcataaggctttccagttacatgctcaaaaatattttcataattataaactatcatctccaaacttgcctgaaacatatactctattttactcaaatcttcagacgtaactttatagtctccctcttccataggaaccattatcccttcctcattctttttaataaaaattattttattatatgcttcaaaatgtttaaaactcgttgtttcagaactcttggaaggtccagcggattctgtaacattaaaattatcctcctcttcttcactatcagtgtatgataccaggctctggtcgttatttccaggtttatcggcacatctcacaaacacaatcgttattagtattattcgataaaattttatgctgcacatgagttcattataggataaaactttattttcggtgggggatctggaaatttaaaatttcacacacatcaacgatcgtcagatcattcggttattattcagtaaattacattatacaaagttaaaatgtcaaaattttacattatatagtacaatggttgttagtgttaaataataaaatttatgtatgaaatggccaacttaacggacattattacataacaaatatacatagaataaaaattaaagtgtgtttatattagttaaagcgatagtttatgttatttggtgattattaaaccacttcaaatattcccaaaattcagctataatgaacatattacaatagtatattatagtatgatattatgtatagtatgatattatgtatagtatgatattatgtatagtatgatattatgtatgtttaagagttttgttctgtttcggtatcttcttcgctgaactctccgagcattattcccactcctctactcgacttttcactctccactgatacacctgttctctctgatacttctgttcccactgatacacctgttgcttgtgttgattcagttgacatgggttcagttcctgttgaagcactaggtccagctgttgaagcactaggcccgggtgttgaagcactacgcccgggtgttggttcactgagtgttttgggtatagttaatgttttgggcctagttggtactttaggcctagctccagatttcgaatggtccacagtagcagcctcagcagcagatttggcattagtagcctcagaagcagattcagcagatgcttttggcacagtatttgaaggtccagtggtaatagttgtttcatcagtattaataggttcattgggtgctactggtgctgagggtttagacttggtaattgcatcattgatttcaatgtatttcttaatgaactccagtgctccagaatcgacttcatccacaccaacttctgctgcataaaatactctatccgtaccaacaaacggtctggttcccgtaccgggacctaccgtacctagacccctagaattggaactcgctgctgtagtactgaaacctctagaattggaacttgctgctcccgtaccgggacctcccatacctagacctctagaattggaacttgctgcagtggtacttggacccctgaagttagaacttgctgcggtggtaccgaatatttctatgggtacttgtacatcaccgcggtccatgtaaccactactggcaatggcgcctgagcccttaatgggcgtagcgtttgcgagtgagataatttcatctcccgcctgtttgctgacgatgaagggaatattagtcgtcccgcgagcgattttaaaggcgtaataatcaccggtcagcttacacaaatccaccagttccatgttcagcaccttgactactctgtccttgtttacatattccttcatgtatgaaaagggctggtctgtactatttgagttaggccacagggtcagtagaatgctgggcattttcatccacttagcgtctgggccaaaaatcacatccctcattaactcatccgtatacaacgttttacgcgtttttctcttcatcaccgggtcaaagggattatcctcacatatgtcctcaatctccactggaccaccctcagctcccatacacactgtaacactcggtgttgtacccctaggtgttgtgaattgtggtattgtgggttgtggtgttgtgaattctttttccatgggttcggtgtcttctttgctttcaatgatttcctcggccgtatcgagatccgcgggcgcatcacctggttcggcgtcatcagatcttcccgctgtaatcacaacctctcccgtacttttatcatgcaacagcactgcaggcatcggacctacacattcatcaacattattaattaattaattaagtaattaactgagtaaataaataattgtgtaagagtaaaatggtgtgaacctgtaagatcttcgtttgagtcttgaaattggtatgtgagagttccgtagagtagtgtgacggtatcatcttttgaggttttttcgcctttgtttcccaggatctcaaatgcaacatccctgccctcggaatctacacaatttttcatattttgtccatacccttgagtaataaaatgttactcccctctcccggtactcccacggatatttccggtactcccccaatttccccagtttcctcatttacagccacagtttccacagtaggttcctgagttactgttacaccaatttcattaggctcctgagttactgttaccccaatttcattagtttcagtaacgtctgattcactgtttggacttacgatgggacttatgagtggtggaatacgttcaggaattataattggttctgtaggaccaatttccccagtgggtgcactgggtaaaataacctcaattgctggatctgcattagggccaataactacctgtggcactacttccggatttacttccggtacaacatttggattaagttgtggtacaacattcggtatttcatgtggattaacgtgtggtacaggatgaggttcgggtaattcccctgaagaattgattaggattaagtaatgataaatgatatgtagagcaacataggataggatcggtgtgatcgagaggactattgttatcaagagtttgatgaatagtttgagttagagtatgtggcggaatgtgatgaatagtaagtggaattagataaaaattatcactattaccgttgggtaacaccgatctcaaattatttattccaatccccgaaccaacaaactctacaaaaacacattcaccaatattactactatttatatacttaattatgagtaattaagggtaattaaggggtaaattaagggtaattaaggggtaaattaagggtaattaaggggtaaattaggggtaaaataagcctaattaagggtaaattatgggtaattaagggtaaattaggggtaattaagggataatttgtgactagaaagggtcgaaaaaattcaaagagtgagaagaaaatagcagcagtaagagcagcaaaataatcagcatagtattatgtataaataactactgtcgtataccgttatgctccatggcgtggatgagaatgctattaataactaaaaactgaaccaacttcactaatctctccattgtcacagttataccaatttcacacactttttcacacagtatactttacacagtaattaattagcagtaataaattaatattaattactttacacagtagtaaaataatagtaacaaaataatagtaataaaatgatagtaataaattgtttgaatgaatgattaaggtgaagagtttaaatggtataaaatagtgtcataaagcagcaagaatagctaggtgagaaaattctggtacacatcaccaacgttaatacacatcctctctctacacatcataccactcacaacaaccctgactatatccatcaatataccaataattatgccataaaaagggtgtagaatgttgaaaaataattaaaattgttgaaaagtgtggaatccagaattccctgtggagtgtgtaaaaataactcaaattccgtcaaacaactgatttaattaattaattaaataataattttagtttttgggaattaactccgaattgaatgagaaattaaaaaaactgtaaattcttagctagctgagaaaattaccttgcaaccccaactcaaattattaattccacactttttaccaaaaaattattaaatagtataaatattagattccacatttttatactgtagaatcctcgaaataattaattatataccacaggatctgggaattctgtcaactctgtcaaccactaaataatagataaaataaaagtgtgtaaagttgaaattaatgcattttaaacctttttatactttgagtaaaaagttgataatttaccatttaatcactcctaccgtttttcataccatttccctcactactgtactatactcttaactatatacccctaaagggagctactttatatacccctaaagggagctaattaactatactcttagatatacccctaaagggagctactttactatatacccctagagggagctatcttactatatacttaattatatacccctagagggagctactttactatatacccctagagggagctacttaactatactaactactgacttatactaactctgtggagagtgattggagttatttttgtatgatattacagtttaaaatgtctgcctcttttagtgtcgttgtgtcctcaaaattgatctttttcggcggaaatccatacaataatcccctctctcccgtactcccacccacactactactgtcaactctgttcatatgagttttgataaactgtttgagatcttgtatggtggcgtcttgtgagattgttaggttgatgaggtcgcctgtggagagtttaattctgaggtttgtgttcctctctccggtgcggtattccagattacttaccttagtgccgcctgtgaccttgttactgttgacgttattattgtagtaattattatgttcgatgaggtggagattaatgtcattggtgccgtgttgtagttcgggaggtgcgatgccacgtttaacgtctgcgatgaagacggcgttgttggggtctgacagtggcctgaacggaccaccgtcaacgatgaacccgtccaagtataaattcaccacgtgctctccctcgtctatacctatcgcactgttatgaccgccagcgtaactgtactgcacaccctctctactctccatataatcgtccaacgatcttatattcgtcatttttacacttttccagtattcccaaggtgtacacagtattcttcagggtattttaggggtattccacagtattcttcagggtgtttccaatatgttacagaagatttacggggtatttccagtatgttacagaagattcctggagtttccgatgttattacgttgttttaggggttgttggaggagatttgttcggaaattgtacagttgcgggaccgggtttcgaacctacgaccaacgggtaccggaaatagtactactccactgtactatatttactttgttaatttataatattctgtaaccagagaaaatttctcctcacccaaattacacttaattacacttaataataggtgataaactatacgtaaggcgattcttttagtttatgtatgaaaggttgatagaattcggtattgaggtaggggtgtctgacgtaaaagtgtttatctctgtaaatcctcctttccttatctgattccttgtcttttagcagtagtatccttagtacaccttcctcttgtaaaaatttaagcctcaggaggttaattatgctgggatacgagcacagtttaacaagtaaaaagtgtgcttggtactgtttcttaattggtctcacaagtgactttaggcccaggttataaatgtgaatgttttccacgccaatttgcttaattttatttaaaactgtgatgaattgttgttttattttctccactggtctgtcctgaactgcaatgtaaaactcgtaactcgacttcggatgatgtaataaaccgtcccgctttgattttaagcaattgtccagccgtagtcttcgttcctctattgtctctctgctcctctggatacgccttcttatctccttaaacaacgttttcgcaaacttctccctcaacacaaatttctacacaatttatttatttaattaattatattcaataattatattcaattaattaattaagtatgtagagatgttggagttacgtgatgcggttgagttgttttgagagtgttagaaatgaaagattccgaaaagttgacgcagtaaaaaagtaaaaaaattattctcattcaattccgccgagaactgtcatctccaacacaaattaccttcacaatcaaataaaaatatttacaacctaaaataaaataatcctaacaactttttggaataatttgaataatttgattaatttaaaaattttaataatctaacaagtttgttgaaaaatgatgaaaaaatttgaataatttaaaaaacctgacggaaaaaatttgttgaaaaaatttgatgaaaaaaatctaacggaaaaaaatttggatggggagtttttgagaaataaagtaaataatttgaaaatgtggtaaaaatatgaaaactcaactcaaattaccaccacatcactcgttacacatttcttagtatgtttggaatctgtaaattaagtttatttgtgagggacaaaagtgtgttaaaaaatgtgtataatctctcgggtgtgagtaaattattagaaaatgtcaaatcttcgctgttttatcctttaaaagattccgtctcactttttatcgaggaaccaaatgaatccaccaaggaattagtcgactctgaaattctctcactttatcaccaaatttaccctcaaattcttcaacacagcctgggtgagaatttgacggacatgaatgtgaatttgagggacatgaatgagaatttgagggatgagtttgtgaatttgaggaggaagttggttgatatgcagaattctcttttttctggctcgttacatactttaaattatcataaaattttgttacaagtatccctttacggagcttggtacaacggcaactgtcctctccatacagctccctatacccctaattatactatactatataactatacttaattatatacccctagagggagctatcttattatatacccctagagggagctatcttattatatacccctagagggagctattttactatatacctagaataccctgaattatataccccgagagggagctactttactatataactaataccccaagagggagctactttactatataactaataccccaagagggagctactataataatactataatactataatactataatacagttaaatatatacccctagagggagctactttactatataactataatactatactattactatactatactactatagttactggttaatggtgtgatgttgtaggtgttgcaaggagttggtggagaggagtctggtaaattcgccgctgagctttacgacatgtacgctaacatttgtaacctgaacaacctcaaacacatcaaacacccaaacaacactctcgaaatcttccgtatcccatcccatacctatcccatagttatctattacttagtattacagtattatagtattataatagtatagtattaagtatatagttaactagctctctctcccctaagaatagtagctccctcttggggtatatagttaaattagctccctctcggggtatatagttaaattagctccctctagggtatataataagatagctccctctcggggtatatagtataggtatatagtatatatattacagtactacagtattagtactatattagctaaggtacacagtattctggctatagtattaattattataatagtgtggtaatagtgttaatagagggtttggatagatttaggtatgagtttggtgtgcatagggttcagagggtcccgtttaacagtaggcggatccagacatcatcggctgtggtcacagttgtgccacactttaacgtggaggatattaacattaaaagctccgacttaatggtcgagaccatgagatccagcggctccggcggacaaagcgttaataaatccgaaacagccgtcagaatcacacacattcccaccggcatcacaacctcctcacgcaccacctcctctcaagtatttcaatactatttagtcagtcagttaattatactcagttataccaatagcatttattactcagttatactcaatagtatatagttaattagttaattagttggtaatagtgttgatgtagatagacaataaagtgttgggaatggagatgataaagaggaagataaaggaaaagcaggaacaggaaattgaatcggtaacagttaaataataccttagacagtaattagtaatttttaagaatgtttgaggggactgcccgggtctaggtactccagagggtatttctaggtcttgtaaatcacatgctgtagtacggtgtagacagataattacgagttaattataattttccgattcttaacaatgttaattaaagttaattatgtgagaaaatttaatttttggaattttcgaaaaatttcgaaatttggcctaaaatgacccggacccaaaagtgacatttgggttccggaaaaaaaattttttttcaaaatttttaacgaataaattaaataattccaaatcactcctattgaagttttagacatcaaaatgcttttatttagttttaaaatgttgttactgagtgtttaattcgaggtaattgtaggtacctggctactgtactacagtactataactagaatattatacttttaactaaactttaaacaatattatatactattatctctctagaaaaggggaatttaccctaaattatcctaaatttagctaaattaattaggtttctgggcttagaaaagctaaaacattcagttaaactaacaagttaaatataaaattcgttaattatatacttaatactactagaataatcctatctatatatctccaattcgatatatttactctactatttacttattgctatagttaagtaccctaagtactaatcatccaggccttttaaattagtagtttaaggtccagttactcatcgtacacagataattcccactttataataattttctggtgcttaacaatggaaaatctgttgatttgggttgaaattttgaggttttaaaattttcgaattttggccaagtggtctggacccaaaagtgacatttgggttttgaaaaaaatcaaaaattttcgactattcagaaaattaatttaattaattccaaatcattccaaacatcattttagacatcaaaccacttaaatttaagaaaaaaagttagttttaactatctaaaaatcggttagattatgtatcatcagatacacttgacgtagtattaactactattacccagctattagaccgaaaatttctagttattacccttaactaacactaatttaaccttaaaatagataaattatcctagattaagttaagtaaactagatttctgatcttgaaaatcctataacctcaccttaacatataaaagtaaatataaaattccctaattataactttataatactcttaaaactattatctaaatatctacattacgaaatatttactctactacttagttattactatagaaatgtgctcgacctggccctgataaccctctcccactcacctatttaaacccccaaataactacataatacccttagaatacctaaaatacctacagtaactactaaactactgtaacaacaccctaacacacccctaaacacccctaacacacctctaatagatacctataataccataaaagataccgtaaaagataccctaactacatacttaatacccttagcatacctaaaatacctacagtaactactaaactactctaacaacagatttacacaccctaatagataccctaaaagataccctaacaccccttacacactcctaatagctacttaataccattaactatgagaacacttggtgaaaaatgtgttagatgaagaaggatgttcgtatgtctcagtatagaacgggtgaccgtagtgagcggataagaacgataaattacctgcatgattccatcactgatcaccggtgtagggttacgcttgacggtgtggattcctacctcagttccggccacggaattgagaaaattcaccaggcactcacacaactcgacaacgccaaaattatccaattcttcctacacaatctcaacaccatcgcaacactatactaatcattaaattattatataaaattaatattatataaaattaataaaattaatattttaataaaattaataatttgtgaaaataaataaaattaataattttgtggaaatgggtaattagtgtttgtgatggtggtatgtgtgaattgtggtttggaggtgttgacgttgtaccacgtgtacaacgaggttaactactgccttgcgacctgcgaaaactgcggggaaatctgcgataaatatgtcgagtgggaaattccactcatcatcatcgatctattcctcttcaaaattcaagtctacagacacttgatacataatcactctccttcccctcctctctctccctctctctctcctactcacagtactgtacacaataatactccctctctctctccctctctctccccctctcccaatactacttataatactgtacacagtagtgtaggaagtagtatgggaggagttaggagagtgggattgaggataaggagtacgttggtgcgtgtgatgttactgttgatatcggcgacgatactggacagttactcgatgttaacgtcgtgtaactacttgacaagcccgccgaacatctgctttccacagttccaatcctacaaccagtcactcctcacacaaacctccaagttcttccgtacccaaactatccacaatcgtatctccaatcgcatctccaatcgtaattccaacttatctcaaggtattttcaaccttttctccaacgtgtctcaggttttaccaaccgtgtctcagggtttaccaacgtatttgacagtatttatgaacctacctcaggttcttccaacgtatctaagggtgcttccagccgtacctcaggtgtttcaggcgtatctgagggtaaatctgaaggtactgagggtatttccgtagttattttctgagttatattctgagccgaatttttatccattttatatataaaaattaatcaaacaaataaataataaactattattttaccatataaataataaattattattttactatatgaatgataaaattgtgtaatcagtgttggagttggtggagaagatgtcgagtgcgatgatgtgttattctcggttgaacatatttaagcgtgtgggaatgaacgccgagtactgtaaccgcacgtacagccgtgccatggaactgttcttcctcattttcctgcaaaatccgacactctgttcctggagtaaaaacctcaccgcagactgcaaagatattaccgaactcgggatcatctcactctcaattctcagggttctctcttactgcctttatgttattattttttacacaattctacggagattcaaacttatcactcacaaacggaggattaacaggaagaaacggaggattaatgaaaaagatgacaatttgtgtgataaaaaaataaatgccaaagttgatcgggttaggaatttacgaggaaaatatcacaccaattctgctgctgagaatgacagtacagttactccactgtccacagtggagacaacagtgtctacaggattaaagggagtgttgaatatgttttacgcgttgttgttgagttttcacataaaatctctggtgttgatgattaatgtttggtaccctacgcacacgattttaattgtcattgagctgtacatttacctgaaccacatcgtggaactaaaggcgatttctaacctctcactcggcgtttcagccttcatcgtcgtcaccggcgcccttctcaaaatcgcaatctacttcctctggttccacatcatcaacactctcaacctacactatttctactcataatctcttaacactatttttattctacacaattttacattatttattgtgtagtgtgtgaggattcctggtgaaattgaataattttatttgaggatggtttcgattcggtttttatacttaaattttatctatattccaaatttaaataaaactcacccgaggtacggattcaatattttaatgttcagtaggaccgtgacgccggtgaagttatttccggaactgacgctcaaatttaataatttcatcaactcactcaaatccactccaaacccgcaacatcacgtaagaaatacgtaaacttgtgtaatctgattaactgtgttctaggagtttgtaactgatgtcctggacttaatcgcaaaatcaaccaacccaaatctcaactccatactctctcaacagtatctcaacccttttcaacactattttactcattttaacactattttattcattttaccactagattactgcttaattactcattaaattaccctattaatacttttaatatgattgtgtgtagtaactttgagtacgaggacaggaaaaatgtgtttaaattattagttgataattggaatgggaaggggatcccattaaccatagacaagcttttctctctcaataaagtaatcaagggacttgaattagaccccctcacagtttccgaaatcctaaacactccaacaaatgatgcaacaattagtaatacaaagatgaatgtgaaagtaaatgatgtaaagaagaataatgtgaagatgagaaatgaggatgtggagcgaattttattgtttaatgatttgtttggtgctccagactttattaactctctcaccatctcacatccaaacatcaacactctcaacaccaaaagtattatccacactattttatatagttaatacctatatagttaacagtataggtatagtagctccctctcggggtatacaattctgagtatatagttaaagtagctcactctcccttatattattagctccctctgggggtatatagtggttaagaatagtatagtaatactgtaagaagtgggttgaggaggctcgaggaccagtcaatggagtagactggtccgagagcgaaattttttttcttgctgctcttttttccttgcaacctctcacacagattactctccaatttactccttaattaccctaatttagtactcatttagttactgtatttagtattgtaatacagtactcctaactataccccgagagggagctatcttatatacccctagagggagctacttaactaatacccctagagggagctatcttactatctaagggagagggagagggagctacttgactataacaattatactgttaactaatacccctagagggagctacttaactacatggatactttactatacaattatatataaatagtaatttgtagagaatctattgggtctggagtttgagcgtatgttggactttgacttaaatgactacttgcttgagaatcctcgttatttaccagatttaaaagacgtcccttcccttgtaactattatgaaacagcagattactgaaatctttggtgagaattcgagtttatttcgtgacgtcactgatcacgatttggtttcactgtcaatttccctatcagagctcatttgggagtataactactacaggcacagggcgaaacctaggattagcactgacgtgatggagttactaagggttgacaaaccactctgtgacgacgtgtttgcacagcttgtggactcccgcattaatgaaattaaactcattaaaattcccaacatcgttgacaaacccgtctactcacacccactcaaaatctttcccactctctaccaacttcaattccaacaatctctcaaagattttaaccactggttccaacactccatagattctctactctctgacaatgacactctgggcacagtaaacacagaagacgcggtatggaaatatccaagggctgtggaggagattggaggtgttaggccgtatgtgaggtttatatctgacgaccctggtgttccgccgagtgctgggaagttcccgaggaaattcgtgcaaagggttgaaggggactttgagtacttgacagtgacgccagaggaccggaaagagtttgacaaggtcgaagaggacatgaaaatgttccaacacatgtcacaggacgaactcgccaaacacttcatcagaaaattcaaatccgaataccaatacgccaaacgcatcaaatccagactacacacactcaaactcctcaatcccaacaactccacacatcttacccaccaaatgtatagtgagtttacccagcaaatgggtagtgagttgactggggacacaagtaatgattttactggggacacaagtaatgattttactggggacacaagtgtatcagctaccacgagtaaacaattgaaaactccgttagaatgtgttaatgagttgagtgatgtgttgacgggattgaattaccatttgatgaatgtgcggcacatgtcatggcacttggagtgtgcggggattttacccgtggagtgtctttacaatattaagcaaatgggttgcaccatcaccaaccccaaacccaggacactcttcttcttcagccacaacttcctcaaagcattcaacacaatcacacagttcaccacacaccacagtaattccagtgacacagacgtagtgtccgggaatcaagtgtttaagactggtggattgagtgaatcgatgagggatagggtgcgactattttttgaggcgtacaattcgagtaagagtcgaattcctgtggagaatgacactacgtcaatttccgacgacccggactataaattgaacgattctgagctcttgtctgcgatggtaaagtccggtgctgggatgaggatttcgggtgaattgccatttggcatgcggttggagaacattgaccgtacgaacatgacaccgcagctggcgcagtcttccctgtaccgcctgacaatatcacagccagaccccagctaccgctgtaaacagtgcaactacaccgtctacggacactacattaacctcgccaaggggaaaactattgtatgctacgagttcgaacaggtcagagatgacccagactacaagtgcaggaactgcggggccaccagagatcactttgaaattgtctacagaaccgcagaacgacactatgaactgccgccgtacattcacttccaactcaatcccaagttcagaaatgttaaaactccttagttaaggttagaaatgttaaaactccttagttaaggttagaaatgttaaaactccttagttaaggttagaaatgttaaaactccttagttaaggttagaaatgttaaaactccttagttaaggttagaaatgttaaaactccttagttaaggttagaaatgttaaaactgtacccagggttagaaatgttaaaactgtagctgaggttagagattgagtggatttaaattggtcactttggggtttcttttaatgtttaattcaacattacatctcatatagagttaatttaggctttaatatgtttactacagtatttaccatagtatttagtaatagtacagtagtatagtagtagtatagtattgtggtaggtgtctgggttaggtgtctgggtttaagggtagtaaattgggtgtataaaaagtatattacagtattgtttagagggattaagatgatgtttacagggttttaatgtggtatagagtagtatagaggggtttaaagtgtttgttaaggtgttgatttagtactgtatttacatactactatacatatacagtatgttatacatagtatataatatatagtatagtactctagtaatagtataatatatagtatagtatattatttaagagtatacagtattataagtatattagttaagagtatacattattataagtatatggtatagatattctagtaatataggtgtagtagtacagtatattacagtagtatagtaattataatagataagatattgtctgtggttacttgtctgggtttaaatcatactattagtatactatactacagtgtatatacataatattatatagtatagtgtatatagtattatgtgtctgggtttaagagtgtatagtattagtactatagaactgtacagtatttgtttaatagtagtaacgttttaatatagtattaaatatagtatagtataggtatacagttatggatatatagttaagtagctccctctaggggtatataattatggatatatagttatttagctccctctcggggtatataattctaggtatatagttatttagctccctcttggggtatattagttaaggattaagtatatagttaatttagctccctctcggggtataatatagtatagtaaaagttgtggtatatgtattgtgtatgatctggtgtgagattaggtttgggttgattttaaagctaattccttggccagcttagacacctccgggccccttttagcacgcgccagtcccacctacaacccaatcaacattattcaaaccatgttaacacatggtatggaatagctaaacacaggagttaataactaagcacagtagtggattgtgaataactggaaaaatagagcccccgggggacaacaggatccgtttgagcaagcaccgtaacgtaccatcgatggtttatagtttgagtgtctgaagagagtgaagtaaaactgcataaaagtgttagagccgagaacgtaggcgtgtccgaattcggaaggaacgtccagttgcataaagccaggaatacactcgtcaccgtccacgtaaatatactcctcagcacccagtcttatctcctccccgccctatccaattgttacacactacacttaccagaatgtatctcagtgtcatgtcctctcctctcttacatccctataatattattatgggtaattatttggtcaaaattatgtaaatttaattaaaaatttatggattttggaaataaatgcaaaagttgatcgggctacgaattggagaggaaaatttcctccacattgctgcttcaaccacttatttaccaaaaaataattgtaaaaagtaaaataaataataaaaaggttgcaaaatggtaattagtggggtagtataactactataactactagtatgaatacttgttgtattaatgttgtgaaggtgtggaattcggcgcttggaacgctgttgagtgatgttccggagtcgaagatgacgtagctgggttgattgcagcagattttagtattgccgaggtaaatggcatcgagtgcgacttcccagtaatgttccctcactactgggaacattttcagctctccctcatagaaacgcggatccgcaccgccaaacataagcaaagcatcttcgcccccaatgtaaaatgcaaactcattttcactcagtctgttaagggaaaaaatattctcaagcaccgaaggaccggaaatactcgacatctccgcaaacgccaaaccaactataccctcaaagtttatcttctacacaataattagattgactatgtgaatttgtgaaatatgtgaattttagttaactacgtgaatgtgaatggagagaaattagtctccatttctgctgcagtaactacacattaaccaaaaaataattacaaaagtaaaataaataccaataggttgcaaattgtgtaaataatggggatgcgtaacttaatgggtggtaaagaatgagtgaataagtagtaactacataagttagtgcaagcaccgtaacgtacttgaaaaacgttggaatcggattctaaatcaacgagagcaaaattctgttcaaatgacatgtcaccaacagtaatcacatcactcgcaggcctaccctcaatctcacccgttccaaactacaacacacttttatcaactcttaactatgtaatcttaactatatacccctagagggagctatcttactatagttaactatatacccctagagggagctatcttactatagttaactatatacccctagagggagctatcttactacctaattatatacccccagagggagctatcttattatatacccctagagggagctaattaactatgcttaaatatatacccctagagggagctaataatataagggtagagggagctaattaactatacttaactattaaggggtgtatactttgatatgtatttttttggggtttgtgagtcgtttgaatgtgtttgagagtttggggttaaatctcttaactttcttacaggtttcagattcacacgttgttccaacaacccacacatttctacacattttgtcaactttttaactagtgttaactagtgttgagtaggttaatttaactagtgttaagtaggtaaatttaactagtgttaagtaggttaatttaactagtgttaagtaggtaaatttaactagtgttgagtaggttaatttggagagaaattaatctccatttctgctgctgtaaccacttatttatgaaatttaattagtaaaataaaaataaataccaaaaaggttgcaaaatggtaaatatctggggtaggataattaagttattacgtgctcccggtatcgaaaatgggatgtagtatttgaggaggcgtaccaacacttatcgtaccaacatacaaactctaatcattatcatataattaattgtcaaaaatagaaatttgaatagtaaatagttgaataaaatacgaaaattgatcgggctacgattggcgaggaaaatttcctccacaattgctgcaccaaccacttatttaccaaattttaattaaaaaagtaaaataaatatcaaaaaggttgcaaaaaggtaaataatgggggcttacatctttgatttgttgtagtggaacatactcataacccttaagaatattcatattcctattaaactttcttctcacactatgttgtgtttgagaatttgtgagagtatttgtgagatcatttgtgtgagtatttgtgtgaggatttgtgatggtatggcctagagatccgaagggtccttgggatctgagaacaaatgaaattttcccgttcttaaagtttttctgattctcacgggccagttctatcactgacactcgttccttttcatatctcctcaaaccaattgtcatctataattgcgttacggcgttaagtacaacgataactaattaccaaacatattaaccatattaactatcttaactatcttaactatattaacttaactatattaactatataccccgagagggagctaataatataagggatagggagctaatttactatataccccgagagggagctagtttactatagttaattatataccccgagagggagctaatttactaataccccaagagggagctacttaactatatacttagaattatataccccgagagggagctaaataaatatataccccaagagggagctacttaactatataactggtgtaacccagtagtgtataactgagtaagagtgagttacctggggttgattgccttcgtgaaggcacgacttgcaatgttttgttgaccagttacagtcgttacaactctttaactgcgatccgtacaccacactcacacaccatatcacacacaatatcacacaccccctccaatccatcaaatccaactctatcactattactatactattactattgttatattattactatactattactattattattgttaataatgttggaagattggagagagatttgggattggattaaaagtgactgcagatttgaatcattggtcgacagaattaatttaaatccattaagaaattaatttttatttttacaaaatttgataccattgacagtttgataccgctgacagtttgaaacctataacaatttgaaaccattgaaagtttgatgtcgtacagagtaaagataatttaaaaaattccggggctaaaaaaatttccgagattaaaaaaaataatttaaagggtaataaattgaaaaaatcagtttttaagccgaaattttacgaatttcggcataaaagcacctgcaagcagcgtaacaaacaacagcccaaacgccctaaacacaaacccaaactccaccaaatcaactctactcatcccacagacactcatcaaatcactttctatcaccttttaacactttttaacactatttatcataaattaactttaaaaatattatttcaaattcattaaaaatattaaaattaaaatattaaaattaaaataatttaaataatttgtgtattttttatgttttgtgtgaggattccggggttagattcctgttacacaccacacctgagctgttagtaataatgaaaaatggcgcaattttactctctctaatcctccctctcctccaatccgtctcatgtaaccttttacacaatttttacacttttttacacttttttacacaatttttacacttaatttatcattttaatcagaatttattatgttttaggttatgttatttcggattctttaaagtctttccatcctctccatcaccccctcaataccaatactaacctaagtaaacttaatactgtagtaaatactgtagggagtgttgtggagagagaggttgaaagtgttggagtaacggttcccgtgacacctgacaccgtaacccctgacaccgtaacggaaccccctgacaccctaacggaaccccgtaaattgagtacttatgagagaaaacggataatgcataagatcttgcatgagcggaataagaagttgatatcagacttgatatccaagtgtgaccctgcggacttaataccgtaccgcagcaaatccaggcctaaatctcgtactcccaggactagtcaggtcacaccctccgttacggacgacacggagtttgaggactctgtaatcacatttgacgacgtggagccgacgcagataaaccacgtgaagtctggcagttacgtgttttacaagggtgaggtgtacacggtagtctcaatccagcacatagcccaggcccgcactaaaggacattataaagttaaaatgcatctcctacacactaataaagaaaactcattctcattcccagacgcgtccaaactcacagtcgtcgtaccaaacaaagtcaactgcacttactcacactttgatctcaactccaatctacacatctttcacattattcacaacgttgacagtggtaattctcttcattcggttagtccaggtgttacaggtgataactcgggtaaatatgataattcctgtgtgacaggatcagtagtgggagtgaatagaagtttgaacattcctgcgttaaaatatttgaagccggggttaaaggtgagtataagtcgttggaaggataagatattgagcgtttacatacccttccacatagagtacaaagtggttaaaattaacactgggaactacgcagctactttggataacggactagtagtcctagtgccaacgtacattaaagtcaacgatcacattgaaatcaccaccaaggccggggagtttctcagaagaaccaaaatcgcataatctcatctctatactattctctatagtatgtaatattgtatagtattctctatactattttctccttagtatgtaatattgtatagtatgtaatattctatagtatagtagttaatggtagtatagaatgagggcatgctgttggagtttattgtactatttagtttactaggtgatgttttatgtgtttaattagggctggatagggcaatacagggggaataatacttaattactgtattatattactccaggactagtatactataccttaaacccagacatgtaatactatactatatatactatacctaatatattatatactatgtattatatactatgtataatatatgtatgtgtatagtagtaggagtatatttgtagtactatggtatagtaatataacaccaaactaacacttaataaatcataattaaaccttatttacaccttaattatagattaaattacgtggttaactttttaaaatgctattatgagtaagttgactatgggtgggtactggaattaactacctgtaatgtgtcccaaattacttaatctactactatatatactatactatacatactatactatatatactatatatagtatatattatacatagtatattatacagtattacagatattatgtagtattacgtagtaagttaagtgtctgggtttggttatattccaagtgatataagaataaagtagaatagtatattaatgtgtattagcgttgtttgtataggcacggtgttagcaagtgattatactgcagtaacttgtcctcttttatctccttcctatcctccaacacaaactcaaaccacacaaaatagtcaccctaatccatactcacactatactacactatactacactatactacactatactatactgtagataacagtggataacagtggataacagtggataacagtggataacagtggataacagtggataacagtggatacggtagtgttgtgattggaactgtgtaatgcgtaaccgaaagaagtaatgaagttaatgaattctttagggtttgatatgcgacttgtaacctcaactatcttcaatcttcccctaatcccattataacccacatactccacgtatagtagtaactaatagtacaataactaatactgtagtaacataaatagtgaagtaataactaatagtaggaattgagttaacttaattttggtggttcttgtggcttcgaggatgaataagggccagtcagtgcccatgaggctgagacagaatattacaacgtctaacactccagtctccagtgggacctaaaccaactaatttatgtgtaatttacccttttaatattacacgcagtcacatgctcatttgtagccaccaaatcatacgaatacactttcctactaacaacaattcaggcatgttatactcaactgttatatagtttgatcaatttgatgaaaaaataattgtaaatttcacgattttggaaataaatgcaaaagttgatcgggctacgaattaccgaggaaattttcctcaatttctgctgcttcaaccacttatttaccaaaaaataattgtaaattgtaaaataaataccaaaaaggttgcaaattagtaaataatggggatgcgtaaaactgtataactagtatagatatgaggaagtaggaccccgtagggaaaagagagtccgattggtgtgggtaaaaaatactttgtgaaagttttagcgataagtgcgtcaccgcatccgaaatcgccgatactaaaatatatcaactgtgtgaaaatacttaacaagttcttgacgttgtttgagccattgaattactttatctacggggttgtaaggccaagttagcacttgatttcgatatccttcgtggtactattgacatattaacaattttacctaccgcagagtatagcttggggtcactgttgaacattgtaaagctaatgtcactcttacacttgtataacttctcatttatacaacggaatctactcccagacaacctactccttatctcctccaatcccctctttcccattcttctcactcttttacccttttttcccattcttactcatttttcccattcttactcattttttaacatttttacccttttttcacttttttaactttttactcatttttacccttttttacattttaaatattttaaatattttacacaattttctaaaaattataaaaaattataaaaataaaaaatactaaaaatattaataaatgtgtaaaaaatattaatagtgtaaaattattaattaggagctaattttgcacttgtgaaagttgcagtcttcgggtacgccaccgtttgtgatatgttccaagtctaacttttctaatctattgtagaactcagacttggcgatgttttcccagtggttgtttagctttgtgaagaatttgaaccctatgaattcgtttgtgcagatgaaggcctggagtagttcgtactcgtcgtttctgaggtaaatgacgcagtctgcgcagtagtcctcgttcaacggcgctctccaaataacctccgagccctggacgattttaatcaagtggtacgggtaatttgtcgtaaacgtaataaagtccgcacccccagtgtttctcctcttcaccgtcaccttctcacggttcgggttagaaatgtcaattaatatgtgattctcactgggaactctcagtctcaactctctcaacacggagttaaagtcggattctgacacgtgtagccacgtgtcatcctttacactgtggagcttactatagccctcagaactctttatcttcattatcaacattaccatttcttcaaatctataatttctatgagtgtcagttgataggctgggatttagaaatgtgtaatctgcaatggagttgttattttcacaatttgttcaaatttacaaaaaataattaaaaataattaagaattggggttaaaaaaaataaatgccaaaattgatcgggttacgagaaataaattttctccgtaagtcatttctgctgcagtaactacacatttaccaaattttaattccaaattaaaaataaaataccaaaaggttgcaaaaagataaataatggggatgggtaaataagtgatgagtagttaagaatatggctaaaataaaaaatgtgaatacttgaggatgagaatgtatgtacaggattctttgagggtttgtgtttcccagagagtgaagttgtggtctgtgacttttctaattgtgatatcttggtaggggatcatgcttgcggttgaggtgaatgtggctttaaactcgctcatcatcacgaaatcgccgcttttatcgttgatgtcatacgtcacgtcctcacacattattttacctttaattaatattactaatactaattttattatcaaatgtgttggcatattttttactaataatttcccagccttccatgcccatggggagcacttcatatcctacaccaaccttccacatcaatctacacaatatctccacttattcccacatattttactctgtcatatcttatattactctgttatatcttgtattaatcagttatatcttgattaattgtggttagtgtggtatttgtgacatgggtaagttaggtcccctttagatattagcgttaacattttccctttataaaaatttacaagcaatatatttaattttaaagggttaatattttacgagtgggaataaaagatttgtgatgttgtgtcgtaccacataatttgaaataattaaaatattttccgatgtatatcaaattaattcgtttaaagaattttaggacctataaagatttaaccttgttctcactctcacccaattacaacgccatcggtatttccaacacttacacatttcacccttaattagcacttaatttactcgttttaagaatattttagccttattttagggataattttactcatttttaacctaattagcacttaattttactcatttttaacctaattagcacttaattgtactaattttagtcatattttacttccaaatttactcattttgggccttaattaggcttaattttagctatttatgtgttattttaggccttaattaggcttaattttatctatttttaccctcatttaagctaattttagtcataattttggctctaatttggcttatttcagtcttaatttacccttattttagcccttaattccctttattttagtcttaaaatagtcatttttacccctaaatttacttattttacccttatttccctcttaattagtgttattttagcctattttagtcctattttgacccttaattagtgttattttacgcttattttggccttaattaccccttaattattgttattttactccttaattagtcatattttggcccttaattagcttattttacccctaattaactcaactgcgtgtaattattgttgtagttggtctgaatggttctggtaagagtaatgtgttgttggctgtgagttttgttttgggtgacagtgtgcctgggtttaccaggtcagattaccttttcaagggcgaccagagctccacctcgcccgatttttccgctttcgcagaacttatcctcgacatctccgatctaaatgttaatactttacaatctgtcgatcttcaggggactgaacttagcctccaacgtgtcatcacagagtccaccgacacttttttaatcaatggaacacaagtcaaattcaaagattataaacatttcttacactccatagggctgtccccatactcttctagttcccccaactcttctagttccctaggttcatatgtgttttacagtgttttacaagattctgtgactaaattggtatcgtatagtgcggaggaacggctgcggttattccgtgacgctattgggcataacactttcagtcaccgtgtgaccgagtgtgttaaactattaactgagactgaaaatgtgttagaggaggtggagacgggattttccaagttgaagcgaaagctgagtgcgttacagttggaaagtgacaggcacagtaattggaaacagctggacaccaggcggaaagtgctagagtcaaacttactccagctgaaactcaacgaaatgacacaaaaactcgaaaagtcacaccaactccatgacgaaacacgggataaaattgtactaatagagggtaaaattgtgctcatagagggtaaaattggggaaatcagcgctagtctatgtgagcctactgaggaaacgaatttacaacaactacaacagagaattggtgagtcaattgtggaattaaatgacttggagagtgagagaattaagctaacggaggtgaacgcagtgctctcgttggaactctcggagttggagtcggagctccttcgtaccggtgacaagttaacagaaaccactttacgtatgggtaatatgaacttagaattggacaacacagttaaagtcttacaagagcagctaaagtataaccagcagcagcttaaagaacatgaaatcactatgaacaggttggacaaattactccaccaatgcgctggggatatcaattctgtattgtgtgagatggagaaatgtgaatctgacaagaatattcagatgcaggagtatgagttaagtacgcaggagatggaaaggataacagaatcaaaacgtgtgaaacagcgtgagttatcagtggagctggggaaattagcaaagctaaaggtaaacttacaaagagcacaggaaacattcaagactacatcacacacaaattatcacacactaaacatactacaacagtttctacaaactcaaggtatcaaactaattaactaataccctaattgtataccccgagagggagctactttatttataccccaagagggagctaaattactatctagggagagggagctaattaactatataatcttaactatatacttagaattatatacccctagagggagctactttactatagttaattatatacccctaaggggagctaattatttatacccctagagggagctactttactatagttaattatatacccctaaggggagctaattatttatacccctagagggagctactttactatagttaattatatacccataaggggagctatcttaatctatacccctagagggagctacttagctataccttaacttaatataattctactgtagaatctgtggcatatgtgggagtgttgatagacatgatagagatcaggtcagagtacaggatagcggtggagcaagttctgggctcaaggctatttacaataattgtctccacaatggacactgccaaaaagctcatcaactacatccaacaacacaatcccacacacaacatacaaatcatctctctcgacctaattcaccctgtcaacagtgttaatggagttaataatgttaatagtgttaatggagttaataatgttaatagtgttaatggagttaataatgttaatagtgttaatggagttgaagttagtgaggatcggggggaaagagtggttaagatgttgaattgtgttgagtgtggcgaggagttgcgtggcgttttgcggatgctactgaaggattttaaccttgttccagactccaaaacggcacttaaactactatcacacaataaaaattccgttacgccaaccggggaaattgtgcctactcacctcctacacagttacttatttactcatttacttaattacttaattacataataacattagttagtttggatgataagtttgtagtattatggcaatggtatagtgactggtggatatgttaatttatcaagttcaattcttacaaattattacaagtgcgttacggggcttgctaccctcacaaatctttacttatgacttatttaccccgggactcttctaatttacttatttaccccgggactcttcttatttacttatttactccttgactcttcttatttactgatgaatgtgtagaatgaagagtatggaggaggagtacaatgctatagagtctaggattactgagttgaactcagaactggaaactattaacagggtaaacactgtagaataatattactccaggggttagaggaggccagggtgaaatattctttgaataaacaaaatctcaacaacacaacggagcagttcaactctctcaacatcactctcaataatctgaaactgtaactcttagttatttactctggaacaaccctgacaatgtgtagaaatgaggaaatgctaaggatgaagttgaacagtaacaaatccaaccaatacaaacaacaaatccaacacatcaacaataaactcacaaagtacttcttacacacactaatagtattttacacacttttacacacttttacacactttacacatttacacactaacgtgtcttatttcgacactaacgtgtctttttttacacattcttacacactaatttacctattttacacacttacacacatttacacattttacacacttcaatagaaatatatttaggagaaagagtgagaggatggatgagagtcgtatgatggagttgaggttggagagatcaggtttacaggagcttaaggaggagttggaggaaaagttagcctcgctgacactgaggaaaagtgatttatccaacaatatcctcaggaacacacaactgatcacacaatatgacacacaaatttctgatctcaaacacgctctcaaatcactccaatccacacaaaacgtaattttcacactaataacattgttttagatgacagaacaacttaactccaatcacaatgtaacaaaatacctcgataaataatagtattgttaattaggaggaggagctgatggagcgtatgaggctggagaatgagttgaagcagttacaaaaccagctaaaggaagaaaataataaaatatcctcaatcaatcattttatcaattcaattgtgtatccgttacggggcttgtactaacttagttatttattacttatttagctctctttgggtctctttttacccgaggacttagttattacttagctccctctccccttatattattagctctctctccccttatattattagctctctctccccttatattattagctctctctccccttatattattagctctctcttgggatatatagttaagtatagttaagtagctccctctaggggtatatctaagagtatgtagttaaatagctccctcttggggtatatagttagatatttcatatacttagttggatattgatatgtttagaattggtatgaatgagtataagaatgagttgggttgtgtggatgtgagtgtgagggagcagatgttgaataatttcatcactcaacgtgacgtcattctcgatcaattgtccaaaattcatcaggtactgcgttacggggcttgtactaacttagttatttattacttatttagctccctctgggtcccttttacccctgaggacttatttattacttagctccctatccccttacattattagctccctctccccttatattattagctccctctaggggtatatagtataagtatctccctctccctagatagtaagatagctccctctcggggtacatagttatttcatatacttaatattataattatgtattaagagtgtaatgtgtaggaatgtgacggtatggagtacatgagtaagatcaacgtgaaggagtacgaaaccctcaacggtatgacaactcagtttaatcattcttcagccgagtttaaactcctcgaacaacgaaaaaaccacatcctcacctccaaacaacaaattctacaatccatccacgtaatccaataaaatactatagttattttaaatagtgtaaataagtgtgtaaatattgtaaataagacacgttagtgtcgaaataagacacgttagtgtgtaagaatgtgtaaaaaatgtgtaaaataccgtaaaaagtgtgtaaaatgtgtaaaatgtgtaaaaaatgtgtaaaatactgtaaaagatgtgtaaaaatttgatcagatgttgagtcgtgacaaggatagaaatttggttgatttgttggcgaggatgaatagttatttactggagattttcaggcactttgttccaaacggatccatcaaacttgtattttaatatttttatttattcttcaggtgttaaggaattctggtatccgttacggggcttgctaccgctcacaacttactcctgggggttctagttctccctaccaggacactatctcccactaattacacatttattagttacaacttatgtattattagacacggaagagcacaccggtctggacattaaagtctcattcaacaaatcacacgaaacactcctcaatctactctcaggcaccacactacacagttcacacattactactcacttcacacataattacacatttctcacataattatttattactaaatggtatgtgtaggaggtcagaagagtgtgataacgttgacgtttgtgttgggtttgcagcgtttgaggcctacggcgttttacttactggacgaggtcgactctgctcttgacgaacattacagacataaactcgccaagttgttatcctcactcaatacacaaattattctcaccagctttaagtacgttacggagcttgctaccgatcacatagcttactcctcacaacttagctctccctgcggggataccagttcctcagttatttacttagtttactctaggagttacccgtggacctttctccgtaacggagcttggtcaaacagatccagctcccctagttacttagctccctctaggggtatatagttaaatcagctccctcttggggtatactaagatagctccctctagggttatattattagctccctctcccctatataattacctccctctaggggtatatagttaaatcagctccctcttggggtatatagttaagtagctccctctccctctacccttatattattagctccctctgggggttctcagttcctcaattacccagttacacactactacacaattactaagttacacggcgtaaatcattgttagagaggagttgctaatgccgtctgaggtgttttatgagataacaaacgaaaatggagtcagccacacaaaggaagtcacactcaacaaagccatcgaaattattcaacacgtaactcactcactattaattattataattccgtttaataatttttaggagcctttaggactaagtaattagtctcggttccacacaaatttttctaatttatttcacatggtgcaaaattttaaatttatcaatattattaaattattaatattattaatattattttttaaattataaaattaatattattttttaaattggtgaataatttttatgggactggattggtctccgccggggactgttgatatattacataacgtccatgtgagtaggaaaacacacattaaaaaaccgtttcatcatcagcagtttccctaccaatacaaaaccgaatcttactttctatacaatagtccgactcccacaaaaagttaatatttacataaattacataaattagttgaataaattattgtgtagagaatgagaagttggatcaagtgcaagaggttgatgtggaattggattccataacaccaaaaccaaccacccaaaacaccaaatcctcctcaatcaaacaaagaatttataaccatcaagtaacacaatttactcaataattcagtcaatttactcaataatttagttaatttactcaataatttagttaatttacacagaatttggtatttatttatgtagatacgtagtagttaaggctgaaaatagtacaaaattgagctaaattagccctaaaataagctctaaatacctctaaaatagtactaaataatcctaaaataagctctaaatagccctaaacaacccataaaatacccctaaataacccataaaatacccctaaataacccataaaataccgctaaattacctctaatttagctaaaacacctctaaattagtcctaaattaagcttaaattagccctaaaatagtcctaaaattagcttaaattacccttaaataaggctaaaatatgcctaaataatgcctaaataagagctaaattatccctaaaatagtactaaaatacccctaatatactctaaaacactctctaaatactcctaaaataagcttaaatttaccataaattaacccctaaataccctaaaataacccctaaataactcctaaattaaccataaattaacccctaaaatactcaaacacaataataaattagttatatttgtttgaggactttgtggaatatcgtgtcgctcgtgactactgtaagctattcaacagacccttcaacatcccgagacaagactgggcctctccttaccactttttccaacatctcattcccgcaacccagaacactcaccccagtagtgacaataccaacccaatcacccgtgatgacactggagtatacgatgacgaggtgacaaaggctataaacgatttaaactacgtggacagtgtgaagagaactgagttacttagaggagaaatcccgcagatgtttgacaggagtggactgataaagttgaggcagaagagagactgttggatttcctaccacaacttgaggaactacgcactcatgatcgactccgtcacaaagtgcccactactgcaggtacagtcacaaacatcactactgcgcggctggaacaccaccgaaccccccaaacacgttgatacacagtgtgtcacagaggaaagagatccctacggtgtgacccccgagttgatggcgaggataggtgaaatcttgaaggagcgggaggagttaccagacgtcactacattcaagtacaaaagctacggaattaacgaaaactgctccaccatcggtggtagatatcatacataaacaaatattgtcacgagttcacaaattttttcactattttacaatattataaaattaattgtatattacaaaattgattatatattaagtgtggtaagggttaaaagtggcaaagtttggaaaaacgcaaaatctcgaaataaccaaattttttaataaatttaacaattttaattatttaaataaatttaataatttaataaatttgataaattttaatttgataaattttaatttgtgagaggaatctgggagtatgcgttggtgtgcttgtggcgattgtggccaaaaacgatcaaattccgaaccttttggcaagttgacattaaaaaataaaataaaaaatttgtgagagagttgagggattgaaatttgggcgaaaagggtgagactggcctggtgtacaaagtcgtattagggcagggtttgaaaatgttaaatttgtacttttttgcggtttgaaatgtgcacgtttccaggcactaaattcacactctggacactaaattcacactcgggcactaaattcacactcgggcactaaacctacgcttaattcacactaatttcacaaaggccactcttgtgggtaagaattttctactctacggtaaactacgatctttttttccaccaactcactttttatcctttttttatttttatttttatttttattttatttcattttgttttatcttggttcattttactttattttattttgttaggtttaattttggttcacattgttttgttagggttcacattgttttgttagggtttctgcctggttttttagaattttaacgtaaacagctggcgctttggttacaaatatcacaagaagtaaatttttttaccaaactttactgtaaaataattgagaaaattggagaaatttaacaaaatttaaggaatttaacaaatttgaaattctgagaaattggcctgagaaatattgaaattaggccttagaaatcacaaatttagccttagaaatcataaaatttggccctagaaatcataaaatttggccttagaaatcacaaaattaagctaaaattaaccttagaaatcacaaaattaagctaaaattaaccttagaaatcactaaattaagctaaaattagcctttgaaatcttaattttaaccttagaaatcactaaattaagctaaaattagcctttgaaatcttaattttaaccttagaaatccttaaattaacccgagaaatattgagaaatcttcaaatttaacctttgaaaccttgtaattaacgttagaaatctgaactgtttggaattgtatgatgggagtgagtgtttgagttaataatgctgggtagatcattggagattcgtgtgggtggtaagtaccgtttgggtcgtaagatagggagtggttcgtttggtgacatatttatcgggacgcatataacgactggcgaggacgttgcgataaagttagagtcgcatcgttcgcgacatccgcaattactgtacgagtcgaagttgtataaattactggcaggaggtgtagggataccaaatattcactggtatggcatagagggcgagtataatatattaattatggacctgttaggtccatccctagaggatttatttacaatttgtaacaggaaactgagtttaaaaactgtgctaatgctggctgatcaaatgttaaacaggatagagtactgtcactccaagaacttcatacatcgtgacataaagcccgacaacttcctcattggacgcgggaaaaagatgtcaattgtgtacattatcgattttgggttggctaagaaataccgagactcgaagactgcgcagcatatctgttaccgtgagggcaagaacctcacgggcaccgcacgttacgcgagcataaacacacatttgggaattgagcagagccgtagagatgatatggaagctctaggatatgttttattatatttcatgcggggtagtttaccgtggcagggcctcaaggccacgtccaaaaaggacaaatatgacaagatcagcgaaaaaaaaatcgcaattccagttgatcttttgtgcaaacaactgccatttgaatttgtcacctttattaactatgccaggtcattgaggtttgaggacagacctgattactcgtacctcagacgcatactcaaggacctgttcttcagacaaggataccagtatgatttcatatttgactggacctttttacacacggcacagctcatgcacaccatgatgaccgaggatatggacagattcgaacgcatcaccaaggaacgagaacatgaagataccaatcccagactcgtactaaaaaataaacaataacaaatatacacatttatttattgtattgtattatgtatagtatggtatagtatagtatggtagttagtttgggagtagattgagggtttagtgttactacagtagtatattatatatatggtatataatatatggtatagtattatatgtgtctgggtttatggttttggctagtaaactaggtgtatatagagtaggttatactactgtttacagggtttaacatactatttacagcgtttaaagatagtattaaacagtattaagagtgttgtgaggtgttaagtagtagttaatactacctattaaatatactctaagatactctaactactatacatatactactatacatatactattatacatagtatatagtatattatatatagtatgtatagtgatatagatgtctgggtttatagtttcggctagtaaatcaggtgtatataacacagtataatgactttattatagattatttaagcttataataacagtgttaaggagtattaagaggtatttacactgtaattagtgttatcttagtgtatactaaactatataatacaccctagtatactcttactactatacatatacaatatatactatagtatataatatatagtatagaatagtagtggtaggtgtctgggtttacgggtactaaatcaggtgtatataacatagtaaaatgactctattatacattatttaagcttattacaacagtattaatgagtattaattgtattaagaagtgttatcctactgtaaacttaactatgtaatatgccctagtatactcctactatacaatatacaaatagtattagtatatatagtatggttaagtggtggattgtgtgttgagtttgttttgtcggtatagtttccgttgttgatttctcttttgtttgagagagaacttgaacaaatatctttcatcgtgtaatctgtacattgtgtgacttctcgagagtagttgtaactgttcagggatgggttccagataatacaattcattagcctctttctgtgcctgttctggtaactttggctttcctaatcgccagttaactgccaaactctcatccaactgcttagttaattgtatctcagcctcttttaacactctctccagagtttcctctgaacataacaataaaccaatcctaccctctaaactctttattaatatttaactatgtaactgtgtgtaaaaaagacacgttagcgtcgaaataagacacaaaaatgtgtaaaatgtgtaaaatgtgtaaaatgtgtaaagtgtgtaaaatgtgtaaagtgtgtaaaatgtgtaaaatgtgtataaatagttgtggtagggtctaaataggttagaaatgagtacaagcaccgtaacgcacctacaactttaaaaatccttttgaaaggggattgattaaagaaattatcccaggtgccaaatttactcagtactgacacgccagacttgattaatttcccggtataaaaacacttttcaaatatcccgttagcaactctgttaatactaattaccccctgatcagcgattttacggtacaattccagtccaattcggagtatttccctgttatagtgcaactgcttgtagtagtactgggggtcattatgggtatcccagtacagatgatttatgcttataatcttactatggagagtgaatggtaggactaaattagctctagaggcgtctagagatgattctttggtcctaaaactgacgtatcccgtgccgttacactggtaaggatccagctggtgaggtaaacacctgacaaaagtaacagtgccaaacttggagaaaaagcgccttagtctttcttgcaaatactccggcgtgtatcccatgggtaaattagttaactgtatggtattcgggccatacactgagatgacctctgatctacaattgtttagagtagtgaaatttacctgtcataaggcttattatacatccaatttattaattttcccctgttcacatgagatgttagaggataatgaagcagtgaaggcgaatgtctgacgtacggttttgtaaaaaaccatttcatcctactactcccatacgtactcatagtgctattttcacattaattaacaattaatggtaattatgttaaaaggggtggaatctgtggtttattgagtcaaaaactttgttagagggtggtgccattttaacgtgataaattcaggaataaaaggctaaaaatgttaaaataattaattatattaaaataataaatgtttgtcatttttttggaaaatttgttctacacattggaacataccatgacaattggattccaatgtaaaactagtaaattagtaaaaattagtggttaaaaagttgaatatattggagaaattgttgaaataagaaaatttacgagtttatttaaaattagtaaaattttgctttttacaccttcgaccaggaattttagcccagtaacatcttgtctctctctggtgatatccttccactctttatcagactcttggtacagtgtgaatgccctattggtcagtagtaccacaaggtaattaatacccttggtttccttagtccttaccagcttaccaaatacattagcaactgatttccatatttcatactcaccctccaataccttattgaacaagtaaccaaccttgtgagtatatgttacaactccattgtcatccttgtagtcacactcggtggtactttccttattctcaatgtcaagagccaccttggtaggttcagtgggtgtgggtggagcagttactgctggagcggcgactgtcttagcctcagttggttcagtggtaggtccagttgaaataatgttataagatttagttaaggcagaggtatcaccaaatgcgtatgatgggccagtaccaccagtcataccgtcgtgactacgtatcaccgatttccacccactctcgtgcttggtacacatataataatcttgttcgaaacttacaactattttacagtcctcctcgttgtagctcatgtaccttgggtagggtttaccagtttcatgtttccagacacagtttccgtcatgcgtaatcaacacacattggagatcctctagccaataatcaaagtcgtcaaactctttctcaactttacatgtgagttcccctggtttacttgagtacagtttgacaattggtggacctgctacaggagttcctttaggggtcactactgcagctttagttacaggagcttccacaggagctgatacatctgttgtatctgaacgtacccatggaacaactgtttttgtctgatctttgagatttgtgacactgaatgagtttctacggagatctaagtatacccctttaggatacccaaactcagtgtcttccgtgtgggtccacatatttttaccattattagtaatcatcacacattttacattatctctaaattcgtaaccatatctatattcaaacactatgggctcgtaatcctctctagtcagttcatgatactttgaggtaccttcatccagggagaacaacttaatcccctggaagttatgtttattctgagttatatcttgccatggttgaccctttgcaatcttctggagaagtacaaatctaccactctggagcagaattgaaagatatttttccttcttgccagagcccattaacacaactttgagcccgtggtcaatgtatgttttaccatctacggtggttactttggcttcccatatgtcaagctccgcctttacgatttttcttattttgagattaggcttgggattaaagtgcccaaatcccctcgtggccctgtactcaaatcggtcattattgctgttaatatcgatattgagaacgatagcagtagttgagacccatttgtaatctgccttgtggaagtgaattactgaccgatctttgagaaatatgttaacatttctaatcgttgactccacaccgtagattatgaccttgtccgaacacagctgatcaaagcttgacttccaaaaaacttcagctccagcgagtaacaccgtttggaataagtaaccaggctttgcggtgaatgttctcgtctcaccatcgtgatggaagtcataccaaatggtactggacgtcttactgatattaagggatattttgttagaagtcttctgccatccatcgtatgacttaccatagtgtataatctcacctgtcaccaagtatatgctcacattttcaccctttatatcagtaaacacctttgaaccatatttaatactgtcattggttgaccaaatcacagtttctgaaccacaacacgcacttccacaacaaccaccaccggacttaattaccttgttaaacactgaactacccttggcggtgtagatgttaatattcctgttatgatccacagtgtaatcgtagtcttcagtactgacattcccattgaatacttcacgagtaatactctgtagatcacaaattccaactgtaaacttgataaatatgtggtattagagcgatttagggtatggtccgatatatgctgctatatgttgtattgttctaccaatcaccttttgctcttttatatgcgatatccaacctgatcatactatttactcttatatttacctgctaatctacacattatcattatactcattagcctttccaactcacaccgtaacacagttttatcgtgttcctcatccatatcactttgtaaactagtgttatataatagattaagaaagaagagatcaaatttgaagtataatttacccccaaatgatttttccaactcacacaacctgtcatccacaaacaacctctaacacaatattcacactgtaagtaaatattaatctaactaattaaactaagtaaacaatacgttgagaattaaagttctgggatcttgattgtggtgtgtcaagtagttgaaggggaataacaaagttttattcctgtggaactgttcggcaattgtattaatttgttcgtgtgataatttagtgaatgattcaaatgatttaataattgtagtgaaatgcgtatgcgtattcagtgcacacattaacgcagaatacacactccctccctccgacacacacactcttccactataactactgtctactccatacattagtattaatgtgttaatgtatagtgtgtaagtgtgtaaattagtgtgtaagatgtgtaaaaaaagacacgttagtgtcgaaataagacacagtaatgtgtaaaaatgtgtaaaatactgtaaaaatgtgtaaaatactgtaaaaatgtgtaaaatactgtaaaaatgtgtaactgggtaagaatgtgtgtgttgttactggtaagtccgtgatccatgtaaagtataaacattgcatttaacacttttttaactctttcctccatctaaaaattattatttagttttaaaattacgtttgtaagattgagtaactggttggtgagatgttcgactgggttgttagtgtctggatcgattttaagactattgtactgtgttaggatcgccagacattgcccgaaaacgtactcaaaatcctcctcctggcccctcaacctcgtgaaattatacaataaacattcctaaattattatataagtaattttaagctaaagaggggttaaatagggactaaaattcccttttaaaacactaaagttaggcgatacaatgacatttccgagagtctcggatggtgaaatactattgaaactcccaaatccttgattaattttatgtgtgaattgtgttaactggctgggatttggcagttgtgagttcagcagaaggtaaaaaacttctaaaaaatccttcttcaggactaaatcctccacgaaatatccaccgtaacacagttctaaaacagattaaaaagttgattaattgttactctggttgagtgaggagtaaagttgtgtttcgacggagagaatcggctgatatttgtgctttccaatgaccttcccgtaacttctcaaaaatttactcaatttcactaatctacaattcattcacaataagattttatttacacaaatttaattattaaattatccacacatacacattcattttatcacatcttccaatcttccatcaaatttcaaaattgaaattatgtcaaattaatgaaaaaattattaatttaatgaaaaaattattaatttaatggaaaaattattaatttagtggaaaacgggggaataatgtgaaaaagtggtataatgttaaatctgttgataatatgtataataattgagagaatattaaatgtgttttcgtacaaattaatcaaatcttacgataaaattaatttaactttgaaaaatgaatttaaagtttattctcaaggggaaggaccagatttatcttctgatatcgttcctaatcctttataccaggctggaattaaatataacaggaaaaaatttccctacgaatcgaagaataaaaatatcttaaagaatcttggcaaatcaagaatcgactccatcctacacaatatacaatccttcgtcaactcgaaacttcacaatagaaatgataattccaccagtaattccaagggtaaaattacggatacccgagagggagatagagatggagatggagatggaaagggagagggagatggagatggagggggagggatgtgtaaggaggaatgcgtgaaaagatcagttttgtacagtaatctaaagagaattatggataaaaataactttaaacctgaaaaaatactcagaaccgatgatttcattaatggtaatttctctaatttacccctaatttaccccttaaataaggctaaaataagcttaaaatgtgtaaaattacctctaaaatacctctaatttactcctaaaataagcctagaatagtactaaaattagctaaaataatcctaaaatacgcctaaaataccataaatttacccctaaaatacccctaaattacctctaaaatacgttaattatataactatagtcaaaatgtggttgtaggaatgttgtatagaagattgggggagtctgatttggtggtgagtcagttgtgtattggcacggcaatgtacgataaccccgaactcatcgaccccgatcacgcccttgatatcatggaaaccgctctcaaactattcggaatcaatttctacgtattctccactcacttacttatttactactaagttctacagttatttactactaagtacttagttatttactactaatttagttatttagtactgaattaaacttagtaatagttaaatttgtgataggatgtgtgtgagtatgatccgtatccgtatgagcctaggagttatcttgagggtcatcacaagactgtgagatcctttattagccgcgtgggacgtgagaatttggtcctgtctggacgtatagcatcgagtaacctgggaaaatataaatcttccggacgatttctctcatgggttcgaaacaatattcgtgaaaaacctaataggtttgcgttacggtgcttgtactaactactcacttatctacccccaaagggagctatcttatatacccccaaagggagctaattaactatacccctagagggagctatcttactactttattatatacccctagagggagctactttactactttattatataccccgagagggagctatcttattatatacccctagagggagctaaattactactttattatatacccctagagggagctactttactactttattatatacccctagagggagctactttactactttattatatacccctagagggagctacttagagaagagtgacctacttccacgttatctactgttagttgtataattatgtgtagaaacgtgattgagagtgcagtggacaacctgttgatgagtttgggtacggattacttggacatattatcctttgtatttccatatcgttatgtgcctttatcacatttgggtgaggatacttactgctggtcctctgaatacacttttaataatctggaaatcccagactgttccgatgtaaccccgggattagacaatttggatgaccaaattgaagcgttaaattatttatattccaaggggaagattaaaagcgtcggactctcaaatgaaactgtttggggaatacatcgcattaaacatcatccaaacagacagtttccactctcctccatacaaactttgtacaatcttttacaccgcaatgaaacggaatcaagcggtattcctttacggtgcttgctaacgctcagttattgagttatttacctcctaccacttagttatttactccctagttatcccctcgtggattctctttttagcccctccggggctccttttacacttgctagtacttgtttaaatagtattaattaactccttacggtctttatgatgtttaggattggtggaggcgagtttgaaggagaattttaattgtccgataatagcgtatggcatcctggccggtggtattctcaccggcaaatacctcgatcccgaacggtatttcccactccactattaaattttattatttgtgtgataaatgtgtagaataaaccctatgggcgctgataaaacaagagaagttaccaatttctacgaatactcactaccagacaattgtatcaacaccatacccagttttaaccctcaattacacttaattagctttattttagtcataatttagctctatttagtcataatttagctctatttagtcataatttagctctatttagtcataatttacacttattttacttctaatttacccttaattagtgttattttggtcgtatttaggggtaatttagtcatattttaggggtatttaaggcttaaaatagttaattttgcctctaatttacacttattttacctctaaattacacttattttacactaatttagtactaatttagccttagtttagccttaattacctttattttagtcttatttaactactattttgaccttaattagccttatttaactactattttgaccttaattagccttaaattagtcatttttacccctaaattagtcaattttaccatttgttaatttgtgacttagttgagtatccggaggattatgggcatttaagttatggaccttccaattccaggtgtaatctctttccacaaacttatcacacccacaggtaatcacacatttattcttactcaattattcaccacacaactatttacttagttaatagtgattgtgtgtagaacggtgtggtgtcagcatgtgacgggagaatacataaaactcgccagaactcacggactcacactttcacaactcgcacactcatacactttctccagacctttcgtatgtccacactataccctcaaccatttaacttatcttaaccctatacattagacacctatacaatattaacctaaacaatggtaccctaatgtttaatgtgtataattgtgtagatatgtagtagtataattggtcctcgtagtattggtcagttatatgagactatatcttctttaaactaccctgtgacacctcagcttgagtcggacatccatgagatcttcttgcggtaccgtgcggtgacgatgggcggtccgcaattcctgactaagattgacgactttgaggtgccagtttcccaaaatgatatcatgaagaatggattattacccatttggagcgggggctcacactggcatatggactcaatcccctcatttgataagctataccatctccacagcttgaaggaggatttagtcaagattaagaggattttcggacttttagataaaccaaatgattccaactggcccaactacaggtgctggatcgaacgtaccaatgaacacttacctggtgcgttacggtgcttgtactcacagttatttattatttagttatttataacttagttatgtttccacggagttagccacctttatgggactctctttcccctcggaactcttagttattccttatttagtcctaacgggcgctttagtcattactcctgaactccttaattatcttacaccgctaaagtattcccctggttatactctgggattactttgttaattctgtgccaatgtgactgaatgtttaggcgagtattttgcggtgaaggagagtaagttattttcctgggacacgatgaagcttgacaatttaacactcgtcaacaaaacacccgaagaaatccaacaagacgatacctcacacttccacttctactggaaatccgggaaagtaccatacacaccataaccaattatttacacattttacactgttagccacatagttaaagggttagtgtatgagattgtaggtatatgttggacctacgagtgaggcgatatatagcttttacgaggacaaggaagcgcaatataacacaattaaacagtaatcccacccctaaacataattcttcagacgcgaagaaagctttaaacgtggactaaacctgaaacaattggtaattttttctatagtaatactatccctaactttaactctaaccctaacactaactctaaatataaagataaagataaatattgagtaatgtgtgttgtagcctgatgacatgatgatatggtctccggtggatgtggacttggtgtataaaaggttaacggagagacagattaatccgttgaatgagcaagagttggaggagttgttatataatttcatggccgaggggaaggaattaacggatgaggaaaagaaatgccaacagttcgcatactttaataaacaaattgataaactcaatcaaccacaaaccgaacaacacatcggatccctagacgactaatatactcacactcttactatattttatactatatttattatacctatagttggtactataggtattattttatgtacatagtatagtggtaagtattaggtttctgggtttaaggtagtatgttaggtgtataaataccatagtacagtattaagagggttttaagatggtgtagagtggtgatgagtttaaagtggattaggtgttaatttagtactatacatactccatatatatatataatatagtatatactatatagtatgtgtataggtatggagtaggactaaattgatgtgtttttacacagtattaaacaaaagtcctggttgtctaatactaaacgattaaaaattaaatcttaactgctaaacgggctttggtttaggcagctgcagcatgaagtgctagttcatgtacgagatggtgtgctggaagaccttcaagtgaatgaagttctggtactaaaccgtgaacaccagcaacgaatctagacattccaactacctttgcagcggcggtgccatcgaataaaaggaacacgtgaaatacacctcccaatttgtgaaggagttccaaatgtacaaacttcttatcggctgctgttggtttaccaacgaagtgcaagtccaagagcacttcgccatcagctgctttccatacttcatggtctccacagacaacttcatttaccttattatggactggtctaacccatgtgaagaaagcatcacccttcttaaatgtcttgtgaaggaaaacgctgtctggaagagcaccaaggggacaggtgctttttccggctgtagtaccttcaccgtgtttcccgtaaagggcaaatcccaattccttcaagtttaatttcccagcagcagcatcgagaccagggataaacaaagccaaaagggtaaatacaacaaacttcatcattactaactagttggtgttttagttgttatttggatgaattccaactgtgaattactattcccattcctgatggggaaaacaccacaattattcctccccattgattcctacacattcctcttcttatccacattattgttaacactgttgataaaagtatcagagtatgagtattacccatagcagtagattcttattgtgttatttattgtgtaatgtgtgcaagttagaagattctatcccggcacaggcaataagacaatattttagttagtagtagtgataagtacaaagtagagtaaatatttcgtattgtagatgtttagataggattattttagtagtattacggatataattaaggaattttatgatgaatttgttaatttgagggaacttgctaggattttttaggttaaaaagttgttttaaaggacgaattttctaataatttactaataattttaaccaaaaatatctatttttggggtaatattttgaaaatttcgctataacagctagataatagtagttaatagtactatagtacggtcctggagtacacactaaaaccgatttttacatagtttaaaataacttttagaactaaataaaggcattttgatgactaaaatgatgtttggaatgtgttagaattgtttaatttaatttccggaatagtcgaaaaattttcatttttttcaaaacccaaatgtcacttttgggtccggaccatttggccaaaattcgaaaattttaaaacttcaaaatttcaacccaaatcaacagatttaacctctcttagcaccagaaaattattataaattggaaagtaaaagtataaactgagtaactggaaggtaaactctactactaactggtgtatggagagtgtattacattatttggtatcaatggtgccatggttaatggtatcaatttcatcctctgacaagtttctaaaccacagcctgtacggagacttgtaataatcatccaataccaccactccaccactactacccactgtaccactactaactgtgttactcatattactattggtattagaggggaaggaaatcattggagtgtatttgttgagtgtggcggtggagtagaagcgtttaccaacgtcagtaaacatctttgaactttgataatttggactcattatcccattactcatcaaaaccatcaaatccgaaccacaattcaccatacttcctacggaaaatatcaattttacagttaatttacgactagtttaaggggtaaattaagaattttaagggtcaattatgactaaattaagaattttaagggtaaattatgactaaattatgaataaattaagaattttgaggggtaaatttgtgtgaaaaagggaatttttctctatctggaagtagcaaatggtactctaactactaaatattacaaaccttcttgatgtacgctttcgaagatcgtcccagtgactttagagtacactttcccgaaaatctaaacaattttaacacatcttaaactattaataattattaattattgaaatgtatttgggaatgtaattttggatacgagatcggtttcgatgatgcagaggaggtcgttgagattgacgtagtctccgggttttttgagccatttgtatattttacaccttgtgatattcctgccaagcgccggcaccttcaccacgttaaacgtgctagaatccgtaaaactactcctcgacaacgatttactcaaaactaactcagtctccccaatcccatccgctatctcagatttgtcaattttactatttgtacaatattcagagtaaaaaattttagaattttgatttatcagtttagaatttaaatttattagtttaaaatttggatttatcagtttagaatttaaatttattagtttaaaatttagatttattagtttagaatttggatttatgagtttaaaatttaattctgctaatttacacaatttatacattttaataattataaactggtgtgactgtggcacaatatgcaaaggtgtagaaaaggagttaaattagtttattgtaaatttgtttgtaaaatgagagtgttacataatttttagtgacggaattcacgtcctgaaaggaaattatcgcatgtaatttatcctacgttggagtgaaacgattctccgattctctcaactgcactgtcaattttactcttaatttcagcttttaatttatttttatcctccagggtctccagggagtccaacttctcgtaaatctgaaggaattatttaatttacacctcacttccattacagattccagctggttttttttaatcttttcaatttcctcctcgaaattctaataaaataagtaaatattttattacgtagcgtgtgaatctgattttgaagaggtattcagctctctttttatcgtcgattagtgtgttgtagagcgagttgattatgcccgagtttgcggtgatgatgctaagttcttcctttgtcctcccatagtgatggtccgggtgtagcagaaattgataatttttataccttttactcaacaaattcttatcaatctcatactcctcaactctaaaaatgagttaaaaatatgagttaaaaatatgagttaaaaatatgagttaaaaatgagtttaaaatttgagtttaaaaatatttgttttaaagatacatttggaagattttgtagatattttcgcgttttataatttcgctctccaagggccagttacacgactataaaattgtttactaaggagtgttacgcacgttacagaagaagttggtgatgttgaccgagttatcacacttaatacatttacatactgaaaagaatctcaaattataaatattccttaaaaaatacattatatattttttatctttcccaattcctaaatctcaggatttattttttccaattttccaatattcccgaattttccaattttcccgaattttccaattttcccgaattttccaaattttcaaatttttccaatattttcaaattttgatcaattttgtcattatttcccaaaatttcttcatttcccaaaatttcttcatttcccaaattttctaattttcccaaaatttcttcatttcccgcgttttcaccaattttatcgtttacggaattgggaaatagttgaaaaacgggtgacctgagcttctaaagaattattaaggtaaatattcctacgtcattgtgttgcatgaggagtttgtcattgtctgacaagagctcgttgatgagccaatctggaatcatactttcaatgtcatcccttaactgataacacgcctccggaacccattccggcacccttcccatctctctaatcacacaattaactattttaccgtaaacagtaatttaacttatttatctatttaccactgtaataactgtgttataactgtgttaaaactgagttaaaactgagttaaaactgagttaattaggctttagggcggattaccgttctttgggaggaatattatcgaaagcttgtgtgatggagtgtacgaggtgtttgaagaatttccagtctgacctgggcatagtcgccagaatgaactctatcatgtgcctcctcacctttggcacattctggtacactatgttcgttatcaaatacgcctcctacacattactcagctttttttacacagtcaacagttaatttactctccaatttacactacgggagtacaataactacgggagtaagcgatgtggatacgtattcgatatcggttagtatgatggatttgacggcgatttcgatgattgtgaggattgacagccaggggttcttctcaggtcctcccatgtcctcaggactacacatcaatcaaccaatttattagttaaccaatttattagtacaatgtgaatataagtaattaagagtgaataagagtgaataagagtgaataagagtgaataagagtgaataagagtgaataagagtgaataagagtgaataagagtgaataagagtagactggttggatacttgagagattgtagttctttattgattaaaagcttgagatatgttaaaaagttttcgtcatacaactgcttattctccagcacctgtcacactattaactagtgtaatcattaactactgtaattaagtgtgtaaaaatgtgtaaaatagtgtgtaaatgtgtaaaaaagacacgttagtgtgtaaataagacacagtaatgtgtaaaatgtgtgtaagaatgtgtaaaatactataaaatgtgtgtaagaatgtgtaaaatactataaaatgtgtgtaaaatgtgtaagaatgagtaaatctagttgaaaatacgagttgattgagattatcgaagttgttgattgcccattgtatgatttggttaattttagcgagttggaactgttcgtcttggcgtgtgagttcttcagcttgtttcaccagtgatagcacgtgctgattcaggtaagttagacgctctcgctcagactcgtttctcacaccaactgtcatcaagtaactcctcatcaacgtcggataatcctcgccaatcaataaatccctaatccaatcaatacactcactgtagtatactattctcatataaataagattatataataaagtagctccctctcggggtataattctaggtatatagtaaagtagctccctctcggggtataattctaggtatatagtaaagtagctccctctcggggtataattctaggtatatagtaaagtagctccctctaggggtatataattaaggtatagtaaattagctccctctaggggtatataactaagtatataattagttagctccctcttggggtatataactaagtatataattaattagctccctctaggggtataaagtaagtacatatttatatgtgtgagttggtttacttgtaattattgcaaatggtggagaagagttcgggtgtcgcattgaataactcattcagtaatatctccaatcttcctctctaatccattattaacaatagctaacagtaatattgtgaattgtgtgtatagtgggttacatttttgagccatcggtttttaagtttggtttgttgtgatttggtgattgagtggtatttccgaactagtaaagagccttccctattctccggattattcattatcgcattaaacgggtcctccaacttttctaacaatattaactcagttataactggagtaaagtacctatgatcgtgggctgtgctggtgtgacatcggggtaggaggtatttctttctctcagttcctccatctctctctcaactctcttctcacactcactacagaaatttatagcttaacattcgtaaattagttagagggtgattagttagagggtaattagttagagggtaattagttagtagggtgattagataaatagggtataaataggggtgagtacaagcaccgtaacggagatacctaaaaagcagatccatttgtgaatttgtcagattaaggttcttttttaaattgttaattatactcttcatctgctctttcggctcctttctactctccctctccaccgtatcatacaactccatcaaactacccctcaactccgcaccatcagattcattctcaacagttttatcactcttaacaattgtatcactgttaactaagttattactgttaacttgtgtatcactcttaagttgcgtattagattgtgtattagagtgtgtattagagtgtgtgatattgtgttgaataaagtgttgaatggatttgtggtagttgatgtattgattaatgttgtctggtgagagtatggcgttggcgctggcgtagtcaaacccgtcggcgttcccttcactaaacgcaaaatatcaatttaaacttacgaaattgttagaaatttattaatgtcaagttcaaacgcgtttattaacgagtttaaagatgtgattaacttggccttcaactcagcacccaaaccgccactcaatatctcagttgtaggaccattcacaaatattatctcagatcccacatcccgatcaaccttagccatattgtcagtagtattatccacagtattatccgtagtattctcagtattatactcagtaatatttggagatatacagtgggaattcaggggaataccctgggtattaagagatctaggattatctattggtttaataataatgttgatataatcattggagtttaactgtgtaaaaagaagtttgggtgtgtgattatctttttggtaagtgaattcgatttcagttttcggtttcccaaacggtaccaaatggtcagcgtatcttcccacccactcctcaaacaattctcccaacttcacactatttatagtcttaaaatatctcctgtcatatatctcaccactttttatactatcacacatgagtaaaacaggatcataccttttaggtgaactgtcaacactgtcatccgtgtattgtttaagcttagttgattcatttgagagaacgccgtaccagcagtgattgaagtcatgtttcttttttaacgttatctgcagttgtaagagtttgtcttttcgctccaatgtccaatacgagtcctcaacctctatcctaccctatcactctattatcctagttatataatattattagtatagtatctatgtagttaattagctccctctaggggtattagttaattagctccctctaggggtattagttaagtagctccctctaggggtatataattaagggtataattaaggtatagtatagtaaagaagtagtttggtagtgattactttggtttgcccgttaatgagaacatttccggtggaattattgaatattttaatggagttggggttcaagtccacagtaagttcactagacttggtctcatccttaagctctgatgttacatacacaaagtcatccgtctcctcccatgaatatttatccgttactccccaacctacaaacattaatcgacaccttaaggagtaaaattgagtaaattctgtaaatttagaataaataggagaattctgtaaatttaggtaatataggaaaattgcgtaaatatgggtaaaaatgggtaaataaatgcctgcgaagagtggaagtatatttttatggaagattttaaggttaatgaatgagagttggtttaaggagttgggattactccttccggggatcaaaattgcgaaacaaacattaatatacagaaaattaacaattattaacaagttaaaaagtttcctgggtaaaaatttgggaaatttagaattacacaaaaaaatcatttaaactcaggattccagccaaattccatcctgacacattttcattatattatacacaatttatactatacaaatttggctaatttagaaatataatttattatattaatattataccaagctaaccgtacccctacacattataataataacaacattaataattatttctacacattttataaatttgattatatttttaaatatttactaattttaataatgttgatttttttaatttttgaagttataaatattttttttataaattttatttttggctctgatgtcgaaaatcaagttaagattcccgacgcgctaactcccgaacaatacagtacacattcttacacacactaatagtattttacacactcttacacacttttacacgttttacacacttttacacgttttacacacttttacacgttttacacacttttacacgttttacacgttttacacacttttagttagtttacacatttttacacattttacacacttacacattttacacacttacacattttacacacttacacattcttacacactaatttcagtattttacacacttacacatttgtacacacttacacattcttacacattttacacattagtatactaagttacacattagtatgctgggtagataatgtgtttagagagggttgatggattattgactaagcaagattatataaattatgaattaaaagaccaactaaaaacgcttgggaaattaaatcatattctctcgggtaatttaatattttattttatcattaggttccaacctgggcacaggtaattcggctgagaaattaaggtaaattataccaattaacacttttcagatatcaatcactcatcaatgatgactctctcattttcaaccgtatcaccctttatacttgtttacacctaattatactcatttactaattatactcatttactaattatacttgtttactcatgataatactaatttactaatgattatactgagtgaagtattagagagtacggtgtctggtatggaagcgcctgtgatatatcttgagcctccattagtattaccaaaggagcaaattaaggtaatttttaccaaattagcagtttctagacggatgaggaggtggaaaagttcctaaaagcctcaggacttgaaaatatcaccaaagatatgtccaataatcctttcaacgtattcatactattattatataatacccgtagatattaacaattgatgaggcgaagacatcggaaagggctgtgaaatcgagaattactaagctaaaatctaagcgtgaggaactgtttgaaaagtaagtttaagccgtaaatcacccttaggatgaggaaaatgtcactggaaagtactggtgcggggacgtacgaagagttcagcaatctcaaccagagtaatttttacactatcaaaaattctcaggggttaagaaacttgataatattttaaaggcggaaattgaaaaactgacacaagtcgaactcgtcaaaaaagcactcatcaacgtaatatacatccaattatctaaaatcttaaaattatctaaaatcttctaaaatcttctagaatcttctaaaattatgtaaaatcatctcaaattgtataaattgagtttatagaagagagggcctgggagtgatgtggaagagcgggaaatggaccttgaggagaaggaagaagaaatggaacatgaccaacaaaatgccgaacaaaatgaaaacaacgacgaaaatgaaaataacgaagaaaataatgaagaagatgtggaagatgaggaagaataaaataaatatattaatgatatagtgtgtgtctcatgataaaagtttacacatttagaataatttaatttaaattcataatttagttggtaaaaattaagtaattaatggtaaatactgttggaggtgagaatctgagtggttcatatgtaccggcggaatctttggcggagttggagaaggaactggaagatcgattaaaaaacgacgtaaaagaatcatttagggacggaaaatatgacaattgtgacaaatggccttttcaacttaatattcctcgatttaactccctgttcaatccttcaagttattcgtctaatcttgattcttctacggtattacacaatgagtttgccagtataattaagcagttgaaagcgcttgacatgattaatcgcatttccttccggatttatccacttttacggaaaattctaattgttactgaagggttcgtttgtttttcccttaaacaaattcgttttggagaggtaaaattagtttctgaaatcctcgaaaatgactcgctctccagtactctcgactctttctacagtgacaacgacttaatactgagaaaatcagaaatattaacaaagttaagctttgatcagttctctgttgaaagtgtcatggaggcgtttgaggtcatatcttctcttttgtgccagagcattaatttgaataatgctcaggacagtgagttactaatgaatttcatcttgtttaacaatttgcaaagagttttctcaacctttttactgtacacaacttttatattttgtaacggtgtggaggatagtatcaattttgaccttgagcggataataaaactaagcagtttaatcctgggaaacggcgaactcctgagtaaaaacaacgtcgaaaactggctcaacgtgttttttctcccgatttatgacattttatccatttccttctcacttttcacatttgacgaagaagcttctttgttttattctctaatggactctattaacactttggaagtgtttatttcactggatttaggacgattattagataacttatccaattatctaaggctttacacgttaaatttgaagaaattcagcgaaatcgccaatgaacaatttcaatcccgttataaccaactgggaaactctgttaatacgcctgtaaatagtcaaaatccgctcatttccagtagccaaactccacttatagtgagtacccaaactccacttatagtgagtagtcagaattcatttatagttagtaaaactcccgtaatatgtaacactcaaagtgtattgagtagccaaacacttcttgttcctagtagtcagaacggtgtaaaactgagtagtcagagttccagtcccagggaatctaatcactcacaaaaaagtgaccttaaaaattgcataactcaatactctaaactgtataacataatctcatcgttgactgggaagctgagtaagttaccgaagataactcacggtaccggcgagttataccgtttcatggataacgtaactgagattatcatgtataacgtgaagctaattgtagtctcagacgctttagagtatataaccaggaagaagccgaacatcgagttgaccggtttcttaaaggaaacgctggtaaaatcctgggaactctcagtctcaatcttcaacagtcttccatttagcattatcaacgcgcttttttattatattggaagttcctttaataataagaatttattggcccaggtatacctctacaataccatagaatttaaaaggctaaacctgcaagagtttaataagtacattaaaatgctgcatcacatactgaaaaactccgaggatctcttcatgtctccggtgacatttgacaaggtaatttctgcacttaacttatgttacagaatttgcgaggtttcaagacgaaatatttaacagttaaattctccacagtatgtcaactgttattgcatgaacttaataaacacagcactaacaccgaggggtaaggctatagtattaattttaagcttaggattttgtatatgttcgtcagctggtgctactcaaccaatcctttccaccaagttctctccattaaaatttgctcattcatttccaagtattttttatcaccattttatcaattactttattttttctttttatactttctgtactacagtatggtgtaggatactggagataaatgcaaagtatatggacatgtgtagatatattatggatattattctaggcctttgcttcttcacacattttgattccttaccacagaatactcattccactagacacagtcacaccagtgatcatagttcaagtgatgacaatgctgaggattgtggtgagttggaacacgcgtttactaatttgggtcaagtaaatttctatcaaatgtgttcatttagtaagctgcggatactgtcaaattcacccttaatgccctggttaatagagcatgtagcactaccttatacgtgtgcctttgttaattccctaaagtcactaatcaaaggcttacataaaccaaattgcaactgcataatctgccactacaactgtttcttcaccaaaacacataaatccaccctaaaacacaatcactcactggagaataaccttgtgactgtaaatccagaagaaactcaagtgttggatgagatggagggtgaagaatctgaccctgtgtgtccctgtgtgaacagtgtgataattaataaaataccgtcaataaatcattatttggagttggtgatatcaatttcaagtaactggcctttgaagcatcaaaagttagaccagctccagtccataaccaacaccttaaacaaagtgctaacgcagctggtgaatttactagtaaatttaaagggaaaaggcgatgttgacttgaaaatttcactttttacaatctcaatcaagttaaccaaggccattagcaacaccaaggacttcaaactcaataataccaacctaccgtcactcatcaaattatcctccattctcgggtatttttaccctaaccagtgttaattgttatttttacccttattttaggtgtatttaggtgttattttagccgtaaattagctatatctagatgttattctagccttaaatttccttattttatctctatttagtcgtattttagccttaaatggtattattttacccctaaaattagtaatatttaacgtttaattggtataaaacaatggtaaatataggtatcaggagatatgtaagggtaatactgcttgttatatgaagttgttgatggagatatttggaatattacacaacatcttatgcaaggacaggaatgaacaattgttcgaattacacaagggactctacaactcacttgtgggcaaaattgaaaagttcccactcacactcactaagcttggtaatcactacactatttacactaacgactaactatggtgtagagttttataagagtacgaatgtggacctgttgaggacgtatgagacgaatataaaatcaataatagaggcgacaaaggggataaattcccagaccctgagggtaatttacaactaccgcacctggaaattcatcatacaaaataacctcaaaactgaactattatccaatctatccagtcaaacccactataattcagtaaataattcggtgaacaatttggtgaacggagtgaatgtgacggaaaagagtttggagaaggtgttggatgagatgattgagaacggcccagtgaggcgggacggtatggaatacacaatgctaatcaatttgctatacataaaatccatacaaatcaaagaattaccaaacgaagaaaaatcacaagaacttaccattctataatctaactcattattttaattattttaacctaatttattattttaacctaatttattatcaattaatttaatatattataaatttattattttaatatattataatattttaatggattgtttgatgtgattgaatgtgtagatgaagtgtggtgtgattatggaagataaaaagtataaagtttgggatgtgattcatatgtgagatgtattgtaaaattaaaagtataattaacaaaattataaaatgagttgtagaatattgaaagttgtccgttttaatcgcataacatgtttttttattccactaaaattttaaatttcatcctcgcaatcttctacacatttatcgcagatacataccaatgccacggaatccgactgggaactataccaactccaggcattaggataacaagtcccttggctaggataacaagtccaggcattaggatgggcaaaatcatgttcataaacaaaggatgtataaagccgtatagcataaatataactagtaatttcctggttaaatcgagtaaagttgatgaaatcttggagaatctgaagactttgacgctcttggagacgtctgagctggtgaggaaaatcgaggaggtttttggcgtttcagcgcagcctgtgggaccacttacgctacagccgcagtctactgcgccaactgaagagtaccaggacgaggaaccagacgacacgaaggaacgtgagcgtgacaagaagaggaagctgaacgttgtgatcaaggaaattctaaaggaaaagagaatcaacgcgtataacaaaatcaaggaatactacccgaacaagtccgcaacggaaatcaagaagattatggacgcactcccgcacgtcgtcaagaccgtcacctcccgaagggaaggcgaggaaatcatacaaaaactcagcatcgaaggcatgaccgtcgatttcgaataaacacaagaaataatttgtttctcacaattttctcactcttattttctcactcttatttctcaagcttatttattgagtttattttcttaagcttatttattgagtttattttcttatttatttcttggggatttaatacacattttattttttacactttttatatttttacacatttattttatattttacccttttttgatgtaatatttttttaattttataaattttaaactaaaatttaaattgtgcggaataatttgaaaatgtgcaaaaattctaaaatatataaattctaaaatatataaattataaaatatataaattgtaaaatatataaattgtaaaatatataaattgtaaattatgtaatttgtggaaaatgtgataaatgagtttgtcatctgaaacgcagtatttttttgacttgacagacaggcagtggtgggttttgggtccgtcaagcgatgactgggaggagctctcaaatgaggaagcctacaaacttggcctttttaaagctgttttaactcaaaattgtaactttattgacgctgatattgagcaatacaattcagttacttctcaactgattaaggatttggagactaaattttcactcaatgactcttctgaaggcgcgaaattagttgaaaataagtcaaattccgccgttaccaaagtcttgtctaaagacttctcaaatcttgaacctcaaaatttggcacacaattccaaatcagacccaaatctcaacaagtcaaaacaaaatatcacgaattcagaacaaaatatcacgaattcagaccagaataacaataatttggaccagaatctcaccaattcagaccagaatatcaataatttggatcaaaaagtggctgagggatctaagttattgagtcaaataaataacttaatagcgagcacgtcagaaatgaagcagaagtgtgaggccagagagatgagtggcagaagtactccaaatttaagaagcacagcaaggcatttgacatatgtaaacaacggcggacttgctggttgccttaagaccgtggcggaggagaggaagaaaatgggccaatctaagaaatcagcacagaaaacccagaatccacagcttcaagaaatgattcaaagagccaaagcaatggccgcaaaaacgatggacgatgccaaggattccgaagccatgaaatctgataaaaatcaacccaaaaaaccactcagaaccagaggcaaaaaatacacaactgtctttggtaccacttacacaattattacacaattattacacaattattacacaattattacacaattattacacaattatactacagtatttacacattattacacaataatattacattatttacatattgctaaataattgtggataaagttgtatttttaggagcgaacgcgatgaaggatttgagtcagaaattgccggatgtgacatttgaaggttcatcagatgaggaatcagattcttaaaattacaaatgtgtaaaccttttcaatatctaagataaatagggtagatgtaagattctgaataaatgtataaaattccgtcaattccaactcttgatcaatgttaaaattaatgttattttaaaaaatttaaacttaaaatttactaataattatacatgctactgtatgataaatgtatgaaagttgttaggaagatattttgccgaaactacccccacccgaaaatggcagatttccataatttatcgtttcggttaatttttaaccagttggaaaaattttaatctctttttaatattagtttttgttactgttagcttccgctgtactctgtaatttgattttaacgtacaggcaaatgattttttagcataatcgccccttttcttaaagcccaccagtttaaactaccatggctaaacctgcttataaggatctcgggatttccagtaaggaatacgaagaagcgctccttctcgaaagactcttcagactcgtcaaaaaaaacccctgctctacatgcctcttaaaagtattttcgcacaaattacttattcaatttattcaattattttatttaacttatttaatttgttcaattattttatttaacttatttaatttgttcaattattttatttaacttatttaatttgttcaattattttatttaacttatttaatttgttcaattattttatttaacttatttaattatttgtttaattatttgttcaatcatttgttcaatcatttgttcaatcatttattcaatcatttattcaatcatttattcaatcatttattcaatcatttattcaatcatttattcaatcatttaattaattaatttattcaatcatttaattaattaatttatttaattattttaattattttgctgatgaataaatttatgatatttttttagaaaccgacccatgttgatcttgatcgttatgacttgttatgtacggcttgttcgaagcgttgttcttcgaaggttcagattggaaagggtttgatatcaatgtcagatttggagcgtttggagtcgatatacgacaaatcaaagaagaagaaagaaagttcaaagcacaagaaacacggccataagtctcgcagctcctcagtttcctctagagaggataagaaatatcactcgccagaggattcacatcgtcctcataagtcaaaaaactctaaacgccgtgaaagcactttggtcccaccttcagaatatccacaaactccagactattatccagaacctttcgataaacgttacccagatccttatgataaaagattcccagaaccgtttgataaacgttactcagatccatatgataaacgttaccccgatccgtatgataaaatattccccgatccgtatatgcaccaagaatcatttgaaaggtctccaaagggtcacagggataagagtagagaaaggtcaaaaggtaagcataggagttcttattctaaagattattaccctagggattatccaagatcacatttccctgagtcgtataaccagtatccagaacagtttaatgatcaataccagtatccggacccatatcagccgaattatggtaaaatgaagcgaaaccagacggcgtatgagtatacaaatatgtcaagaaatgtgccaggaatggtcggaatactcgcaagccaacgcccctcagacatggtcgtcagaaatcaattcgccctccctcccccaaaacatgaatcaaaacattccaaatactccaaacaccactataatgataattatgataataaatttaaagaatatgactcaaagtatagagatgactcaagatataaagaagatacaaagtatagagaagataccaaatatagagatgacatgagatatagagaagacgggagatatagagaatttgatagaagatatagaaagtatgacgatgtggaatttggtacggagcgaaatttgagatcgaaatcgttggcgttgactaacgggtttcaggcgtttaaatcattgcctttgtcaatgtcaccttttccaagggatgaaattgccagtaataaccccttcgcaaagcggactttacctccttcaggccaggccttccacttctccagcatgagagatgctctgaacccgccaccaacacactccagattcccagaaccgctaaaaccagcccatgatttcaatttaaataaactcggaaacccaaacttcccagattccaaccattttaatcgttactaatccaatacactataattttttaacctaccacttttcattactagtatatattcaataatatcaatttaaaataattatattaatttgaaataattatgtcaatttaaaataattatattaatttaaaataataattgtgtaaaatataaatttatgagtgaaaaatgaggatttggtgagtaaattcggttggtggatgaatgatgagaaataatgtcattatgcggagtatcacagttatttagtgatgagcataacgagtgtccagcggaatgcccgttttgggctccaagttccgtctggaagtacattggagtgtgttctgaaggcgaagtgtgcagaagctttaacccgatcctgaattacgctgattccttcaacaacgtatgcctaccttgtaaagtattcggatgtgtgtcatgtaaatactcaaatgaccttgactcagtggttccagtgaccgacagtcttaagaagcttccagattactgtatagaatgtgctaagggatatacgcgttcagaggatggaacttcttgttacattgtcggctcaaatctgtggtcgaaactgttctattttatcattttttgccttcttgtctccgtcgcagttgtgactttaagggtcctggttaaccgtgacaagttcagagctaactttaagaacctggtaaacgccttaaagaaccagcaaagacaacttttgagagacttcaatgattcggagaacagattatataaactttttactgatatgactaaccaaaatctctcaggtttagggctaattttatactttaggagtctgggatttttggtaattgtaatgtcacttctcttctttgtaagcttagcacacgtacatattccttgttctaacatgataaggctttttaaggatccttttagagtttactactttaccaaggcaaaacacgtccctcgcagttttatcgcaaacttcttcgccaaaaacgcaaataaacttgtcgacgatatttttaactttaagagcgtggatgaggcgattaactggaatgttacgcagtactcaattgagatttcaggtgtaatgtatgttttatacgtctcagtcatggtcatgactgtggtttacttcgtctcacagcgcagagcaattttgaaattcatgagcaaatcttcgaaaatgagagacctgacccttgtaataaagaaccttccaggcacactcacagacgaggaacaaattaaagatattatatacaactccacaaatatccggccagtcatggcaacagtctgctatgacctgaaacgagaaaaaaaacttgtttcaacccttaatcaaaccatcgaagacttcaaccactccaatcaaacccacgattcttacgtttgttcccaataacctaccttatattatttacatattaccattagtttacatattattaccattagtttacatattattaccattagtttacatattattaccattagtttacatattattaccattaatttacatattattaccattaattcaaatattattaccattaatttaaatattattactatttgggttcaagatggtttagataagtttggatggtatggaggatatgaatgagttttttagtaatttggagagttccggtgagtgttttttgacatttgagagtacgttagactgtaggtcagttttagaaaggttccgaagtagcgagtttgagctgtaccagtgtgaggtggagcctgagaacatcgtgtgggaaaacataggctacgaaaaccaagttaatagaaaagtgtttggcatctcaatggtgacaatcgcgattctgatgggttacatagtgttattttttgtaccgtatgctttttacactatcacctcacctatgacgcatattctggaaattatactcctgggtctgtttgtggattttgggaatactctcatctcagtgattctgaggaacctgattgacaaggctgggatcataaacaaggacgtggttgacagttacctgatgttctgcaactacttcattcggctgattaacctggtgcttaacgttgttttatcgcatttcattaactatggaggtcgaagtaaggcgctttcatttctggaacgtaaagctcatctgatatctcctacctttagggtgggcgaggaagtatcatttgggctgagttttagcatttacattgtcaacgttttattactgatcccaaacgttatttttctttttgtacattatttgattcccattttcagctcattccttgttttaacacttgatttcgactccaaacgcgcaacgaaattgatggaatactcgacttttaacatctccagctactactcagacgacatgtcaaatatcaccttctgcctcttactgttctttctcataaaggaccagaaacaaggctcactggtcttttttgcaatactcttctcttatatcctcaactatgcaaagtcacagttcattttactgagacgcagttccaggaaattatattccacctggcgactatcatattttacctacatcatgtgggtgtttcccaccttaattctggctgtttgtcccaggtactgggactggcgaggcggggaaggttctcttttctcgattttcacaaacgcagtactccacatcgcaatctacacctttattctccacctggtgtttggcaaaactccaaccctcgactctgaaatcactctctcggaagtgctcgagggcaacctcaacggatttgaaatggaactcgactacaaagcacacaacccagtctacaaatttaaaaagttctcatctcaatataatttactctaatatcataaaaggcctttcatccatataattatttaattccctatttttaacataatttaactatacaaaagtataaatatgtaaactatataaatgtgtaaactatataaatgagtagaatgtgttattgaaatttatttttatctttatggtctttgattagttttaaaatggcgttttgttcagaggaggaaaattcatcaaggcgttttaccgactcaatttcctgcgtgtcgatggtttcgtgacccttgataacgcagtcccaccaaagctcttcagatttctcaatacttagcaaaattctaaacccgtcctcaatactccaaacactgtcaaagctgttgacacttttacagaactctccgtcaatgaacacctggcctgagaaaaatgaaaacttaaaagttaccttgaatttttacagtcagactgtccttagtgatggtgataaaaacgtccttgggggtgattttccttggagataaaatctcaacagttacctccttgaacgtctgagaccaggcgtatttctcagtaaccgcaccattccaagtattaacagtatattttaactcagatttctcagagtttaggttatcagagtttaggttttcagaatcatctgtaggcttgggattatctgaagaataggattttccagttgaatcatttgtaggcttgggcttatctgaagaattagatttttgagaggattcacttctagggcttgaagggagtaaataaggctgattagctcttcgatacagtagaatattatcctcaataatcttgttaaccaggtcccgcatctgatttggcataaatcctctagagttaactgagttatcaagattaaactgcttcaactgttcaggggttaaaatggtgtggcaaaaatcagtacgtttccggagaaaggagaagaacttctccaagacgtcctctatacccctacactccttcaaagccataaacataaactcgtcaaagttggccgtcattctgataaatctgttctacaagtttagagtaagctctgctgcagaaatgctctcggaaactatgttctttactctcctaatgtactcagttctgttctcctggtaaagcgttgcagcctcgttattagcggggcttttattgttagggtcagttaaaagtgactgagactaatgaataaaatatgaaatacctggatggatattaaaattccatgaacatcaaacacgggactccactcgttttggagtatatctaggcaaatacttccgtcttggtatactgataacatatttacttaacttatcttaccgtttggatgaaaaattctagttaaaaatttgactactggcggcttattaggataatcttgcgggaaagtcagagaaagtgaaaaaatgccttaaacaattattaaaaatttgaaaaatacctccttcccactcagtgttatcagggcctagaattacagcttgccagtggaaaatgtcactatccactggactggcacatatagtttctggtaaatcctcttgtaattttctcaaatctaacattaaccttttagtctaaaggaaaaatcaacttatgcattatttagttggaaaaattagtaaatttagcaaattccatataaattatgtataaaaataaacataccgcatctctagccataagtttaaattaaaaaataccaatttaaaattttttaaaaatttatttttaagggtaaactggtcagattcactaacactccaaccagtcgatattttccatggagaaccaaggtgagatttctccaagtgagaaggaggctctggccaaggagttccgcgatttggaggagattcggaccagagaagccaaatctcgcgccgtggttttggagattttaggcgatattccagatgctgatattacacctcccaagaatgtgttatttgtttgcaaattaaaccccgttactgaagagaaggacttaaaaattatcttttcaaggttagaatcttaatttttatttttttcagatttggaaatgtcaagagctgtgacattatcaaggattacgtcaccggcgactcccttcagtatgctttcatcgagtttgaaactgaggaatcgtgcaatgaagcctattttaagatgcagaatgtcctaattgatgacagaaggttagttttaccctaaatttacacttttagaatccatgttgatttctgtcagtcagtttctggcttttggaaacgtttctacaacagagaaacattcacacgaaataaacgccacaattctgacaaaaattaccccaaagatcgcaaaaattatcacaaaagttatcaaaataatgaaaaaagttatcaaaataatgaaaaaagttatcgaaataatgaaaaaagttatcgaaaaagttataaaaggtatggaaatcactataacagggacagaagtcctgaacatcgccactctcggcggagatcacgttctcgttccagagaaagacatcgcaaacgcagtaggagtagagataggcacagaactgaaaggcaccgcacccgtagtaggagtagagataggcacagaagccgtcgtcatagctagtcaatgtaaaatatttagaaattaatgtttaatttattatctcttgttaagttttgcatagaatctattatcttctgatcggtttctgagaatttatattccatgcccttggctcttgaaaccatcgacatgagttccttcaaaacatctttatccacttgttttcgctcaatatcttcaaattctctcggctttcttaatggtctttgcattgagtaccttagactgtgtggtacatgtgcccttgaaccgtccatcttcacttcataatacatgttatggtgaaggtttatacactctctgctcttatcaaacgtgacaggtcttttccaacccctgaaatccacgtcatacagttgaggaccctccaataaactctgcacgtgatctgctccttgcacatagtacatattccagtatgcataaaacctcaacaactgggctggaacgtaatccaactccatgcacttctctattacctcgaaaactctctttggttcaacgtccgtcacttctataagattacacactctcttacacagaatatcaagtaactcatcagcctaataaattaaccatgttgtttaatatcatttatacaataatttaacataattatatagtagtttagtgatagatttgtaaaattacgttggtgaagtgtgaaatgatcaatgcatccagaatcgacatgatgtcctgaatattgtaattaaatgttttaaactaactttcattgataaaatgtgcttaaaaattgtaatcatcttgtaaaaagtctcccaattctaaaattaccagttattaatcaaatattacataatattgatattcactaaccttttgaactattacattgttttttgaagagtaatataggacttgtgctactgtggctattggatattccaaaaactctccctgcaaacctagtctagttaagagattaaagtataaaggtttattagacaaatcttcaaaaatctcacggagttgaatacggcttaggtagggcgaaaactcatcagtaacagcacacgcatcaaccagatcttcaggtggaggacttttaagtaggcaaaagtactttatcatggtacaaaagaataaggagtccggatctaatctaccgctctttacaccttcagtgaaggctctcaagactttcaatattcttcctgattccatatcgtacttgttcctcatcaaggtgctcttggttctggcaattactctactctgaaattcttctgcctcattaaatgtttccaggactgaaattgaggctattgagtttaattcaaagtcgtcacttgtcagcactttagtcacttcgtcaaccaggtacatgtactcagtcaggcctgaaagttgtaaacaactcaccaagggaaatatttgtgactttcttttttcaaaagatgaaatatttggattttccatttttttatcaacttttaaatttactgtttgatatgagtttgtaaaatctctaccaaaatcaactatcgagtccctgtacagctgaacaaaagtcttcataagcttaggcgtaactacgcttttgtaattacttatcaacgataaaaaatccaaagcatccggcaactccatccattgatctttgttaacgaggccaaatttcaacttttcgtgaacaaattcaacgattttagctaaaaaagatgtaaacacactttctggaagagttgtcaggtatgaaatgttcctaactatgtttaccaaatgttttccctgtatatcatttagtcttttaagtgttatcagaagagccaaatctaggatattttctacaccgcttgttatgttccactggatcagaacgtccgttagtgatgacagaaaagtgccatctatctggcagaatgaactttggttcaaattgtttacctcgatgtcggatattccatattctaatctttgcatttcaagtgttaaacctttctccaatgtgtctagaatcgtctttatcctttggtctgtaaaaatatcactcgtgtagtacctggccaagggataacatttcgccagcgccattaaacaacataccatatttactctatgataactattctttttccctgttattttatcattcagagccatcaaatcatcctgatttcccattgtaaggtgaaattctggatcaggaggtggttttgggaatccatcagggcacagatcaggaaaataaatcttgtaaaaatgatcctccagatcaggaatcttctcaagttctttaacctctattggataacttatatcaaagtactttaagatatcatacaaaaaagtggcattcttgaactcctcaaaaagacgttcgtctgccctcagtatcaggaaatagtgcaaatattcttttaaaaaggcgtttattttatcctctggtattgattctttacttttgaatccaacttttagggttttcaggttaactttgtagttgactccaattggaggaattgtggacttaaggttcctcagctttatatactcttcccatggattatatggattaaggaggttcaaaattcgttcctggttatatgtatctgcgtttaaaaagtcatttttgaaatcttcgtaataatttccaaattgaatgttcttatatctgaaatcatcaggagaaacggtttccttcaaaccatcttgacttacgggagcaactttggggtttcgttttcttgacctgtcacttatattgtttaatatatcgtccattttagccttaaaattagcttctctaactgattttaggagtttgtttatcttcttttcatgttgtaatgaatttgttgtaattatatcctcaggctttaaatcttttttttccaattttcctgaataaagtccaattgaatgagttgtttgtacttgggataaaggcgttcttccccaaaacttatatgcatttgggtcacctacaacctcgtccggtgttccttcaattggatatctgaacccacaagaatcatgtttagctttagtctccaagtttacatccactgggtctggaataggaggtattttctccttatcttcaagctttctttgcaatttttttctgagtctattcatgtatttaatccactctttttcttgcaggtcatctccaaaagtttgtgttctaaatgctttcataacttcatgtgatgtcaaattcaactctgggtcatacgtagattccttaaaatttttttgaatgaaggagtacaaatctttatctgatttttctttggactttgaaagtttttctatatccgacattagagtctcatattctgaaactttatcgtccattttgtccttatctctaaagctccactgcgtaggcaatgaatttccagaaaatttcgactttaggtaatatctatttgacgctcttggacttttcatgctattaaaaattggacttaaagcgctgtttaacaggctactatcaaaatttcccgtttcgttatctttctgaatactattttttgaagcaccaacatctgcattaagtgagtcatatactttagtatcattatgaccaaattgcgatatataaccacgacacatcggattaaaagtgtgaatgtgtataaaattaaacttatttacagctttacattgaggaatctttggtatatatgcaattctatcctttagaattttatgccttttgttatgtttaaaatacagactatccaggtgtgttaaatttgacttcttaaaaggcaaagcgtttgaattgaatagcaatgtaattaaaaggtaaaatacaatcaacattctatctatattcattagattccatggaaaatttcaattagaaatactgaaggttgattaatttaaaatataatacaagggaaaataatggaagttactcgatttaattgagtaaaacagacagatgtgtaataataactaacaatcatagtaagtgaaaatgccatttaccattattatttaaatataaaattggaatcccaacaataaaattaatttgtgagcaaaggagttgttaatttatttagtaatcacatttaatgttaatatcatataatttaaagttaattttaacttcaaaatttaagtatttaaataccatacactctactatataactagttactatcgtttttattatttaataaaatttagtattttgtttcataaggatgattccatgggctattaatttttaaactggataatttctttttttaatagttattaaagttcttaatagtttggaaacatcccattttctaccaattaactttaaaaacaaaattaaggctatattttatataaatttataaaaacaattacttttttatctaaaacgtctatattagttaaatttggatgacggtaacacaaagatagtttaaacaaggtttagagcaacaaatggcgttattttttaatatgtacttaagaaggtactgatacaaaagtaagaacataaactttcaaataaagtaatatacaaaaataaataaaaaatagaaacaaaaagaaacggtttatgtaaaaacgaggagtatatagaaggggatcaaaacacataaaacaatttataaaaataatttgttgaatttaaggaatataagaaattaaattttaatataataaaagtcaaaaacattatcctaaaacatataaaagtaagtaaattgtttttgtaggaaaaccaaccacataataacaagagaaaaatcaatgaaaatgtttatttttgtggatttattgtattggtactagacacacaaagtatggataacttgaacatttatattcgtttttcattgtttttgttctggttataaagtgtttaaatgggtaaacctggctttccttccacaaacgatatttcttgttctgacgggattccagaagagaatttaatcgtcaatcaccaagataatacttacaaatcgaatgtcgacggaaggcgtgaatacaaatacaaactatacgcgtttgttatcatagcattgctacagattttcataaactatgacaatggagcggttccggtcatgctcaactggattcaggaaccgtataactttagtagtactgagctgggattaatgggctctcttccttacgtgggataccttattatatctccatttgtttcacacatactatttaactatagtacaaaaaactcaatagcattttcactagcatttaacttgatatcattggctatatttgctcttgccgtaaacaagtatatgtttttcgtttctaaattttgtattggcgcctctcaggcattattttttgtatactaccctatatgggtagataccttcgctcccaaatttcacaggaatctctggatgtcaataattcaaggaggaatagtaattggaatgacatctggatatattgttacttcactattttcattcttgggtgatagaggttggagatacagtatgctcactcaggttgtatgtgaattaattttagtagttttgttctattttatcccaaagaagtttgttaactttgatccctccagggatgaacaagtggatttcgacctttgcacttgtaacaaatctgctttgttatctgatttaaacgaaaatttcggtaacttacctgcgatttcagaatttagccctaaattgtcgactgattctaaatcaaatctcttggaaaacaaagttgatcttcctgagatttacatggattcaaataaatcacacattagtagtttaaattcttgttcagagtgtgaaggcagcgtgggaaacgttaatgttaaaaaaacacgaaatcctatttactacctggagaatattgccggaagtagtgttgaatttaatttaaagcgttgcaagagtttagacataatttcaaaggtgtcatcaatggggatgagtaacaatgaacttatttctagaatttactcgaccctcgataattccacaaataaacctgaatattccaaatgcagtaaatgtttcataaacaatgttaagttatatcaagaaacaatgagtgtgaaaaacctctctccatggtcgaaatttaaaatgctgattaaagagaacatatttattctaacttgtgtcgctatttcaacaatatattttgaggttacgggaattcatttttggatgacaaaaataggtgtaagtcatttaaaagttaaggaaaaagttttccacgttattttttcaatagaaattataacaggtcctgtgatcggaatcgttaccggatcacacctaattgaccaaattatttatcattatcctgaacatccacttctggttgatattgccctcatcatctacgcaacgtttgctataatatctgggattatactcgtcgtcgttcaaaacccaatgacattttcagtttgtatttttataatactttttactggagcttccatagttccgactttatcattacaatcgattgcctatcttccgtacaatcttaagccggcaggagcttctttcttcatgtgccaatatcaaattttcgggtttatgttcggaaccattatgccgggaatagcaattgataccttcaacaattacagtgcctctctaataatcatttatctttcgggcttcataggattgatatctttggtgttgattttatacgtcaaatggaatctaataagaaaatcatctaaaagcgtaaagcctatcaatattaaaggagcaattgtattatagttaatcctcagagttaaaatatgtaaattaaaccacaatatctaattttaagttagtttgtaattccaacgagataataaaatcacgttaagcacacaatttattaaactaatatcgtttcccctaagggataaaattataattttataaatgaagtttatgcgttgaattaattattttaactttaattattgtgttcgtatccgagtggtgcagacaatggccaatttgataccattttgacattcgattattcttttccatgttattatataattagttatttttacaaaaatgaatttaatgtttaatattttaaaattttaagttttatctaaacaaaaaaaagatgtgtaaactacttaaatttaacagaatttaacttgattaaaatggacggagcggattttcactcaacaacagatccctccagttcagataacaattctgataaaatttcagatatcgatcaggaagataatgtcaaatcaaatgtaaacggaagtcgcggatacaaatacaaactatgcgcatttgttattatagcatcgctacaagtttttgtaaattacaatatcggagcagttcctattatgctgaactggatccaggaaccgtacagtttcagtagtacagaactgggtataatgggatccttaccatttgccggatatctcatcttttctccatttgtttcaaatatagtcctaactcacagtccgaaaaaatcaatagaagttgggttatttttcaatcttgtatcattagtgattttcgtactctcatttaacaagtatttgtttttcatctctaatttttgcattggtgcttctcaatccgccttttcaacatactgtcccatatgggttgacacattcgctcccaaatttcacaggaatctctggatgtcaataatacaaggtggcattatgattgggatgtcagtgggatacatcgttacatcggcgtattctttcatgggcgtcagggcttggagatatagcatttttactcaaattttgtacggaataattttaactattttgttttatttgattccgaaggagtacgttaactttgatccatccaaggatgaaaatgtcgattttaatctttgcggttgtgagaagtcatgttccgatattattgaaataagcactgacaaaactaattccttaaccagtagcagcgaagatctatccaatggtagagatcctctccttaaacgttatcgtagcctagattttgtttcgaaggtatcatcaataggaatgaccaacaaatatatttcgagaattaactccagttttgaggggttctccagtaaatctgaatattctaaatgcaataaatgtttcataaacaatgttaaattatatcaggaaataatgactgtaaaaaaactctcgacgtggtcaaaatttaagttattagctaaacaaaatattttcattttaacctgtactgtaatgtctgtaattacattcggttcagctggctctctatattggatgacgacaatatatttaacacagcttaaaatgagtgaaaagtttgtttacttcatattttctcttcaagtagtaacaggaatgatctttggaacaataacaggatcaaaccttattgaccaaattatttatcattatcctgaacatccacttctagttgatattaccctcattatctacggaatatttgctataatatctggaattatactaatcgtattacaaattccaattgtttacggatcttgtatttttattttaatattttatacggcatcgataattccgacaataatattacaatctgttgcataccttcctcacagacttaaaccggccggttcaacatttttcatttgccaatatcatatatttggtttttcgttggggataataattccaggaatagcgatggatatgtttaacagttatactgcagcactttgtgtaatatatcttcctgggtttataggattggcatcattggtatcgatcttgtggataaagcgcaattcaattaaaaaacaatgataaagggttgtttcctactttcaatttctatttaatcttattttacttctgtcttaaacattcgaatcatgataaaactcaacaaaataaaacacaacattgtcgttttctaaacgtgtaaagatgaatttggtactaaaatttttatattaattatcaaataaatgatagacagtaattagaagatactatatatttggaagtttattctagataattatttaaacatctgataatgtgtatgtcaccacataattttataaatattattaatgatataagatcttttgtattattatgttacataattattaaatattaagatggataagtttaaaatttaaatctatttaattcaatgagttattgaataaatagtcgaaatgactaataatgatacttctatatctgattcaaatacacgtaaaaaggctccacacattaccgtcagtccatcttgtaaaggacttagtaaatacaaatataaattatacacatttgttattatcgcattgttacaactttttgtaaactatgacaacggtgttattacggtttctctgaactggattcaggaaccatataactttagtagtacggaactaggcatcgtgggatcacttccatacttcgcctatgttgcaatgtcaccatttatgtcatatttatttctggcgtttggcacccaaccggtaataactatcgccctcactatcaatattttgtcattggttatttacgcacttgctgtgaacaagtatatgttttttatttccaaattttgtattggagcttcacagtcattgttcacaacatactacccgatatgggttgatacattcgctccagaatttcacaggaatctttggatgtcaatattacaaggtggtatagtaattgggatgactttggggtatgttgttacatcagtattctcattcactggaaacaggggatggagatacagtaccctaacccagattttgtacgggctggttttgaccattttgttttatttagttccaaaggagtttattaactttgatccatcgagggatgagcacgtggatttcgacctttgtacttgtgaaaagttaagttgcaatactatggaaattaatagtaacaaaggtgtctgtttaacaagttacagtgacaacttatccattggtaaagatgccgaccagaaacgttatcgtagtttggacataattacaaaggcgtcatctttggggatgagtaatagtgatctcatttcaagaattcattccagctttgagggttcagctagtaggcccgaatattctaaatgcagtaaatgctttgtaaacaatgttaaattatatcgagaaacaatgaggataaaaaaactatcgccatggtcaaaatttaaaatgcttattaaagagaatatatttattttaaattgtatctcaatgtccataatttcattgtcttcatctggttttctattttggatgacaaaaatatatgtagaccaccttaaaatgaatgaaaaagctgtttattttatattctctcttcaagtattaacaggaatgctatttggaacaatttccggctcacacacgattgatcaaattatttatcattatcctcaacgtccacttttggttgataccaccctcatagtttattgtctaatttgttgtttatttgatgttgttgtagttgttttccaaattccaatggtttatggggcttgtttttttattttaatattttatacatcttcaatggtcccaacagtaatgttacaatcagtcgaataccttcctcatcgacttaaaccggcaggttcatcgttcttcatatgtcaataccatatattcggttttgcattaggcgctataattccaggaatagctatagatatatttaacaattacactgctgcactttgtgtaatacatttgcagggatttgttctattatgctgttacattacaattctgttcattaagtggcatagaattaaaaaagctaaaataacaggtagaagtatatatattaagggtgtggttgtaatataatgttttttgaacttgaaggaccgaatgtaatgaagtcatgtggtataattacttattgatttaaaataccatcaaattaagaacaaataatttattttaaaattaatattgtttcctctgaggataaaattaaatttttataaaatgaagcctatatgttaacattaattattgtgttagtattttgatggttttactgtgttatttctcattcaaaatataatggttataatttatttatattttatctatattaataaggaataattttatttcatatgaaaatcgttctattgtacgtttatatgaattcaatcgactaatacacacatatctgttataattcgtttaacgagtcttaataaaagaatcaaaatcttatcacagtactttaacatgactaaaaatgatgtcggtcctatatctgttataaatttagacagagtttctgacaagaaaatcatcaaaggaactcgaagatacaaatacaaactatacacattcataatcataactttattacaaatttttataaactatgatattggcgtagctccagttagcctgaactggattcaggaaccgtataactttagtagcactgaactaggtatcatgggatcgcttacatactgttcttacgttgtaatgtcaccgtttatgtcatacatatttttgacattcagttctcaaatagtaataaccgttggattaatcattaatctcttgtcattgcttgtttatggacttgcagtgaacaagtttatgttcttcatttccaaattttgtatcggcgcttctcaggcattgttcatcacatattatcctatatgggttgacatattcgctcccaaatttcacaggaatctctggatgtcaataatacaaggtggcattatgattgggatgtcagtgggatacatcgttacatcggcgtattctttcatgggcgtcagggcttggagatatagcatttttactcaaattttgtacggaataattttaactattttgttttatttgattccgaaggagtacgttaactttgatccatccaaggatgaaaatgtcgattttaatctttgcggttgtgagaagtcatgttccgatattattgaaataagcactgacaaaactaattccttaaccagtagcagcgaagatctatccaatggtagagatcctctccttaaacgttatcgtagcctagattttgtttcgaaggtatcatcaataggaatgaccaacaaatatatttcgagaattaactccagttttgaggggttctccagtaaatctgaatattctaaatgcaataaatgtttcataaacaatgttaaattatatcaggaaataatgactgtaaaaaaactctcgacgtggtcaaaatttaagttattagctaaacaaaatattttcattttaacctgtactgtaatgtctgtaattacattcggttcagctggctctctatattggatgacgacaatatatttaacacagcttaaaatgagtgaaaagtttgtttacttcatattttctcttcaagtagtaacaggaatgatctttggaacaataacaggatcaaaccttattgaccaaattatttatcattatcctgaacatccacttctagttgatattaccctcattatctacggaatatttgctataatatctggaattatactaatcgtattacaaattccaattgtttacggatcttgtatttttattttaatattttatacggcatcgataattccgacaataatattacaatctgttgcataccttcctcacagacttaaaccggccggttcaacatttttcatttgccaatatcatatatttggtttttcgttggggataataattccaggaatagcgatggatatgtttaacagttatactgcagcactttgtgtaatatatcttcctgggtttataggattggcatcattggtatcgatcttgtggataaagcgcaattcaattaaaaaacaatgataaagggttgtttcctactttcaatttctatttaatcttatttcacttctgtcttaaacattagaatcatgataaaactcaacaaaataaaacacaacattgtcgttttcataagatataaactatgaatttggtactaaaatttttatattaattatcaaataaatgatagacagtaattagaagatactatatatttggaagtttattctagataattatttaaacatctgataatgtgtatgtcaccacataattttataaatattattaatgatataagatcttttgtattattatgttacataattattaaatattaagatggataagtttaaaatttaaatctatttaattcaatgagttattgaataaatagtcgaaatgactaataatgatacttctatatctgaagtttcaaataccaataacctatcgcataaaccaaataaaaaacatacacgtgaatacaagtacaaattatatacatttattatcatctcattactacaaatttttataaattatgacaacggagtcattccggtaatgctgaattggattcaagaaccatataactttagtagtactgaactaggtattatgggatcactttcatacttcgcttatgttgtaatgtcgccaatcatgccatttatactattaaagtttagtactcaaccctcaattactatagcactggttattaatctcttgtcattggttatttacgcacttgctgtgaacaagtatatgttcttcgtttctaaattttgtattggagcttcacagtcattgttcacaacatactacccgatatgggttgatacattcgctccaaaatttcacaggaatctttggatgtccgtactacaaggtggtataatgattgggatgactttaggatatgtcgtcacatcactgtattcatatgccggtgataggggatggaggtacagtatgcttactcagattatatgtgaattaatcttggtagctatgttttacttagtcccaaaggagtttattaactttgatccgtcgagggatgagcacgtggattttgacctttgtacatgtgaaacgtcagattctaaaagtatggaaattaatattgacaaagatatttgtttgaataataacaatgacgacttattcaatgataaagattcttctcttaaacgttatcgcagcctagactttgtttcgaacgtatcatcactaggaatgactaacaaatatatttcgagaattcactcaacatatgagtgctcagctaataaacccgaatattctaaatgcagtaaatgtttcataaacaatgttaagttatatcaagaaacaatgagtgtgaaaaacctctcgccatggtcgaaattcaaattgttagctagacataatatttttattttaacctgtattgggatatctgcgttatattttgaggttactggaattcatttatggatgacaaaaataggtgtaagtcatttaaaagttaaggaaaaatatttccacattattttttcaatagaaataataacaggtcctgtgatcggaattattacgggatcctacttgatcgacgaaattatttaccattatccagagcacccactttttgttgatattgcactcattatctacggattatttgcattattatttggaataatactgatttgtgttcaaaacccaatgacattttcagtttgtatttttattattatattctctggagcttctatagttccgccattaacattacaatcagtcgaataccttcctcatcgacttaaaccggcaggtgcatcatttttcatatgccaatatcatatatttggtttcacattgggcagtataattccaggagtagcaatagacatatctcataaccatacttcggcactttgtgtaatatatttgtcagggttcgtaggcgtagcgtcttaccttcttataattattatcaagcgcaattcaattaaaaaacaatgataaagggttgtttcctactttcaatttctatttaatcttattttacttctgtcttaaacattcgaatcatgataaaactcaacaaaataaaacacaacattgtcgttttctaaacgtgtaaagatgaatttggtactaaaatttttatattaattatcaaataaatgatagacagtaattagaagatactatatatttggaagtttattctagataattatttaaacatctgataatgtgtatgtcaccacataattttataaatattattaatgatataagatcttttgtattattatgttacataattattaaatattaagatggataagtttaaaatttaaatctatttaattcaatgagttattgaataaatagtcgaaatgactaataatgatacttctatatccgaaaacttatatttaaacaaagtttctaacaaacaagtaatcaaacggacacgcgaacaaaaatacaaactatacacattcattatcttaattttcttacagatttttataaactatgacaacggtgtggttccggtttctctgaactggattcaggaaccatataactttagtagtaccgaattaggtatcatgggatcacttgcatactttgcctatgttgcaatgtcaccctttatgccatatttatttttgacatttagttctcaaatcgtaataaccgttggtttaatcatcaaccttttctcgttggctgtttatggactttccgtaaataagtatatgttcttcgtttctaaaatttgtattggagcttcacaggcattgttcacaacatactacccaatatgggttgatacattcgctccagaatttcacaggaatctttggatgtcaatattacaaggtggtatagtaactgggatgacatctggatatattgttacttcactattttcattcactggaaacaggggttggagatacagtatgctcactcaggttgtatgtgaattaattttagtagttttgttctatttagttccaaaggagtttgttaattttgatccatctagggatgaacatgtggattttaatctttgctcttgtgaaaagtcatgttcagatactatggaaataaacactgacaagggcatttgtttaaccagttcctttgatggcctatccaatggtcaggattctgttcataaacggtatcgcagtttagattttgtttcaaatgtatcattcggaatgaacagaaaccaacaaatttctagacttcattccagttttgagggcttctccagtaaacctgaatattctaaatgcagtaaatgtttcataaacaatgttaaattatatcaggaaacaatgagtgtaaaaaaactttcgacgtggtcaaaatttaaattattaattaaacataatatattcatcttatcgtgtattggaatgtcctcggttacattttctgcctcaggaatgaatttctggctaacaaaaatttgtttggattacattaaaatgaataataagggagtttacctcatattttcggttcagccaataactggtgtattgtttgggataattagcggatctcacctgatcgaccaaatcatttatcattatccagagcttccacttttcgttgatttcaccctcatagtttggtcgataataatatgcatatttgatattgttgtaattgttatacaagttccaattgtttatggattttgcgtttttattattttgttctttggatcagcgatagttccaacactaacattacagtcggttgcgtatcttcctcataggcttaaacctgcaggtgcaactttcttcatatgtcaataccatatattaggctttacactaggtactataatgccaggaatagcaatagatatatttaacagttacactgctgctctttgtgtcatcttcctacccggttttgtcctgttagcttgttgtatcgccatcatgtgcatcaaatggaacagaattaataaagcgagacaaactggtcgaagtatatatattaagggattagttgtaatttaatgttttttttaaattgaaatagacttgatggaatgatgtactccgataaaatttcgtggcctgtccaaaagtattatcatattaaacgcaatttattaaaaaattattatttttacctatgggatataatacaaattttataaaataaagtttatatgttaccactaattattgtgtcaatatcttagtagtgcttcggtactactgtttactcaatgtaatcgttatgatttaattacacaattgtggaataaattgttttaataaaataatatttaatgtttgatgtatatgtaaattcaatgttggagtaatacacactaatgaaacaaaagttgtttatttaattttcacaggactaaattctctcataatagtttaaaatgactaaaaatgatgttagttctatatctgttccaacgttaaataacattcctgatataaaaatcatcaaagtaaagccgagatgcggatacaaagtatacacatttattatcttaacgttaatacagatttttgtaaactatgacaacggggtcattccggtttccttgagctggattcaggaaccatataactttagtagtacggaactaggtattatgggatcactttcgtactttgcctatgttgtgatgtcgccatttatgccatatatatatttggcatttagttctcaaatggtagtaactgttgccattactatcaaaacgttgtcattgattatttatgggcttgcgtcgaataaatacatgttcttcttttcgagattttgtattggagcttctcaatctttgttcataacattctatcctatatgggtagatacgttcgctccaaaattctatagaaatatctggatgtccataattcaaagtggcataattattggcatggctttggggtatgtttgtacatcgggattttctttcttcggtagtagggggtggagatacagtattttcactcagattgcatatgggatgattttaactatcttattttacttaattcccaagaaattcgtcaactttgatccatccagggacgaacatgttgatttcgacctttgtacttgtgaaaagtcaagttttgatactatggaagttgatagtgacaaagctgtctcctcaaaaagttccattgatgacttatccaatggtcatgattctgttcttaaacgttatcgcagtgtggactttattgtttcaaaggtatcatctctaggaatgaccaacaaatatatctcgagaattcactcgactttcgaaaattccacaaataaacctgaatattctaaatgcagtaaatgttttataaacaatgttaaattatatcaagagacaatcaatgtaaagaatctttctatctggtcaaaatttaaattgttgattaagcatcacgtttacattttaacctgtattttcatgtcttcaattacattttgtgctatgggaatgaatttttggatgacaaaaatatgcgtaacctacattaaaatgaatgaaatggaagtttattttatattttcaattcaacccataactgctcctttgttggggataattactggatcgtatctgattgacagggttatttatcattatccagaacagccactattagttgacgttgttcttatggtctggtcagtattgttaacaatatcaggacttgtcgttatttttgttcaaaatgcaatatcacttggaatatgtgtctttatcttgctgttttttggagcatcaataattccaacactaacattacagtcggttgcataccttcctcataggcttaaacctgcgggatcatcctttttcatatctcaatatcatattttcgggtttacactaggcgctataatgccaggaatagcaatggacttgtttgacagttacacggccgctcttattgtgatgtacttgccaggcttcatcttattagcttgttgtatcgccatcatgtacatcaaatggcgtcgaattaaaaaagccagactaacaggtagaagcatatatgttaagggtgtaattgtaatttgatgttttcttgaatttggaagaccaaatgtaatgaatccattggatttaatctcatttaaaatatcatcaaattaaacacaaataatttattttaaaactaatattgtttcccctgagggataaaatgtcaattttataaaatgaagtttatatgttagtattaattattgttttaatagtcttccacaccatcaatttatgtagtcatagaaattgtttatttgaggagaaaaacaagttgtttaaattaataatttaggaaaaatcatttagattataaatataatttacataaaatatatacattaatgattaagcctgtatcatacataataaacaataaattcaccttttagatgggggatcattatcgaactcaattcatattacttatttttcaaaaactattattataatgaaatgaacagttatatataaagaatacattgctctaatatgtctgataatgatactaaagaggtatcatcacttaatacgggttcgaacttgacaaaaaaggatttaaaacttgttacaaccaagatagcagagtcaataaacattgtagatcgctcattactttcagttccgtacgaattgctatctgctagcataaaagaaatcgaacatttgctggagaaaaaattattgattgttacaacctatttgataaaaaaagtcgttaatattgaggataaaaacttgttaaaggagaaattagcaagagcactggaacggttacagcaaatcaaggatcaaatcaagaaaatagatgatgatatggaccgaaatttatcaaatttatatactagactaaatgaactcaaaaatgaaccagatttgtatattaaccaaataaatccaaattttaattttgacacttacagaaaaagggtttcatggatgcttggtgaatatctgtcaaggaagtgttttaccagcactgtaagtatgcttgtggagacagaaaacattaaagaatttgtggatttggaaatccatgaaaattgcaacaagataatcgatgatttgatgcaacacgacctaacctcagctttgaactgggcagaagaaaataagaataatttgtcaaaaattaactctactctcttgtatgaattaaggttacagaagataatatcgatattaaaatcaggaacacttaatcaggttcttgaactcataaaccagttcataacacacgaagtacttatgaaatgcccagacgcaaaaaagataattaccgcagcgattttctataccaatgaaggtatcaaacaggagaaacaagacgatttcatctcatacacatcaactgtagaaacgctggttgatattgacccgaaaggaggggaaatagacgatagatacagatacttaatgagcgatcaaaggtggaataaaataattgacgaattcgggaggacaatatctaagatttatggctttagagaaaagtcaattttggaagacctgatacaggctggattcagcgctatcaaatccaaaggatgcagggactacaagaatccgacatgtccagcatgcctacctgaatgggctagctacgtagaacagataccgaacctacacaaattacaatcaattctgatatgtcccatcactggaacaattatggattattcaaaccctccgttagcatctccagacggatacgtgatttccaaaaatgcactgaagtttttaaatcgcaacaacaacaacgatgattatatcatctgtcccaaaaccaacaaaaccatacacatttctgattttaaaaaaatttttataacttgattttaaataattttaaattacttcaacagttaatttgtataatttattttaatattgattattttctcgccgttatttttaaaaatttccgttttgagcccagaagatgctaaatttaagtatccaatgtgggtattttagtgcagatactgaaccaaacaatttgtttacgaaaaaattaaatgacttttatttttcattaaattaatatgtaaaaatatggtaaatatggcagataaaatctcaatgtggaagtccgacttaattagcggcaaatataataaaattttaatgagaatgagtacattcgaacagtttatccccaaaagtacgagggaaaaggttaaaaaaattttaagggaaaataaaccacatgtttgtatttatttagggttttttgtggctctcctgatggtgtacacgttcatttcaagcggaggcttctctttcctcttaacactctcctctttagtcagccttctatctttccttattttaggattttgtatcgaaaccactaaaagctctaaaggaatctcacttgaaaccacagtttcgtatgtgtttgtgttcctatcgaggttgctctcaattttagtacaccaagggtaattctataataaactactatttctaaccataattaaacataaaagatttaaactaattaatttgcaggtatcttccgactgattcctcaggcgactatatgtaccaattatctgaggttttatgcttcgtattctccgtttacatagtgtttgcttgcaaatttaaatattcggatacatacgaaaaagataatgataaattaaaatgcagttttatattggtgccgtgcttctttctggcgctgtttgtacacccatcactgaatcgtttctttctcaccgatgtgtgctgggcatttgctttatacgtagagaccgtgtgcgtattaccccaactcttaatgttccaaagatcggtatgtttcatacaactcaatgtgttgtaggataaggtggttccagcaatggcacacttcacagcagctcaatcactgtcaaaaatcctgtcattcgtattctggctctcaacatactctgaactaaactctaaggggaatataataaaaccattcgttggccactgggtcattttcacgcagctggttcaagtacttcttgttgcagattttgtcgttcactacatcaagtgtattactaaaggaatatcggtcgagttcatcatgtctgataatgtataaaaagttgtaatttttaaaatgaacatatttgttactatggaatcttacactatttttcattctcgtcagattttaatttattccactttataatcatacacatgaataaaaggaataaatttatatattattccttacttataatattaattcgtgtcatctttattctaaccttacacctactgaaagtgttcataccgtttatgatttctaagaatgttcacgatatccacgaatatatagagcttttcagatgttcgaattacaaatcttacatgaaatcaaggcccttttattactatattattaaaaggcttaagttcatgtacccagatttatcagttaaatttctaatgaccgcgttcatctttgttttcgacttttttacagcacttttactatatagaattgtaaaatatatatcgtattcatacaaaagggaagatgaagataatgaaaggatttttggaacagcatcggttggttttccatattaacatctaatttaggtcaaacattccaaatcactaccatttgtaatattcacgatttatttgctgaacccacctagcgtatgtaatgtaacatttcattgatttcaggttttctacaactactctgcaaaccctgacggatacaaatacttcctcctcacactctctgtttactccagtttgttttctacccaaagcaaatacaaaaggaaatcgtcacatggatcaaacaactggatgagttgcattaagaactttaggttctcaaattacttatctgacctaatattcgtatcatttatactcaaaacatcacattctttcctaccactgctgtttccaatcgtatatataaggaagtaccacagagttaaattatctaacggaccaataaagatgaacgagtttttatctattctaagggagttcgccttctcaaccacatttgtattgatagttttaagtatattcaagttcagattcatggtacgttcatctcttgaaaatatttttagcctgaactgactaatccataccgagcaatagactctcacccatcaattgatttctcgtttacctggtacttgaacgaattggtttgtttcaattaattttaaaatgttcagcttccagtggagtttgtaaaggggacaatgtttaaaaatcatgtatgttcctaaattaataaaagtttagttcattggatttgttttcacaattccactgctggttggattgaggaagtacccatttgactatctactaataatgacatgcatctgtatactaacacacccagaaatgaccgtcctgggagttacattcattttaataattttaactgtgaattataaacttctacagagaacacagccgttctcgaaactggtacgccttaaaaattataaaataaatacaggtccacaccattctagctctccttatcatctcagtgttttcttatgcctcgtggattggaagatacatggcgaaccccaactacttctttgggccacagatcatcatcctgattctgatctgtaagttgaaaaaattaaaaaaaatttaggcataatattggaagattacacaaaaatggtttattttagacacaccaataattttaagaatttggtctaaaaatttaatttaaaatcacaccattgaacacaaccaacccaactacatactatttactcgtatcatttcatattatttattcttatcgcattaaaaaaatgtcggatccatcagatgtattcagtgctgcctgtagaaaggtctttgactgctggtttgtacatttccacgaatattttacttcaggactgccctgaacctcgcagttgaaaataattggggaggaggcgacggccggtttaaaaaggagctacttcttaatgacgtcattgatttatgccttcactgtaaggaatttattagttttttaaatatttccccttatttgtacattggtggattccatcatcttttcattaataaatgtaattttagccaagacattatacgctgatggcgtggaagacttgatagttaccaagatcgacgagtattttaacgtaacattggaagatgatagtgaggtagtctcttttctaataatgatttttagtatgaaattgcaagaatattggttaagctacattatacatgctcaaaaagcgattattcttatgctaaccaactcatgaaaaaattgaaaaaatgctccttaccatgcattcctggatacggtttgtttggacctcctaatttttattagattccagctccgatgatgacagccctgttgaggaagacgctgagaaattaaaagaaagatctaagagtataattttatgtaaataaattttatttagggtccgaacaagtaacagacgaagatggatggacgacagttttataatcctaattatgtaaaaaatgtgtatttttttaaattttggattgtttaaatcagtttaatattaactaaattgttgtatccttggaatttaaggacgaaatttaaaaaatttgtcataatatactaaaaattcatattaatagttttttcattgttttgtgtcttctagaatctgtatttgtccagtatttacacacctaattttgatttatcgcttattgtttaagacctaacaattttctttgctattaccctacttggattccttactcattaacacccgtagatctgtaaattaaacattgtatttttttctatgtcgtaaaaaatgaattccttaaaattagaggattgtgaatcatacaataaattactgtcattaaaaccttcattacttaacctcaacttgacaaccctgttatcggatcacgaacgatgtgataaactcataaaagaatggaacggtattttgaaataaaaaataaaattattccaggtgttaccttagatttatctagggagttgttgacagaagaatctctgaaattgttaatctctctatccagagagttaaaagtgaaggaaaaatgctcaggcttatttaccggagagatattaaacacctcagaggaaagacctgtccttcatacatatctacgaatgccaagaagtgaaaatttggtggtttcagggcagaatgtgtccaaagatgttcatgacgttttggaccgcatcaaagaattctcacaaaaagttaggtccggaaaaattgtcgcctcggatggaaaaccgtttgatacagtcttgtgtatcggaatcggaggctcttaccttggaacactattcacaaccgaagcattcatgtcgtatggaccagcaagagaagccagcaagaacttcaaaatcagattcctatctaatgttgatccatcatcattgaggtcaataactagtgaattggacccaaacagatcactggtaagaattaaactgttcaatttaaacaattcaggttattataacgagtaaaacattcacaaccatggaaacaattaaaaattcatactcagtcaggcaatggttactggataacattgcgaacaaagacttattgagtaacaaataaataaataaaaattttaatttagataaacacctgtatgcaatcactactaatgtggaactggcttgtaaattcggtcttcactcaaccaatattttccccttctgggactgggtggtatgtcatattatcatatacccttactaacatttaaactaatgagtattccagggaggtagatttagtgtgtgcagctcagtaggtttgttacctctgagtattgtgttcgggtacgagattgtcgatttgttcctttctggctgccgggacatggacctccactttaaaaatgagcctgaggagaccaacttaccctttctcatgggactcacgagtttttacaactctacggtcctaggcttcaactcagtggccttgctcccatacagccaggatttatctaaatttccactctacgcacagcagctgctgatggagagtaacggcaaatctgtctcgaaaacgggggaagttttaaagtatgaaacgtcggaaatttactttggagagtcaggaacaaacggccagcacaggtaattgattaactatgaataaattacctttagcttttaccaattattgcatcaaggtagaactgtaccttcagaattcattggatacatcaacacacacaacgaagataacaaattatacgtaagatattaattaaaaaatgcacaactcagggcaacgtgacacaccacgtggaactaatctgtaatttattcggccagttggacggactagcgttcgggaaatcctacgaaagcttaattaaggaaggagttaccgaggagcaggcaaagttcaaagtttgcagaggaaaccgtccttcactgctagtgttgttcaatgagctgagcccatattcactggggcaattgttgtcattgtacgagcacagaaccgtagttcaaggtaaccttttactccacccaatattttcagggttactgtggaacattaattcatttgatcaaatgggagttgagctgggaaaacaactggcttcaaaccttaggtcccttttcaaggacaatgtagtggatttcaaaaaacatgaaaagcttggaacgctaagctactcatcaatcaagttgttacaagagtttaacactaaatataataacacgtattattcttgaaatataataacacgtattattcttgaaaaataatgacatgtattattcttggaatatactgacatgtattggttatttttcaaatatattgaccatgttttctagtatttgataagtgtacctttcatttgaaatcggagactgataagttatgattgacctgtgaggaaagtgaattctgggaatatatacagcgaattttataatcttcaacttgtccaggaggcccattaaaatctggtggtagaaaaagtcgtcatcgtcaaacttatcaaactcgtcaacattgccagtcctgacaatgtcactgatgaccttggtaaacttcaatttatcttcagcggtgaaaaggggactattgtccagcatatcttcaatgaatttcatgtggtttgtgtttttaatcttattgtccaacaactggttaaatctgtcagtcaattcatcagcaaaagagtcatcggttgaatggggattactgttatgtatgaccttggtgacattgtcgaacactagctgcaagttctcgttattcatattaatgttcgctggctggcccgggtatttgtacaacactttagctatttcacgcagcttctcgtcagtaaccagatagttcggtaagatcagtgaggtcctgggagccaccatcatgtcgcctgaaatattcccgtaggctacaactttctcaaatttatctaaaaaaccttcactctttagtaaaaataacagatcgattgttttgttgtccaattctgagattgtgtcggatccaatcaggttagccagtctcataaactccaaattgttttcaaacgtgccggcaagcggagttgcaacaaaaataaagttcttccaaacaatctctttactaaaaaaggtataatcatggtctagcacatcattacaaccagtattatcggaatcagaaggtttagaactataaggagtggtatggttagtgtcatttggggcattggaagttattccaaaaaacctttttttattcaacaaatagtacaacaaaaaatatctcaaaagtattccgccatatgaatggcctattaagcttagtttgaaattactgggaattttggcaaacaataacttcagttcgtcaataatgagcctgatgacgtacgaagtgcctctgagagtttttttacacgctgagactggaaagtaaacaaacaaattgggataagcttccagcagtgctatgcatatatcagtcatcattagaggagtggaaataattccgtgcatcagtattacatagtggcactcttctccgccagagcagtccttacagtgacagaaagaagacgcagagaagtaacacaaacagctatcacaccgcaaaacattatcagggaaccgggagtacttgagttggaaggagttttgttcattcaaggttacatcatcgtccataaagctgccgaagtagttcaaaaagtctgagaatgaagctgaaaaaatagtttttaaggacatggccttgagataagctgcgtataaggattccttgaaggattttaaattatcagggccatttttctctgaatcatcaacacatttatccttgtaacagccttttccattttcactaacagtacagtgatagcagagtgaagatggtttggaattacccataataaaacaactacattcgataaggttagggccagagtttcaatcttttatttcattttagaaaaaactaaaattaacttcattttataatttacgattttactgattttactggataaaacaacaataaaataaaaggtacatttataaccgaaaatatggataaataaaattgagtttacgtgaacaaagatccaaaactcgtacttacacatacaatgtggtgtaccggaacagtgagtataaataatgtaacaaatttaaataaattccaaaaccatgtaaaactaaattcatgaatattaagggttttagataattaaaatatattagtaataaattccatacatcaccaacatataataagtaaatactcgcgaaaaaagaaataaaaaagaaataaaacatgaaatataagtaaaaagcattttttttacaaaattcatggacttcgttgaaagttaacgtgttggttgagtgtggagaaaatttcaagggtaagaatctcagaatgataaaataggagacggaatgccaaaaactctcaaaatttttcaataaatttaataaatatgtgtaaaaaactaaatagttttagtataaatttgttttgttactgctaatgtaatgattttttcgatacatatggggatttaaaactcatcggttaataggttgaattatttcataaattccaataggaagtcggaggtatttaatttgtacattttgtaatttatatgctttccaaaaattttaaaagtgttagtattctttctgttttaacattttgaatcttgattttttaatctccgccttttatatttagatttcttttttagttgtcattttaattttcattcatagttttttaaacgcatattttaaatcttatgaaggccatttgccttaaaattgactgattttaaaggaaatatgagcagcttagactttgaattgaccccggatagtaatccggtcaaattcgaccaggagattaaaccgaagaggctttctctattcccaaagtctaagagaaaactctcagtgtttttgatttatatgatcggcttctctgaagggttattacatttgtcaaacctcgctatttattatatgtttaaggaggattttggtctatctccagcacaaatgacacttttgtattctattcctgccataccttatgttattcgaccctcaatggcctatttgactgatacgattccaatatttggaaccagaagacggcattatttaattttaaatagtcttattcaatcatcaagttttctgtttctaggcttaatgcctattagtctatttttttcaaccattgcactatttctaattacattcactctcgcattttgcatgaccatagctgaggctctggtcgtggaaaacatcagtgatgtaagtttgttattaaaataattattattagggaactgataatttgagtgggttcatcgggattaaggccttttccgccttattagtctcttacttttcaggctctatgttagaaaaatacccaaaacagagattgtttctgattacaagtttatttccgctattaatcacatttttcgcatatttcatgaaagaagagaaaacggagattgtatatcaatcgcacccattaaaggatttaattaaatttttaagagaaccgtaagttttaacacatttattttctttaggtcaatataccacccctgcatattcatgttcctggtggtcatcacaccagcatatgaagacgcgtttttgtactatactatcgacgtgttaggttatagcccgtcattcatgggaatattgagacttatttatggcatctcaattgttttgggcataggactgtgtcgtatattttttaaaaatacttccataaagaagttacttatatggtccacgcttatagtgaatatagtgtaccccttcccagctttaattacctctggactgtcaaagaaactcggaatcccggacaaacctctagttctctgtggagggttcttaatggaagcagttttcgagatacaggtgatgccgttcctaacttatacaacgagagtcacacctaagggtttggaagcctcagtgtttgcagctatcatgaccatcaaatccgtcgggattttctcatgtaaattattaaccgccttaacaacgttccttttcggcatagacaaccataaatacgagcatttgacgtcctatatcctattttgcacagccacggcgatggcagtaatgttctacctcaccaaggtgcctaacaaggacgaaatggaacttttcgtaactaggcaaaaaatgacccaaaacgccgatgagaagacgtaacataaagtcgttttaattttgtagaattttatatatgttttaatccatgtgtcgaccaaatactacaactaacggttgtggattctatccaatacagataatgtgtgttaacaaattcactaaaaacttcggttgatcccatcaacaaagctggatctaacacattagataattatcatatgtaataaagtggaaaatgttgatctttggggtagaatggagttatttattggcaggattatgtggcaaatacaacaatcaacatcactgtttaaaatctacctttccatgtaaaatgcaatttaaattcatgtaataattataaaatgaataatttgggtttagatcttaaaagggatagaatccctgtggcatttgatgtcgaaagggagaaacgtttcccttttgtaccaaaatcatccaaaaaactgccaattctcttgatttatatgataggtttctctgaaggattattgcatctttcaaatctcgccatctattatatgtttaaggatgatttcggactatctcctgcccaaatgactctcttctattccgttcctgctcttcctttcataatccgtcccactatggcttatctaacagatgcggttcctatttttggaacgaggcggagacattacttgattttaagcagtctgattcagtccttcagctttctatttctagctctgattcctaacacaataatcttatctaccatagctgttttttgtataacattcactctggcattttgtatgacaattgctgaagctctagttgttgaaaacattagtgatgtaagtttactatttaaaatatattattaggggaccgataatttgagtggatttgttgtaataaaggctttttctgctctactggtttcatatttctcaggctctatgctggagaagtaccccaaacagagattgtttctaatcactagtttatttccactcttgattacatttttcgcatacttcatgaaagaagagaaggatttaatcatctatgaatcgcacccgctaaaggatttagttaaatttttgaaagaaccgtaagttttgataaaattaatagttttttaggccaatatttcacccatgtgttttcatgtttctagtagtcattacaccgggatatgaagatgcattcttgtactatactatcgacgtgttaggttatagcccatcattcatgggaatactcagacttatgtacggtttctcagttataatgggaataggagtttacaggtacgtcttcaaggactcatcaatcaggagtatattcttctggagttcactattgctgaacacggtttatgcattcccagctttaattacctctggactgtcaaagaaacttggaatcccggacaaacctctagttctctgtggagggttcttaatggaagcagttttcgagatacaggtgatgccgttcctaacttatacaacgagagtcacacctaagggtttggaagcctcagtgtttgcagctatcatgaccatcaaatccgtaggcttggtattatcaaaggttattacctcgttttgcacatatattttcggaatcgacacacaccagttcgatcacttgactgcatatatactgttctgtacaaataacttgtttttcgtgatgctgtacttgttcttcgtgccaaataaggaggagatggaactcctagtcacgaaacagcggatgttacaaagcgcagaagaaaacgcttaaatgtattatattcaaacaatataattttgtttcggtaaatatatattagagtatggaaggtgggttcataagatgggccgatgtgtacgaaaccattcgaactaaattagctaattctatattaaaataaaatatatttccaagttcattaattaaaaattttcaacaatttataaataatatttacgactcattttggaatagcatatgaggcgaagattacaaaatatattagattgcaattttatataatattattttagtatgatgatgttaatttttaaaaccacaaaataaatacacttaaaccatgagtcgttcgtacaagatattcgactacccaatctttgcggtaatttatatataactgtttaattttacaaatttcttcagttatctcacgccgatggctacttggtgacttcgggaggcggaggcggtgaaaattacgggatttccaacaagcttgtaagttaatttactgattcaattcgcaggaaatatactccttcggcccgaaattcaggcccggtgaactacaattgaaagtcaccaccagcgagcaacgcggcataatagattctcttgattaccaccataaggtaggggaataccttttaaattgattgttagcataaaatttggatcggctccatcgatgattccacaataatattctcatataaaccaaatttcgggtatttaaacaagttaataatctttttcagaatgagaatattcggaaaattcaaaacggactatattagaaatgatccaaaacaggtatttatcaaattataagctgagaataatgttatttcagaatatttgtaaatttggttatgacagtaactactttgtaactggcggaaatgagtcatgcgtaagggtttggaggttaactgaaagcttaataagaagcgtaaacaagtttcaaaaccagtataagatccaaggaaccaataacaagtttaagaatgtaaatttaaggaagtttaagttgaatgaagacgcctcactatcggatgatgataacgtaccatctgacgccactttgtcagatggaaatctatcagttacagaaaatgatacatttaaaacgaacaatgtaattgaaagtaaaagcagcagtgaagttagtaactcactgtcaaacattgatgacacttctccatccccttcatcctcgccctccttatcgtcagtaaacctcgttaataataaaaagaacaacttcatagacataggtgaagttaacgctaacaatatcggcaagtcatctccattttccaggaacaaaaatactaaaaattctactgacagcttaaatatttctatcggaaccaactctactgactacaaggtgcaggaaaatgataaattgaacattttgagggaagactcatttgatttcattaaaacaggaagtaacagaatgtgtaaactaatattagagtatcgagaacatataaaaagtataaacgactgtagcatatttaacgagttgctggtgtcagtgtgcgacgattacatggtgttttacaagatactgccaaactcaaagctgctgttgaaacataagctagactcggtcaggttcaagtttgttcaaattttgccaagagtcactgctgagaaggtttacagcattctatcagtccagtacagcaacgactacactgttttatgtttatggtaattatttccaactttttctaaattatttaggaattttaatcttttgaataaaaagttaaatttggctaaatccaccaacatttcgaaatcaaagtcatcctcgctgacaatgaagtaacaaattattttattaatcgtttgtagtttcgaacacgatgaagtggctctgggatttggggacggaaccgtctctgtatactcaataaacaagtttaaactgattaagacgttcaataagcataagatgcccattacagacttggaatttgtaaggtaagcctaactactctgataaaaattattttagtaacaaaaagcttctaactagtggaatcgactactacctctacttcaacagcattaaaaacacgcaatttatcatctcagtaatactaatattactattagcagttgcaataattaattttttatactaagtataaagtacgtgttattaagtaaattcaaatttaagattctaaatctgcgattggattggaatgtatcgtagtggaagtgataatgatgtcctcaacaggtctgttctttttaccaacaggcatattctccagcttctccaatgtatctaagccactaatcagcctaaactaatgttaaactaatgttaaaattatgttgaaatgttaaaatttggtaaaactaccgtccaaaaactgtatactggttgttcaagtgcatttgttttgaataagttatgaagaattgggaagtattcccattaaccttgccattgttcgacatactaacaactcccctcttgtcatgctagtaaattaaagttaacgtaagattagcaatgtgtaaacaataccttcaaatgaggaacaagttcattttcaaatggttcgttatagatactctcacctcctttgccagttccagtgggatctccgccctgtatgaggaatcccttaatattcctaaagtaagatgttattattgtggctgctaacctgtggaatttggtattattatagtaatctgaggcgcatagagccaagaaattctaaaagaaagtgatactaggaatcttaacgtaccttacaagttttaggggtatctttacagtacaactcgatcttcaaatctccgaaattagtatggattgttactgacattaaactacaaaaaacaaacaaattaattgaaattaatagtaaacctataaaataattttaaaaaacaaggaaaatttttaaaaatacatcaaaattatactaattttcagtcacatatgtggtgaactagatcacaatttagttaatgtaataaatgttaaatgaggaagttgatatagaagcttacaaggttaaaataataaagaggtgtaaactaataaatttactaaaaattgacgagtttgagctcgtttgtagaatatgtgctacgctaaatgagaagaacatagagttaattgagcgtatcgtccactgcaaaggctataaattctgccagaatattttcaacttgaccttagtaagttaacacaataaaacggaaaaataattaaaatttcaggagttattacaatacggtgaccagtatagcaaagatggcataaaacgcacacctggaggtgtgtttataaatatactaaagaagaatttaaataaaactgaaatcaaattcatatggaacgagcaggtgagaattcctagaaattaatagtttctagaatttcaaacagaaacaacataagaggaacaaactaaggaatcaaaacacaaatgaaaagggaagtagaaaaagccattgaattaacgagagaagcaattgacctggacaatagaaaggaatacaagaaatcactagatatgtacattaaggctctacagcaatggtcaatgatttgcaagtgtaactttctttaaaaaacttaaataattttttaggtgaaacaaacactaacttgagagacaagtacttcaataaaatgaaacagtaccttgaaagagctgaaaacattaaatcatacctaaataccaacactactgtttgtccaactccctgtaaactaccctctgatgcacctaccacacctcatgataatggtaatatcttaacattctaatacttatcagaatattttaatgagtttgagtctctgattaataaaaattctaacgacatacactgggacgacattgttggtaactactacacattaataaatatatcatttatttatactatacacatcacaaatgatcccctattttattgttgtttaggccatgatagtgtaaaaatcatactgaaagaatcgattttactacctatgaaattccccaatttattctccagtaacctcaacccacttactaatattttattaggcaagaatatcatcaattataattgtattttattgtatgggcctcctgggactggtaaaactcacctggccaacgccttgtcaaatgagtttaaataccactttctgtcaagtaataagttagatttcaatcctgtttagtttctagtagtaacattctcagcaaatactacggggaaagtgaaagatacatacgaaatttatttaacttttgtataatgaagagtccttgcgtgcttttcattgacgaaatcgactccatttgtaacactcgcaattctaaccagcatgaagcaacaaatcgaatcaaaactgaatttatgatccagataaaccgtaagctgattatctttattgttaaatactaaattaggtttaagtaatgagggaaatgttctattgctaggatccactaatttaccttggttactagataacgccataattcggaggtattgtacacaaacatacaatttgttatagatttgaaaaaagaatttacattcccctacctaaccaaaataatagatttgacctcataaagaaactactaacaaacgtaaaacacaccttggctgattctgaccttcattacatgtctgagaacactaccaagtaattcttgttatcacatattattatttattatcaactattattgactgtttttagctttaactgctatgatataaatattttggttaaagaaattgttctttacactctgaagaaatacaataataatgaaagtcttctaaacatcaacgaggatgacctaatcataccaaccattagcattgtaatttaactcattttaattattttataggaggatgttaaggaggttttgaaagactttagaccctctgttgctgttgacgatattaaactttatgagcagtggactcagcaatatggcactcaactttaatttcattatcagatttatcatgtagtttaatgtattacactcttcattccattatatttcagtatacatataaatactactatatatatataactactatatatatataactactactatatatatatacaaacaaattaccaaaatgtatatacatactaccaactaatactataacttgtattgaaaatgataaattaaattatttgtgtgtggtttaatttaattatattgtataatagtacattcgcattgaaatctaagttggactcgttcaccataatcagtttattaaccagaatgtcgttatcgacgcactcaattgacagtgacctgacgtcagtttcactaacactaaattcatttttatcattttcatcaccgtgttcttctttatccaactcatttgaagcatttttatcagaatcatttaacgcattttcattactagaatcctcataaatgcggttataaaacgtgatgatgctgtttaggaggttaaggttaaacctattggtgttaaaacctgtaagaatgacttgtgttatctcttgaaccagcttttgtattaaaacgttgcagtacttttttctggtatgaaccgggttagttttcagctgaagtgtcagtagtagaagactgcaaaagttgtattctttcagttccagtaacttgttgaatatttcgtcaactatcaaatccttgtcactaacgagtcctaagctacactcatcactgaacctcttcaccacctcatctagtcccttaatatcttctatgttatctagtttgcggtataaaacgctgaaaagtttataatagagttttttaaagtgcggataaactagttctaaggacttgttgtcagatggtagtgtagctgtggatagtaaatttgtggataaaatttcacttcggtgtttattattcagcaagtgcaacaggagtaacttttcataatttacaacgttgctaatgttataaaccaacacgtcgttatacaagtatatcccgtcgttaactttcattaaatttatcaggttattatcactaattgacaatatgtagttattagggtcatttaaaacaacttcacttagtttgccagttttatcaactatgtaccctgttcctgtattgacgctcttaatagtagttccaccaacttttaaatttgaggtattagcaaagggtgtgatatttccactatcacagtcactttcctcttcagtaactgtcatggtgtttgggtcattggttattgtgagcaggtattgatagttgctaacgtgtacaatctggttaacattccccaatagatactttatatacttattgtttattatatacacttctctgtatatgttcattatgatataaacgtcatccttttccttattcgggtcatatggtgttaatttatgaaaatctatccaatttttatctatataagagtgctccagcccatccaaattttcattttcatctaaattttccttatcatttatagttccgttatcatttatggcttcatttttatccaaagaatcattctcgtccataggttcattctcatcaaaaggttcactttcggttggtagctcaatgaaatctctaagtgttggtgtcaacttatcaatatcaattgtatttacgagtttataatttatataatacaggtcatatgtttgtatgacgttattgctcaaaagtatcacgaacaggtatggcttgtcgtggagtatcttaactggctcggtcttgaatttaatttcaatcaacttgccgttaatgttataaaacacgatattgtacccatctccagattccaggacaatatagtagatgtaatttgtgaagaagttcagactcactactcttgtatcgtcgttctttaccaggcttgttctgttattactgtacaaaaggacattatttccgttataccgtatcagcatgtaactgcaaatgctgttaattttaatatcattgatgtggtttatattgtttagctttatgttatatgtgaagttcttatttctcttgctcgttattgactttgtgctcttcttataaatcggagagagttgatagtttgcagccaagtagacgctgtggttattgtagaaaacgttatacttatcattatttctcaaattcataatatcgtacaacaaaacctccttatctctgaataacagtatcttattatcaatcaccacaatatccttaaccacctcagtactcttaacttcattatccggaaatgaaggcccatcaggattatgtaatctaggagttacatctgcttcacttggttctgacactttcatattaccaaattgactctcgaatgaattattatttgaaagttccaatactgaggccgacttgaaaaattcttcagatgaaacgagttcactcactccgttatttatattaacttgatataaaatgtgtaaataataggtgcagatgtgtattgaactgcttgttaatatgaacaagtaatcgtctaaccattttaccgacttaatttcactatcaaacttaagccttgatactattctatcattgtacagtgtgttaatttcattatctttgaagagaatacaaaatatcatacggttttcatttatacacattcccttaacgttttcacacattatcttacccattactattcctttatctggaagtttatcaggaagttgatcctcatcagtgtccttcactaccaaattctcatcatctttttcgttaactgttaggcacagtaacaggttactggtggttagaatatacaaatggttatcatttgtgtgatatatgtttctcacttcatcgatttcaagcgaatcgttttccctcaaattcttactaggagttgagtcagcttttgtctctacagatgcattaaggttatatttttgatcttccagtccttcgaagtcattttcttcagatatgttattaatattatcaacacactttgtgatcataccgtccaaagtgtggctaaagattttattcctcgttcctttatatatcaaattattatcaattacattcagctttaggtgtatatagcaaaggctgtaaagaaaattaacgtttccgataatattaatatttagaacgttcgttgttagtaggtacagattaataacttgaggggtattatctggtaatatactatcaactatgtggttcaaaaatccatttttatatatagtcctgtagaagccagattggttgtggagccaaaaatagaactggttcttaattgtgtagaagaaactgaaatcgtttggtactactatatcgtagataaacttcaaacatggcggacttttaattctattttccagctcatcttcagagtttataggagtgtcattggtactggtagagcttaaaattaacaaatgctttaaattatcaaccagaagtcctataagattaggggtcggcagaacgattatatcccgaaagtactcatagttgcccagttctgacagcacaaaccttcccaaacacataaaatcattgtcgttactgtacacaaacagacatttttgggttaaaatataaatatatgcgtgacaatgacttatttttacatttactattttgttcgctaaaatttcgccatttttatctctaatattcggaagaatataagaatccgggtctcctagagtaaaaatcatttaaaatccttaaaattcatagcgtgctgtaaacatcttctcaaattccaccaccaagattccaaatacaccaatcaaaccaaagtaaacaaacaaaccaaatatataacaaaaatttcactacattaaatatattacacacattatataaagtaagtgagaaatattaacttaaacacaacatttatatttccttccaaacccaagatgctcagttgagaaataatttagtttatatttaatttaaaattttagaaaataaatctttacataattataaaaataattaacacaatgatatcttttaaatttacatttttataggttatctcctgaataagactttcattaaggttaaatttccgtttataatttacacattccataaaataactcaaattatagttaattatatataatctattatcgggaacatatgtaagcatttatgaaatgtcatatatgttatttccattccagatccaactagaaaataagcaattttaattttattttatttataacctcctcactctcttgagagggtttctggaattgtgaaacatcaaatggctgactcaaagagataaaaaatgaagttttacgtatggtgttagaaaatgactagccaagtcttctcgttagcccctttacaaacagttttgtttataaaaacaggataccagaactcatgtcgaattctgcacaatttgagaaaacgaaatgttgtaaaatcagcaccgctcagattcccaaatcaaaggctgtaaacatatcccaaagcgttctaataaacgaaactacagattctgaggtaattaaactgatttcctgaaacttcccattatatataactaaatcaatcaaaaatttattaaattatcaggaaaataacttccaaagcgatagagatgccatactgaagcccataagtcaggtgggttatgatttttattacattctttagaaaaatgacaaaaaactcaaagcagacactccttactatttcgatcgagatgaaattatcgaaaaaacaataaatggtaactactgtgatcactagctaactatcattaacactttaattagatttctataaaaatggaattctgccagttattaaagcactgaaaaatgaactttcgtgtcatcatgctaggttcatcgaattaatgattaagctgacattcaacaaagatatgaagtcatcaaaacaactcagtaatatcaaagctcatttatttgcttagtcgatttattgccgaatttgctcactgctatgataataaaacaaagcgatatcgtgattggattggacaaaattacacagaatattgactcaatagaacttgttaagtgaaactgaaatcatcttttaaataggataacccaaacgcttctttgaaaaccttacacctgatcaagtttctgatcgacagaggggtgctctacgagacttacctggagatgcttccttacgtcttttacgaatgtgtaacaaggaactacaagctggttcaactaactctgatgcagttcaaggcgtttgaaagggaaaatgaggctcaaaaaacttcagaactcatggatgtttcagactctgctccaaaagatgaagactacttctcagaactccttaacattggccctgaacaggttaacgagcttgctgtttactcattaagctatgatgaagagattaaagaatatctaaaagagtttgattcgtaagatctcatttgttgtagacttttaatttacagagaaatatgccaggaagtgatcgatgtgctttacaggaacaatgacgtagaatatatactacaagtaaacgatgtttaataaattgtcatttagttcttcgaggaaattaaaaagagatatctaactcatgaatttctgcaactctacatccagaggtcaatattcaggtcaatcatgtgagaaataacttataaatttaatacttcagttatgtgatgagggttagtagaacattggaagagttaatgcacattattcccaaaagtgttatggaaatggcattcatgagactactgggggctgttccgagaaattgcgctgaaagcacagaggcacaggacttattctgtattttcttggtattttgccaaggtccataaatgagatgtaggcccgatcaattgttgacggactagtgagtgcgtcgtacattaggaaaatcaaccgcgtccacattggaggtattcttggtgtagagttaattggcaaaaccataaaatgggttaaatttaacaagaacattcacagagcaaaggttagaaagggttaagataattatgaagtctgggataactaatgtatttaaattcaggagggaagcaagcttgttattcagttccctatggaaatagttttaatgagacgagtgaagattttagggctcataacacaccttttaagaacaggacaagtctcagagtttccaagaagactgcacgaaatcgacacactaaacattgatgtaggaaatactaatataaataaaggggtaaatacaaattataggttgttttcactgtaagaactttgttaaagaagtttttaatgagggaaaatggactcgtttcaaaggttactgagataatagagattttggtgcaaaagaagttaatagaggggaaattaataggggcgatgatcaaagatatagccaaagttcttcaccaggtaaaacaaataaataacaattggggtagattgatggttatggaattcattcggacaggaatctgtcaatgctgaaacagagcttggcggagaagggtcttttttaaaaaaataaaaaattaatatattttgtgtagaagtaaaaattgaatttatttactatgtaaatttgtttaaaaatttataatagtgttaggattccaaaacccatacacactataccgtggttggaataactttaatgttattttatttttaaaaataaaactgtaaaataataattacaaattaatcgtgttctggttttgagggtgaatgttcctaggatcaaggtatgtttttgaattacacattacacatttagccaaatctactactatctcggaactgggttgttgtttacagctggttcggcggtagtttacaatggctgggactactacgctcctcgccaaaacaataaaattatttgcctggcgcatattaatactaatctattagcttgcctttggcttattcaggtactaaataactaggaatacgaataatttaggggatattaatgttagcatgttgtgttagttatagtgtttttactagctatgacgctaaaagtaaaaagaagacctttttagtgacatattcggcacttttccttaaagtgtgccctaaagtcgtaaagttgttgcatctttttaacttttgtcagctgtttgcaatcatctttgaccttttaatacttccagaatgtaactcttataaacttcgatatctctttggtaagtttaactatcccttaaagcctttagttatcgcactttcaattaactggctaatagccatttggggtctaatgctacgtaaaaggatactcttgccaccctttgtatatgacccggcgacatataaaaaaggctaccttaccagtcttagggtttgttttattttttaacatttttaggatttcatcgagcccatgggtatctaattctctaatctactatcaactatattattcatgttattacactattatatatttgtatagtgtgtatagtagtattaaaatgtagaatgcaatggttataagaggggttgtgcaagttcatgtgtgttgatgggttgttcagtggtatttttgagagctttttcgatatctggatctaaaaccacagcttcagattcaattccaaatgcgtttatgcctcttacaattttgaaaaagccattgtctccccaatctttgccccaactgtttctggcaacccaatatttaaagcctaaaatccataattaaaaaaaaacaaaccttcgtcagtttcaccccaaccaatcaaagctactgcatgagttgtaaactccattccactcaaaaatttttcattaaattcacacagtccgcggtgttttttgaggtcctcttcagaagggttaatcaccgcttccttgaaatgtttaatgtgttctccatcaattcccgcaactacaggcccatttagcataatctcattcatgatcaaagtttcacctgagcagcgagtgcactcgtaacagccaccaacataacccacattacttgcaaatagcctgaaattctcctctttgggtggacatttcagattatcgacgacttcctcaggcttttcattgtccaaaattaggccaaactcctctgcaaatttgccaacattgactggaaatccacctttacagccctggttatagggaatacagctaagtgagaggttaatgttgaagttcttatcactcaaaaccttttctaaatgtaaaagcctcgcgtctgatttatactcaggtttttttaacaactctcgaattcgaattaaaaatctagcatgaagaacatagagggaagctatagtataacaacctccacatgttttttggttaacaactttaatattgtcaaatctgtcccaagtaaagtttttgggtaaatttgaatcgccactctctatactctcactggaacaggtacaaaagtaattgcgattatactcactccaacccttgttcgtgactggatgaatggtctttttaccattaaccaccctgatcaagtccctggcaaaacgttcgtaaccattttcagttgtatccacagtgttaaaaacgttagtttcaccagcgtttttcttctcaccatagcaacagtagtgggtaaacttgtttccatatctctttgaagcccagcctaaaaatatttaataggctaaagaattaccaattagggtcttgtttggatttgtgatatacttattttcctcgattttttcaaaataaagataaaccaatagatcgagaccatcgtttaaagttatccgaaatcctgaaaatttatattataccctcgaaaatattgatattatgagtgaaataatttaaaaatctagttgaaagtgagaatatgtgtgaattagtgtgcaaaagtaccttgatcgtaaatagaagtccaatgacccactacataaccgtgtgatttaacagctaaagatatccaattatctctgtttttagcgttggtaacgtttttgtagtctattttatcaagtgtgagttccaaatcaagcgtggttccaagccctaatgaatgtaatagtgttaaaacttaccgtaatcaccggtcatcagcttcttatagtccccaagattaaggtcaccctccaaagtgtttggaagggtagaaccacaatttacattttctccttcgacttctttgctcaggtcaaatttcctgaagaagaatgatcaaaaattcaaattaccagcgtccaaccatatcaccaatcgtggcgtgaatgggtaaatctgcaactacatttttgcaaatataaaataataaaactgcatttagtgtaaggattttcattattctcctcaattacctaaattaaactccaaaagttactatacatttgtagaatcttctggaaatcctcgattttgactatgttatttaaaaattcgagttcccttatttattattaatattttacaccaaattaatttattttaaagctgttaatttgttagtttttgcaatgaattttggcaatttactcgttgaggcacagaccatgatccgaatgtgcagtaatagcatttaaagcttttccggaaaatttaaatttagttttaaaaataaaaaaatccgatactcttaaattttaattacggctgttttttagcagtttcagccatagacactacgcaagcactttaatgcacattggcattactaacgttgtatttttcctgaaacttaagtactcgacatttcttcaaacaattatcttatagaatgggaaatcggataaatgtgtaaattttaagtaggatattaatggatatgtttaaagtgagtcacttttgctctggtctgaacttgtccaaaaagctgaaaaaaagttaaataaataaacagacttggcaattctatcttctggaatctctgggcctatgtttgcctttgtggttacaactcggaaggtgagtgtaactcccttctttccattcttttccgtcagcctcagttcctctctagtttgtttatgatccaagcactttgaaagatcaatcatttgtgtatatccataacctctaaactctactctctttccaccgtcttccagtacggtcgtttttatacatgacagatatagtgttaaaacattcctcgcatcacatggtaaaacaatctaaacaactttaaacagagttaattttacctcaaatgagtcaaaactgccgtaataagagtcatggacgaattcgggttcgattattttagaattttgccttgaatgtgttaacgactaaaacacatttttatttcaattcttacctcttctatgaaatcctgatcaaaaatagcagtaactaccagttctagttttgagggcgcttttacctcaggtaattttaaattcctacacatttatttattgtgaaacttactccactgatattaaggtgacaattactttttcggccttctcatccagctctggaaactggaatttcttctgctttaattgattcttttcattctttaagccttccctaattgctttaagtcccacaaaggtacccccgtatgcgttcagcgacattacaaatcccaaatgtgtatcagaattttatattttccaaatattctaattaaattatgtttaaaaacaatgaattaattaaatattagttttatttattcatacaaaacccttttactgtacttttcattttcccagccaatttactttaaatctgacccatttgtgttcttatgcatattttaatatttacaatttaattattttttcttacaatttacttgaaggattccaatgcttacaacaattgatgtaaatgcatacacatgtgtataaattaaatgaatactcgaaagtgaatagttaaaaattctaaaaattacttaaatttagttaaaatttaaaaagttagttgaacattatttacaagagaattgcgagattccacaggttaaatcaatttgcaatattaaacattaataaagaaaattccaaacctttgggaccaaagtttcattattagataaaattaagctcaaatcgttttaatctaaaaaataaattatttgaaataaaattaagagttattcgggaaattaggaactggttgacgtaggagtgattgaggattcatttccgaacctcgaaacgttagtgtaactatgtttgtttctggtacctttggttttgaaactgctcacaacatcgtcgtacaccttaacaaccttttcctttaaggggtaagcacaacctctcaaggtgtttcccgtttctacacataagcctcgaactgagtttcccagagtctaaaataaatttcaatatcatacacataccgaaaatgtctcaaataaggaatcggtaaaccccttctccttctcctcctttccttccccctctcccgatgtgtccttttgttctcctaatgttctagcatcatccagtgccatttttaaccgattatacactcaacaaaaaattactttaaattacactcgaatactttaatattgttaaattgtttaaaattgtccaatataaacacaagattttatatacttgaagttatctgtttgaaactataaattcgaagaaattccacaattttcaatttgtgtaatattagacaattttaaaattattagaaaactgaaattcggaacataaaaaagtagtgtacagtttatgatgtaaggtgcaggagttagggcgtaaaaatagaataaattctacaaatcgtaaagtgaataatgatattaaaaattctgggcaatgtgtttgagtacctcgtacattaaaaactgaattgctccggatggtaacgatttcaacatagaaggaaataacccatgataaaacgccaaaatccctataccaccaaaatttaccctcattaacacatatatactcaatagaggtatgtataaaaatatgtactataaaggtgtaaaaatatatactaaatgtgtaaaaaggtaccttcatttttgaatatatatttcatacagtagatggaatctctatataatctattttcactagaaattgcattattcatcattcttttcctcacggtatctcctaacccattattgaaacagtttgaaattagtttgtgtacctggaaagacaatgaaaagggcggatgctccggcagctgagccagcaattgaggacataaaggcgatttgtttcattgaaagtttttccccttttttagataagaaatcgttgagcgccttgcgataaaaatcgaaaaacgacaactgtaatgccacatacggcactccagttaccatagtaggtatgaaacccttgtaaaatcccattaaaccttcagtcttaaatatctgcgaaaaacagtcaaaaatccctaaaagcataagtcacagtgtatgtttataccagtataagtgcaagttgaaagatgtttagtgttaattcccagcgccattcttacacttagaaggtccaatgggtatgtaaaactcttttgaactaggcccgcagttccaccggcaattagcgaaagtataacttggttttgcgattctgctcttttctgatttgatgatgaaaatgctctggtcctcatccaattctgtaagagtgagtttgactttaaatactctcgagttgagtcatttatgccaaatttagtagcatagcaaatcccgcctcttattgtatttgccaaatttcctctccaaaggccttttaaaccttcttccctaaaaatacgctgagccgttctaataacgccccggtatttcttttcaccaactaacccttcattgctatattggccaaacataggctgaacttggtataaaaggcggatccgatcgaaaggagcacaaatagtcttcgttatcacgccagaaagtaagccgcaaaacacaaacgactgcttcttcctcctccgccattcagaatcatctgccattataactttattttacaaattccacacatattctacataatggactaatttaacccagtaatgtttcttttaaaattactcaattaccaaaatgatcatttatcatgtatattactatcatttacatcaattatttacaaattccatttgttttgaagaaataatttaccaaaaaattaatttattcacaaaaactgctaatataatagaaagtaaaataaaatagtgtataataaataaaaaatcacaaattaataaataacatcattataagtaagcttggtgtaaacgttataaggtggaatctttgattgtcgtgtccataaaataaatatttttaataaccaaatacaaaaatgaaatcaaattaatgtattatagtgtctgatctaaatttgtttttaattactttctaaattgatttttttacttgacacatttaccatttacacttttggctttttaatgtttatttcaactttttagactaatttcaacaattttgatggagttaagagcgagaccttctaagcataaggagaccactcgtcgtctaaaacgacctttagccgaaggttcagattctacacagtcgggtgacaagattgttcctgatgtgttgtccatcaagtctcagaattcgtcactctacgatctttcgaatttaaatgacacagttttagtttctgaaacttctccgaaggggttctctgatatgaaaaccgacttctcggacatgtgtacccccttaagggtcacaggcaataagtcctctaaagattcagaaacagaccagtatattagccttctgagcagtttaaacaaatctccatctgttatgggtgactttgatatgaattctgataaaactaataatttccttttcacacctagtcaggatagtcgaattactcctaaaaatgactcttttacacctaaccaaacgaaaggattactaaaaactaatcgaatgaattatttttacaaacttaaagatacgcccatttctaataaatatacaccagtttcactaaaagccagcacaagttcatataatgatagtattatttcatataatgatcttcttaactcttataaagataatgtaaattcagagaaagataatgttgatttatataaagagagtctagtttctcaaagtgatactcaattttcacaaaattatgttacacattctcagaatgaaaatttaatttcatatagagatacgcaattttctcaaaatgagagtatgctttcacaacaagatactcaattttcccaaaatgattttacacaatctcaaaatgagattgtaatgtcacaaaatgataataaaaaattggacgacgatgttttctttgaggatgacccaaaatgcgataaatctgcaaaatcaaattattcttcactcaagaaaacatgttcggcaaaagaaaacgtgactaaagattacggaagcctttgtgacattttaagtttagacgatctatctgatgtaaacggcgataagtcatcattccccccttcaaattgcataaaatctcagactattgcctctgatgaaacagatactgcaagttcatcaagtggttacataattgaacccaggcaaactcgaagccaatataagaagaaaattcagcgaaacaattctcgaaataatgtgaatgataatcttaatactctacccgaaactaacaaagatgaatcggttgatttaggtgaagataatttggaacataaaactactaatttgaacgtcaaatcgaaaaaatcggatgctaaatctaataaattggatacgaaatctaataaatctgatacaaaatctaataaatcggagaataaatcaactaatttagttgacgagaaggaaagagtattaagattaggatataaagataacatattatacaataagtacggaataaagtatgaaccaatggatacagatatgagaagaaaatataggagttttgaacaactttgttttggtttgggctgtttcgtatgtccaaccaaacaagagcttgaaatgtgtaaacagttatcaacactaccagatgtttccgcgctttcacagtatgagacttctgtgtatcagggttgcgtgttacgttcccgtgcatttgagactatttggcgtaagttttgtaaccgagtgcttggaatcgttcgaaggtatattttgaagggaattgatgaacttgtgaggatagttgagtcccaggaattaattgaaccgtttctcaagctaatcctggttgatttgggaacggacagacaggatcaacgactatttctaagcattctacaagatgaacttaataaccttattaagcacaagtatatactcatcagagttaataacaataataacctgaacgatatcataaaacaaatgtacatccagctgtatactcacttgttgctaagtaataataatgttaacgttggcactactactaacactaacattttaagtaaactgatacacctctacaactcatttattaacaagtgtaataccaacacacccaatactcccactaacagtgccagcactccaactaacactgctgtgaatgaaggatacgagtttgtaatagtagtggataagctgaatgagcatataaacgatatattatatctgcttgagatgataaagaggaggaaattgttaccgataaatagcataatcgtgatatcctcaaatagtgaatatatagaaaagtattgtaacactagaatttacagcaacttgggcattttcgagtgcggagtgataacagtctcgaacataattgaggaaatcttacaggttctgatgtttgacgtttacgtccaggactttatcccaaacttccgaattttactggacctgtacgaccagtataatgatatagataactcattcacaatgttcatcatgagggtttatcagatgtatgagcagtactataacagtttcatctttagttatttgtcaatcctgccaacacattttttcaagtttacaaattccgaagactattacactgatattctacttgactcggagattaatcctgacccaaaaactgacaatctggttaaaggaagtcaaatgcatttagataaaacttcaaaccaatacgctaatggaactgataacctaagtaacaacaaactggtgaatgatggcagtaatctattgaataatagtaatttggtgaataatggcagtaaattatctaacaactctaataatctgacgagtgagaataaaatggtgaataatgagatggaaattttagtggatttaagtaaaactgagacaagcggatttgataatgaaacagtgactgaaagtgatcctaagccaaaggaaaacaagttggaattatacgagaatgatgtgtataatgagaatggagtcaatattctggagctgctagacattaagaatttgtatagtgtgtacagtttactgtgtgttagcaataacatgagtgaaaacagtgtggcgtatcttgatgttaaactgggagtatcgctgcctttggagaagatagtcctagaatatttgcccctaaacactgtgattttagtccagcgaagaatcctgttccaacttggagtacacctactgttcaagacgcttgacttcttaccagaattttataattttaagagtaaaatactacaactagtcaacaattttgacaactataaagatatgatcaataaactggttgaccatattacgacattatgttctgaagacaatttattctgtaataatagtttggcgagattaaaaaggctttttaataactttaataagtattacagtaggtataagaatctactaattaaaattgagttatttttaaacaataacgatgtaaaggcgatcaaggcaaggttggatgatttaaacaggatgataagagtgagtaatagtgatgactacactaacatgattaatgattttaaggataagttgatgctgtgcttatttccaccgctgagctcattccccctgacgaaaatagtattagtgcagaaatactctcaaattattacgtctaacgtttgtaagaatagttcagttgttagttcgactagttctggtgcaggtgttggaaacactggattagtaggactggatgtgatattacacatcaacaagtacattaagtacaagataattaacatgtggaaactgtttatcatttactattacattttgacagggatgtccagtgatagaagaggtgaaccatctaatgaacgagatattattgagatttatatcaggttcaacaataatattgagattctggaaaagctgtacaagattgcggtagtaaacaacacaaactcttcagaaagaataagtagtagatcacagcagtacgatagtggcgatcgggatccaggtagttcagttgatagaatggataggataaacggagttgaaaaggtagaaaaggcgttgtctggtctgggttcagttaacattaacgtttacaaaaatattaaaaagtcactcattaacattagtgttaagtttttgtaactaacaatttattggaagattttaattttaacaaatttaaagttaatattttaaaaatttaaagttatatttattgcattcaagttctattaaattagccatgtaaattaacctaatttaaagtattattaagttattacaatttgaagcaagtgttgaattttagtttagcaggttcattttcagggtactcaattccattaacttcagtaaatcctagagtgtaaacctttgcattaactttatgtgttaggatttgttccgttttgttattttccatctgttttagtagttgctggctgtagtagttgtcttctggtgggtttccagtcgcgttttcatcttgggtgtttgccaagtacttgtttaaaagacagtccatgaactcattaatgcaggagtccatggtactggtgaaacagtagtctaagttgttatgattgcccgtcttaacaaagtaataataaacgtcgggaatccgtttaatgagctgaattgagtgttgaacaggtatgatgtcatcactgtcgccgtgaattacaagtgccggacagttaagatcctttaccttatcataattgttaaagcgatcgaaaggtaagaaacaaggaactttaatgcgataaatacttaaaaatggactttgcaaaataacacctagtaacttgtattttacacccaaatatatagcacaagtgcaacccaaactgcgaccatacgctattatgttcccactattcacctctaaaaatcattaaatagttatagaattacttagggtattgataaggtagttgtaagacaaatctgcgcagttatacatgttctcctcactacaaactccactacttaaaccataacctaataacaaatttacatcaattaatatgatcatagggtttaaattagtgataaatactgttaaattagtgttaaaatagtgtaatagtagtgtaaaaatagagttaactaatgttaaattaagagtaaaattagtttaagtgttaccgggataatcgtagatgaaaaggttacagttccatttcgtgagtcttttgataaggtttccgaaaacgttacctatatcctcagcattggcgtgactaaaaattatcgtaaacttcgcaaacctatattacacatcattcacattgttaatattatataaattatgtatatacaagggtgtatagtactactagtatagtactgtataatgggtaaattaatggtatacaaatagtatataagtaatagagtagttgttatgagtaatggtattacttgtgtttaatgaagtaggatgcgatggtatttccatcaggtgtaggtattaggtggagatgtggatcatcacggctatatgaagggggtatgggaggcctaaaaattaaagaatctaatctgttgcccatctcaaaaaataaaatacttaacaaatatcatattcaaaataatattaaaattagtcactaggataaattattagattcagagaaaaaaaattcgcagcaagtgacaattcccaaaatccccaaatattgacccaaagataacgaaaaaattaatttaaccctaaaataataaatgtgtaataaattaaccaataattagtaaattactgataaaatgtgtaaaatttgatacacgacactataaataccagtgtatttaatagatgaataactagtataatttaatgataatttgagtcatatgagtgatgaaagggagtatggaaattttgtaatttctgagaatttaattaatcgggaattggggtcggatgttgtttcagaagacgaaattaccataacaaacatcgtacaaattaattcctttaatgatttttaggaaaagaacaaaataataagaataataatcaggaaattgctttatcagtcacctttccctctaaaatatgaagaattaaaggccattgtaaaggaacatcttccttacaagttcaatccaaaactcataaatcaccttctgtgtaatgatttaaccaatttttagtacaattgacagattattagactattcaacttattattcgaaaattttaacacaattttagatgaaattaaacacttattaagtaacacttttggcctttatctagacgatgttaaattccaacccagtaatttttaccttttattgcccctattattacatactttcttaactattatatacatatattattaattttttcaaataatttttttaattagataagagggaattgattttgaagcaaacagtatcatttaaacaccatgatttaaaaacattaaccgaaggtttttaaatttagttttaattagttttaggagaccacgagttaagaggatttattctattacttgttccctgctttaaagcctataataatattttaaccctgagtaagcgttaaagttaatttcgagtgtagagtttctctgtgatttattcgttaaaatccataaagttcacatggttccaagatgtaaatgatttacaaaatcatctgtgattcaggcactgaagaggaaaaggatttaataacagttttaaaaatggttaaaaggaaaaaggaggttaagtacacttcaaaaggttcacaccacaatgataatttcactttagagtacaattatatatcggattacattttatacgccaaggatttgtcttatattaacattgtgtacaatagcgaacaggtgattttaagtcctttaaagtgtttttagactgatttgcttgcatcagtaagcgttgtcccagggtacaggctaagttccgaatgtaagtttactatcttcctttaatttttagttgacatggaaaactttgttgctgtattcagaagactggaccaagataaatatgataaagcacttaacatattctttgaatgacatactactattctacaatcatacacacaatatatagggtacacacaatatgtaaaaatgtatgtttaatggatagattattgcattactgtataattaaaaatcagacaaactttgtaatggaagacaaattcttaaaactatattattgaaaactcttaaagcattgcagcgaatgcgtcgtgaactctgtgaaggagttcgtgtcctgcgacacccttggcaaataatgccttaacgtgctcatggttggtcttgccctttacaaaatcaaccaacttgccaagatcagcaagggcggtaactacaaatttgccgtcaaggccttttactgctacaacatgcttgaagtggtgtccagagggtccccaaacaccgaccaaagctgcatgccaggtcttgcagtctgagagaccgaccaactcagtcatcaattcaccagcggcaaagtctggaaccaaggccttgtgtacaactggtgcgtgtcctagagggccagatgccaaaccatctccaaggtgggatctatggtcaacgacgggaaccaagaacaagtatctgaggtgtgattcaccaacagcacctgttcctgcgtttgcagtatgagcggcatggtggacaactgccaattttggatgtcccctagcaagcaagtcagcatttagtagaaatggatctgcagctacgcttgcagcgactaaagcacaaactaacccagacaacaacattatcaaatcaaaaatatgggcacggtcttcaggataatagttgtagtgagtatcggaatcccggaattattggatttacaagtggggataattatctttctaattttccggtcttttctgacccttatttctaatattacgtttaaaacataagaatttgtgtaacttaaactttataagttgattttacgaacacacagctgatttgagtacctgttccaattcataaatttgacctgtgtcttttaaaattattcatctttaatattgacgattttttttcaaaaaatatttttttaaagtattttaatctgtgaaataccaaaagttagaatttctacctaataatacaatttaatgtgtaaaacagtcaatccatgtgctaaattcgaccttcccgctttaaactatatttgttatttactcacttaaacagataaattatcctattttaataaataaatgaaaacttaaatgtataaagattgactttttaataaaataatagtttaatgctttaatttattcctcagtgtcgtttttaaatctaaatttattaagttcctcccacagttccatcctctccttccctgtctaaaaaggtgaaattgactaaaaataccttacttccatctaatttcggacttaaaggagtaagagttccaaaatcgaaaagtgagtaaacctcagcgtttccagcctccggaaacccgagacgatcactcacattaattggaggccctcgatccaataacgttctctgctccttagcacagtttgtagtcgacaaagtattcaaatatttatgaaactacaaaataacaattattacatgcttagtatacacatacgatatacatacatagataatatagcaatatagtagtatcagcagtagtattggaacctgaattttgagtagatatttgatacaatttatgcaaaatgttgacaagtaccaggaggagtctttgttagccttgtaggcgaccatgttctggtttgagaggtcgtcgaagcagactaggcaggtggagccttcgggaagagcaagtgactttacattttccaagtcgctttcaccgaaaaaaacgtcactttccatttaacttaaactcattattaaatattttacaacataatgttaataaagttggtaacatggatataattactgaatatattagttaaaatttatggaattaaaaataaaacattttttcacaaaacagtccaatttacaattgcgataattaatttttacaggttcaaaaatggattctacacaacaccaattgtcaggattccatagtaaaatgctttttacacattttaaaaatataacattaccattaaaaattttcttacacatattgtatattatgttgtaaactaagtaaattattcttatgggtacatttttggttgtaatttggttaattggcttgggtttggtggattcctacaagaatatcaaaactgccgatattctacaatggcaccattcacctaaggtaaatgcagtgattcaaagtcttgacaggaatgtaaattacagcagagttggctttggctatgacattcatcgggttgtgaatgctggtgaaggcgggaaaacgttgattttgggcggcgtcgaggtacctggcgactctgttagggttttggcgcacagtgatggtgacgttgttttacactcaatttcagatgctgtgcttggagctttgggaaaaggggatattggtgactactttccagatacaaaccctcagtttgaagattataactccgttaaaattctaagaagagtacttgaaattgccgaggaaatgggctactcacttgtaaatgtagatgcctgtataatattagagtacccgaaactaggcccagtaaaatcgcaaattaaagaaaaccttcaaagtcttcttggccatggcacagttgttaatgtcaaggctaaaactaatgaaaaactcgactcgattggtaaaggttctgctattgcatgccatgcagttgtactattacaaaatatctaatctatatcctccacgaactgttttactataattgtactattaatactatatatacgctatataacatttaatgaaatagtgacaaaattaatcttgagagtttatatcatcctttgaggtatcttcagttggaatgtgtagtttctgttgtcttattcttacgttccagtgcaagttctccttaagtgacctgcaccactccttagtggtccaggtctgtttgggtagaactagcgggaactttgtgtttgaggttacgattttaactgagcacccatgccttatgttacaggaataattaccatcaatggaaactcttacgtagccacggttatcgggcggtaccacaaccttaattgtagatgtactcggcaacaccaatggtctataggatatcgaatgtggacaaataacagtaaacaacaatgcctctacctatcacatgatttatacaacaatcaatttaatagtataatagtataactaaataattgtgtgaatgtgtttagaaacgtgaggatgtacgattgagcctcctgctgacattgaatatgctgttgatccacttggtgttgttaacattaatccatcacctgatactgttgtaaaatagtctccattataaaacacatcaagagttgttatatagggtgaaagtcctaaaaatcatcactaatatactaataactcaaaattaattaaaaatataaaaagtatttttaaaggagtgtcaatagagatacctctgtcgataacgcattcattgagggcatttctttgtacaacacattcaccgttttcatttaggatattgacttggatttgcgatctgagtgagattttgaagcccttggtttcaatatttgcaagtgcttctcttacagtttcaaggttaaatttagccatataaccgagtgaacccatagtaatgccgattactggagggatttcatcctggaaaagcttatttacacgcaacattgtgccgtcgcctccaactgtaattactaaatcaacttcgtccaagtctttttgggacagattttgagttttcaaagggtcctcaaagtgagttaccatttgacctctatataactcttgcacctcaccccaaagcttatcagtttctggaatctgggacaaaatcgacttgtcgtaaaccacctccgaagtcggcaaatgctcccttatcactgaaaccaactccgccaatacagaatcgatgttagggttaaaaggggataacattagcaagattttcttaggcaaagtattgtacaataactccatactgttctgacgaaatggagattcagaacccaaatttgaaaataacctcctcaacgaatttttctcgtataccttcctgttcattgttataaatctagtttacattatagaatggataattattaggctatttaataacatttgagatattctaaatcatggaagtgtttaagagaggattccagttagaatacaaaataaacaagagtaacgttgacatataatttatagattttataactacagaaaaatgagttagattctatttttttaaaaagtaattaacctggaattagatcaattttcccatttaattcaccacactaatgtttttaaaaaaatttaaagtaaaacgcttttttaccaaaaaattttacttttcaattaattttatttatttcgtttgaattagcatttcaaaccactaatttactcaatgaatcacacttttaacacttttgtgtagatacacaacatctcattctttttctcatatttcaccaccatttgtgaattttacaacttctaaaattgtttaatttaatttgtaaaataatattatgagtaggttttactctgatgtgcatttggtaaaaaattcttcttacacattttttcccctaatgtctatgcttgatgcttaaatagcctgttaacatggacgatctgttcactaacgatcttgcaaacgaggaatcacccgaagaaaaaacccctgaggaaaaatcgtccatagaatatgacggcgattttaaagccgatttcggcgttatggacagtgatgagtcatttatcgtagatgatgacaagagtttatcctcagacgaagaagatcgtgacgttaagtatgatgcggaaggtgaggatgattatgatttcctgtttggcgcacctgaagaggagccagaggtaaaggttaaaaagcgtgtaaaggaactagaacgacttcttacatcacgagcaggtgcttatgaagaatttgaaggagctgaagatgagattatacacactctcgatgacttggtttaccagtatgaacaccgtcaagctctcgagtctgaaattctcacactcttctctggtctcatcaaacgtgaacatatatctcatcataatactactgagactgttaataaccttaacactgatagaaatacttacagaaataatagcactcttaacactactgctagtaatatggataattctgtgatgagtaagaagataaataagatgatgaaaagaataataaaggaaacgtttaaagatcgtgaacctgaaggtcgttttggaagatttggtaaaatggcttcaagctcaaatttacgtgatttagaccacgaaaaggagaatattgtaatgacaatagattcagaagcacttgagaatttgcgggacattaacacacttttacatcgtgaaagaggtggagattatgaggatttggatggcatttcactttacaaatacccacgctgtgcctcagtatacattttcgctcaaaattttatactttcctctgtttccccactctgctcaattcttagtagaggctccgctaatgaagaaattgaagttgacttgttagtaaatgaattagtctacttcttttatcaaatcacacaacctccaactgagaattggttcaactactggcattcagtgcaggatatttacaaggatattaaccgacaatacacaactagtcaaaactcgacaatgaatcccaacattttaaaagagttaaagtatagaattaggatcatagatgactatgttaacggtttaagagttgttagaagtgcaatggagaactctgaaatctggtcactaatcggtgaatttagacttaaattggaacattttaaacagagtaactatatcacgactgaagatttgaatactttaaatgggttaaagcaaaggcaaaaggagttatcagatgaacgtgattatcttgtacaggaccaggaagacggaataacactggtgaataaacttagaaaggataaatctgtagtagctgaaaataaaaagaggattaaagacattagaacagaattgtatgaagttacaagtcagataaatgagataaacaagaaggtggatgatgccaaaacaaagtcagatctccacatacagactgttaggattttaatatcgcaagttttaaccattaattccaatatgcaaatgttactaatactaaatgaagttggtttattaaccataattaggcaagaaattttgcaattatttcatcatacaactaaagctattattccagttcaatacaccagtgttgatgctaacggtgttaataatgttaatggtgtgaatggccttactactaacactaacggtgttaataccagtaataatgataatgtagatgactatgagtattatccgagttatttgacggaaactgagcggagtagtttatgggaatatgtgagaatagtttacaatatctttacaggattcaacattaactacaaaaatactatagaaagttctgttcaaactaatacatctaacactgtcaatggtactaatttagctggtaaggaaatggagaataataaactggatagtaatggaattcctgtgaatgaatatttgatagaaatgtacagaatgaaccctaagttgtataataaatacaagttatataataagtataagttgtataattacagtggtacaggtcgggaaaagtataattactactacctgttcagatttaactcatactcacaagcacagagaaatacattaaattccggcactgaggaagaaattgaggctgtcaggactgaaatcgagttaataattgggaaaccaatgacgggcccaactcttaactcaggaacaagtgaacataaaattgagtaccaattagtgttactattatcaatatgtgcacaagatgttaatagagatgtaaaggagttttattcagaaccatttgacaggttaatagtactaaacattaagtcgttaattttattatactactacaatacagttgtaaagggtattagtacactattgaatttcaatactgtgttgaaatatgtaaatgatgaaaatcttttaagaagtatgttgttgaattatttaagtgatttggtaaagaaattcaactactttaataatttagtcactgttcaagtgttacaaaatgctcttgtagaactgctattcctactcaacactgataagtgtggattaaccagtgataagtctggaacaaacagtgataatatgactatatcagagataaggaatatatttgtatattatttgaagactaatgttagacaattgttatttagtgttttgaagaattataagctgtgttataattacaaactattcatattatcattaagagttttaatggttttggagaagtttatttcaaagttcaactctgttacctttacaacttctaaggttagtaattttgataaggatattgattttgacgacttttcagatgagtctgagtctgaaatgagttactcaacttcagccaaaaataacataacggttaacaaaaacaatatcttcaatagcaaaaatgtaaataatacccagaatgacattttaaaaaatggtaaaatagtctacaactcactgctactcctattcaaactacacaatctctacactattaataatagcatgaacaatatgaataatcatattaacaattataggaataatttaaataatatcagtactactagtaatcatgtgaataataaactaaacacttttacctcaaatagtactactaatgctgttactaatagtagtgtaaagagtggtttggatgtactattgttatatttaagaagagtacctgtaacatatttttatgattttaagtatttcttttacttctacaacataatgtataatagtggccattacaattcaatgattgagggatgcatggatggttttggtgacgttggtgacactgtatgtaactttatgatggatgttttggaacgatttttcgacgactggcttttgcccagtaattggatgttgttattagagctgttttatactaaaaatgtaccagttagcaatagactaaagtataatataaaccataaagcttatatccagccattgctggaaaatagttataaaaatgatacaattctaaagagtttactgaagagtgacgataaccttgttgacattagtgatattacagctgtgttagcagagactactaatactgttacaacttcaggattagactctgttattctaaagtattatcagagatttaagtatatggagtatgacaacttggtaaattacttatcagagttgcttaatctaccaaagagagttataatacaacacattgacaagtttaatgaagagggtatgactcagacaactaatgaaactagtcccctaggattaacgttaagaaatttgaaaaacaaatgtgggatggatctattgaatgaactgtatgataacattgtggatgcgtttgaaatgcataaattatctctaaagaggaaagttgacgtgattgagccgatgctcctgacaaatgacgtgaaacaggatgagaattacagaaatttagtacaatcctttggaataaatgacgaattcaagatgactgtcaatgacagaaaccagactcaaactctgttaaacacttttaaacagtttctagaaggtgatcttgaggtcaaagatcctgacactatgactactgatgatgttgaacaggatgaaattgatgttttcaatgtcacgtctaaagacattattaaactcctactacaaattaaactgtcccatgttgaaggcgtgagttcagctgatggtatacccggagataatacaaatgtgaccgatggtctggacggcgataatgtgaatatgacggataatatgacagttgatcgtgtaactaataccaaccccagtagtgataatttggatattgaggaattatgtaatatttgtaatgatgtgataagtgagaatgtagtacgatattataagatcgataataaggacctgatgccactatataggaaattattattgtattgtaatgttaaaattgacaataatttgttgaaactcaataataaggaaattggtcctgagattattaaaaacagactaaatatcatcaaatcattacataaactcagtaatgaacagttgatcaacatttctaacaagtttaatactcaaaccaacaccactcctaccaccactactgacttacctaacaatgaggtgcctaacaatgaccagtcacaaaataatgaagtagatcatgagattgatgaattgtttgatgatactaatactgaaagtacattatcaagcaggagtcttggtaagaagaagaaattaaaaaggaaaaaaactacagaaactcataccgatacaaccactactgttccccaagatgatactaatataactaatttgcagtctaaagatgacaatgacagaaccaccacaaaatcacaaattgacactggtgtggatgttgaagtaagggataaaaagaagagaagggttaggaaaccgaaaacaccacttataaccagtgaaatggtcggaacgagggtattggactcgagtgtttcagtgcctgaggagcttattcagagtctgacaaacctcaagagggtaccagagatgataattaaacttcatgaacaatcgctaaccttagccaaaaacaaacaactcatcaacagtctaaaccacgataatttcaaacaaatcatctcatcaatataattttcttgatacatactcgtaattttaactattcgtactcatagataatatgtattcaatatctaaaacatataacacttaaaataatattaaaattttgcaatctatgcgttatgtgaaattatacttgagtatcattatcagatttgaggagtatctcaaatcaactacatttggtgagatttgctatggtacagcagcatttataaatgttagttttgaaatgtgaattaaattgagtttgacaaatatttagaggataattctaagaaaccaggtgttcattttttcttggaagtggcagtatttgaatcagaccctagtctcttatattcggtcgcactcttatagacgtggaaacagtttgaaagaagacctagtgaaaacttcttgatgtctttaaactccgggtcatccgaacttttccaaatctcactaccactgtgtttaattttcagacatgtaactccactgttgaactcataagtgaaggcaaaagttttatcacggccgacgatcgtaactttataatcagatgtagtgagctctctgtcaccatcagcatagaacttaagtttactaacatcttttctctcactggttaagtttttccagggattactcttaccatccctgtaaaaaagtactaatttatgacttttaagtagaattgcaacatgttttttcttactacctttacccatgagtaccaccatgatggcgtgatcacttggttgagccttccagatttccaacccatttttccctactatcttagaaattgtatgaccagctttggccttgtatgctttatatttacccacacaggagtagtcaatcttatctgtaccctgaccagatttgatatcgatagtttcacccgtatcctcggttttttcagctgtttgagcggcaggtgtagttccagtagccggagcagatccaccagtggcctgagttgtaggttcagcctggccggttgtagtttcagatgaagttgtttgatcagctggagtactaccctgacctgatcctaaagtttgagcagaatctgccggagttgattgcgatgtaccagtggtgtcactggcgtgaactgatttgtaggggcatgatataatgactgcgatcaaagctaatttaacaaatttcatttttatcactattaactaatagatatttaaactgttaattccagatctattctaccttcaaattgcaattcctattcctaattggcaaacggcgtagctcattcttccccattcgtcggttagaatttgtagtcttatcctcttgttaccttattaataaatttatataacttatattatgcctatatataatatataatatacaaggagtatatcataatacatgcatatctagtgatagtatagtgtataaatgttcaatttaaaatatctaaaacatataaagaactcccttaattacacttattttatgattataccatactatgcagttcaaatattattaaataggatacattttgtagtttaataatagtatattagtagtatacagtaaagtgttagaatagttccttgaaaagtttctttggagtgaatttgtaatgatacttgtttgatggatatgacggcaactcacacaagtcaattccaacaccaaaatgaccgcgaaacagttttctctacagcattattaatcagatagtaaataatagtgtaataataaagtaataataactatataactagtttataaataactagatggttgaaaccttgatgatgggatagagtatgatgatgagtatgagaaagagccagagaagtatagtaataaccttgtagttgtaaggaatggtgtgaatattatgttgaacacgttcagctgagatgatttcctcgacaatgtcagccaaagagtttgacagtaagcagcatgaaatccacttgatagcaattgaccaaacaacagaccaacaaatgttattagttctattcataggactgattctcttaatctcaaatctataaccttcaatattcccaataaacaatatatacaatacttcggatacagataacctattcctaacaacactgggattagtattattcacactatttacagtagtactactagcgttaaccctatcaacggctttaacattgggtttatcagtgaaatagtaggaaatgagtgacaaagtggttgctattataatgccaacaagacgtacaatccaccaaagatataaaggtaaagtttcatctaataattcgccaagagatgctgagatattaaagagccagaaagtagcgttgaaaatataaactgagaacccaccgattctatcagtttgatatttaacattgtgaaaccagccaatgacaatacaagtcatcaaaaccatgaaaacacgtcctaaatctcccacagcaatttctaaaaaccaaatcactcttttcccattcctattacacagtgggatacacacaactattaatagcaagcacaaagttcctataatgtaaacacgtttacacttgaggaatctggataatgtacttaaaatcacctcaacttggattgatatagtgaaagcaaccagtataaaacaacaacaaaattgtaacaccaacaaggtacgttccatattatgagttgctataaaccccaatggtaatagaataaatgaagtatcctgttctagcatccataaaatatcagttggtgctctgtataaaaagacactaaagtaaccaacaatagccaaagctgaaacgaattgaagggaagtgatgtaaccagataaaaagccaactcctacggcttcgagtgataaatcataaccgattctagatttacttgcaagtgttgagtaaattccattcccaataacatattcataaatgcaacaacgtactgagtgggaccaaagccttgaatttttatacagtaagctgtagtctattttggtaattgagtctaatacaaagctggtggaaccatctagtaacatactgaaatacaactgtgcatgtgatagaaagaagatcaccaacactaaaatgaaggcgaaaaaagtaaaatttgtcaatccaatcatgtgtaaaatgaaaacaaataaatatgttactgatatcccaatcactagtctgaaatcgattttattaatatccacgtcaacattgtcaaataaggtttgataagctgtataggctttcccaagcttattagctttacattgaccgtttaccatgtaacagagtggatttaacttattacactctaaagcatttgtagcaatggctgcacactggtcaatatcagccacactcaagtcccaaatcatattattcttaaacacgtttataaaataaatcaggtattccgctgaagtacgagatgaagctatgcatgctgatagtaaacatagaattaccatagcaaccccaactccacccatgcctggaaaaagcttatcaaaaacctcaaatggactacatcgaaatagctgacccactccaagctcaaaacataacattggctgtactatgaacagatatgcaattaaatatgtgaccaaaaatatcaatcctcgccaagttgagtttaacttaaatattgtctcaacactgcctactgatagggccattgttaaacatagtataaatagtgatgagttattattccagtatccagattttagttgcttttgtagccacggtattattgagcctgaaacacttcggaaacaacttggatgttgaaacacatcagataatttcgctacctcacctggactcataccattccttatcaaatccactatcacattatcacttctacttcctatactcgtttgatccactaatccactcttcatactctctaaattattattcatatagtatcatagttatagtattggtacaaataatattgatactataaatcgtattagtatttggatatcttacttgtagattgttgaatggaggaatccatgttactgattattaaaccttgagattctggaactaatctattatcttcagatccaacataatcaatacttgcctgttctataacattactgcttccaatacttgattgttctatcacattaccaatactagactgatctgttatattactagtattaatactcgattgatctactatattaccaatactggattgattaaccgaaatgttgctatcaagtttcgagtttgaaggatgtgaaattgattgattacttgtattaatactgaactggttagtattaaacgtgatattagatctgacgaaactgctggttaagttaagattaagacttgaactagagttcaaatagtctaaaggcaccctaacatttcctaaggaaaaagttttttcctgactagttccataggcaatacgatcatcaaatggaatattcaacagcctgtccctctcattagcatctttatcaaaatccgagggaatataatcattataatttgcttgaaaacaatcttttctcattaatgctctgttagcttcagcttgaatcccatccctctcgacattacgatataaacgacttgaaatcttcgaatacacatttctacgatatgatgatgttttcgacatttcaattgcgtcacttataagcttagctcttgtatgaactctaagatgaggtctctgatgttcactatggatattatcaacctcaggttctgggtttatgccagaaccacttccaatactgtacatactaatgttatccatactcttatcaattattaaaccttattatgcttttattttacacatttaagtttataaaaggagaaaattagtaaatattgaggaaaattacacatttaaaattatattacaaaatttctttaaaaggcgaactagaataaaacaaaaataaaaagaatcaaattaaaacaaacattaaagcaaaaaaatagaattatattacaaaaattttaatttatattacacatgaaactagaattaaattacccattccaaaaataaattccaaaaatttaaatttataaaattaagtattaaataatgtaaaatagggtattaaaatgtgaatcaaagttgtttggcaattactagtcaatagtatggaccccatgggtaaaactaaaagtgataaaaaatattcattagttttattttcataatcttatattttatcctttgttatttatttgtaatacagttaaaactatgttcatataatacagtataaactatgttctactagacataataacgccagaatattactgttcaaaccagaataatactgtcaaaaattgtaaacttataattatattcatattttccgacacaattttagaaataaattactcaataaaatgaagtttcagctgccaaaattcttcttcgatccctcaaaccccgtgggatatgtagtaaaggtagtgttggagttcgttaatggtagtacgcgtctggttcgaaagtgcacaaagcctgaccgtaaggagtatatgaggattttaaatgcctgtgccgttggatttttcgtgatgggattcattggctactttgtaaagttactcttcattccagtcaataatatcctcgttgccgctcccaaataaccaaaacccacattttataactttttaaaattttaaccttcactcttataccgttcatgttattcttgttatttatgctattcatatattgttagctggtgtttatagatttctaagattcctcatatttttatggtgtttgcattttacaatttgtgatttgtttgtattttttctcctttttgtcctgtttcccttcttttacttaatttcatgttgacacccccatcactaatactatttattttatttttatttaataatattctttattcctttttataattttttatacaagtaattttcgcttagttttcgtgtctgtattaatcttttaatcctgatttatcctaaattgtatatcaatggcaaaacgtacaaagaaggttccttattttttatttccacatagttacagaagatattttgttatttttatcacaaaaatctctattaaaatattgttgaggtcaaataataatttttaggttggcttggccggtaaatacggtacccgttacggtgcttcacttaggaaacaagctagaaagattgaaacacaacaacatgcctcttactcatgtcctttctgtggaagagtataatctctatactatttactataattttactttatttggtgttatttacagttattttatagtgtttaactataatactacaactaaataatatataccatgtaaatatcatatattcgtgttatagcatgcaacgaagcgtaaggctgttggactttggcaatgtaagggttgtaagaggaagatggcaggtggagcctggtcacttgtaacatcctctgcttcctcagttaaggctacaattgatcgtctcaacaagcagaaacttgaaaccgcctaatctattacttcaccatattatcacgttatagatagtatctagtatgaatatactatatatggtttatagtagtatgaaaatttaaaagtcagatttataatttgggtgtacttttccccaaacgactagttcatttaaaaatgtttgatcagtgtcttgtgagttatcaactatgaaaatctgaagactcttcacatgtgtaaactttgtgcccttgagcttaacacgagtctcagagtctgactcagccaaatccacaacctggtctggatctatactatcagactcactgaagtcaaactcaggtctattactataaatctaaaacaaccattaacattgttatattgttatgataacaaataataatatatagtattgtaggtgtaaatagggtaaataagaataaaaatgtgtatgtaaatacctgtagagttttaggaggacttgcgtccaggttctctggtttagaattagctcttagaattaagtaatcaatgcaaacgggttctctgaaaaataatttgagaataagctgaggatcaacgtcagaaaccatggaattcttggattctgagcaggaaaaaagaatttcccttagtccaaaagtgccatccaaaacatttaaagctgtggaagtggttaaatctatgcaacgctcctgtaacgccaagtttctagtctcatttaactctatcgccgccttcgactgcgatttaaagggattattattcaataataaatcaacacctgcctgatcactattcatttcataacaccaaaatccttttcaataaaaaatttaaaaatttgaaaaatgttaaaatgcgtgagagaaattatgaaaattttagaggaaattgataaaaaattaaaaaaaccgaaaattgcaaaaaattaactgaaattgttgaaaaattaactgagtggaattgagagtaattttaagtgtaaaaaaccagttgaaattgatatgtggtgtaaatagggtatgttagcgttgcaaaatcagtggaatccaggacaatctgtgcaaataagcacgaaaaactgtgaaaaaattaatatgaaaaaatttaaaataaactaaaaatgcatacaaattcagtatgaatttcctttatctcatgaattcatatccaattttatccccaacatccggatcgaatctcactcagcatatgaatgtaacatgtgaaaacatgttaaaaacttactgaaaattgatatgtgttggttttgttagtattttaaatattattgttaaatggggtttgaatatactaaaataatttaacgattgaaaatcacttgaattgattgttaagtgatgtttttataagtttttagttatttgattattattggcatagttattaggtgtgattattttgtacattaaaataattttcactttcaattcctgtcttgttaatttctaagtaaatattttttttactcccgaatctttcccggtttttcattacaatccattatttcaactcacgcatcattattttaaccattaaataccattttagcagtatatcagccttaaatcggtgacattacaactaatactgtgaaattccatttaatcaacgataaatataactctgtaataaaatttaaacctgtaataaaagactagcaaaagataaataatagttgagaatggcgaagaagaatgtagtaactgaggatttggtggattatgaagaggaggagggtgagaccaaggtatcgaccaaggatgtgataaagtcagctgccggtaagaaatctaagaccgatggtactatgggtcgcggcagttacgtcgcaatccatgcgagtggtttccgtgacttttttctgaaacctgagattcttcgcgccatttcagatgccggcttcgaacacccatctgaggttcagcatgagacaattcctcatgcaattaccggcgttgacatcctatgccaggccaaaagtggtatgggtaaaactgcagtgtttgttcttagcatcttacagcagttagacgtcgaggctgaggagggcaaaagggacgctgaggacaacgtgaagcctgtttgtagagttagttgtattggtattagtcacacgagggagttggcatttcaaattaaaaacgagtttgaccgtttcagcaagtatttacctcaggtgcgctgtgaagtagtttatggtggtgtacctatacaaaaggatgttgccatgcttaaggatcctgctaagactcctcacattctcgtcggcactcccggcagattattagctcttgttaaggctaagcatcttaatatggactccgtgaagcactttgttcttgacgagtgtgataagtgccttgaaaaactcgacatgcgtcaggacgttcagagcatcttcctttccactcccaagaagaaacaagtcatgttcttcagcgccactatgaacaacgacatcagggaactttgcaaaaggttcatgcaatcccctgttgaggttttcgtcgatgatgaatctaaacttactcttcacggattgttacagtattacgtcaaactggctgaaagtgacaagaatagaaagcttaatgatctacttgacactctcgagttcaatcaagttatcatcttcgttaaatctgtttcaagagctgttactctcaataatttactcaccgagtgcaacttcccctctatcgctattcatgcaggtatagtattagtatagtattagttagggttaatttactattagttatggtttataagggtttattgatattttaaccgtattttatttattttaaggctttattttactatatttaacacttaacccttaattactattaatttaccctcaactactattaatttacccttaattactattaattttacccctatatataccttaatcaacaccaaccatcaactttttctgtaggacttgaccagagtgagagaattaacaggtatacccagtttaagaactttgataagaggataatggtggcgacagacttgtttggtagaggaatagatgtggagcgtgtaaacatagttattaactacgacatgccagacagcaccgactcctatttacacagagttggacgcgccgggcgtttcggaaccaaaggactggcaattaccttcgtttcatctcctgaggactcgtcgcaacttgaagatgtgcagaaacgcttcgaagttaatatttccgaaattccagccaccatcgacacttcactctacctcaaccaataacctattcaactcttgattacaaaattttaactataagctgttaaattaatagtataatattgtctccgtccaattatattattatttagtgctagtgatgatctcaatttagttagtcgagttatccgtgtaatgttaccgagccccaacgtaattagttgagttatccgtgtaatgttaacgttcttctgtgtgaatgttatttgaagagtcttatgagtaaaagacttccgagacagatgagtgaaatggtgaccggcaaatattcgttccatttggaaaatttaaaccgagtatatagcagtgcagttaaacctgacaccgctcgagctgtattcaaaaatccaacactcattacaaacttctaaacattacattaatcttactgttactatactatggtaagtattttaaatatatatttagtatgattgcagtgtaatgtctaatagtatagtagtgtgaaacttttggtccgaagaagtggtgtgcagtcatgggtccgatagagaaaatgcctgcgttaacaaagaagaaactggtaaccctaaaaaatataatattaagtaaaagagttaccaaatggagtaaattattaagttagtttgatatagtatgtaggaactgaaggtgagagctagggtactcactacaagtattatccaacaatgcctccatccaattaaatcaaaaattataccccaaagtatacgtcctaagttgtttacagcgttgtataatggtataaaaacagcgtagttaatagtatactatgtaatgtactgttatggtagtgtaaaagtagtgtaatacctataacatgacttagagaagcggcagcaccgataagagtgatgaagatatcagaaccatcgagttttaacagagccactactttccagtaggattgtaagaatataattgactgccagctcaggaatataagcagccacagatatagataatgcctaaaatgctcagttctatcaccagccgtttcatcagatcctaatcccacgatataaccacgctatcggtttaggttaatatatatctgagagtatacagttaatagttaatagtatcattacagtatagtcggtacctagattaattcttttggtaatgaaagattcatattcaggttcagtttgaacagagtctcgtggaaaatcaaatacaacaacagaaacaaactacaaaattgtaaatgaatgcacaaaatattgtgttatgtaatatactgaagttatgtatggattaccagtaggaaaagatatacaagtccttgaagtatgaaaagatttggaagtcttgtcaacaatttatcatctctgtaatacacttctctatctaaaacataatatttcaactgttggaatttatgatttaaactattcttattataggatacctgtaggattaataatattttctagtcttgtgttatatttgttaatgtaaaaggtctgtagtggacacaacgccacagttaaaagtccactgtaaaagtatactgatccgcaaatatatcctctcttagatggattagttcttatcgctgcatccaacggtaatggtaagatcaatcctaaaaacccattatactactaatatagtcaatatagtataaatcagggtatatagttaaggaagtatagttaacatagtatagtgaatttgatacctgaagcaacaccgcctagaactgagtaatagaaaatgagtgttctgaaattgtgaagattaaatgagcaagcgataagtgatagagaggtgagaacacatccaagaattgtagcctttctagtacccagagctttctcaacaaacgatgttaggaatccacttagactttgaagtaacacagcagttgagaaaatgtatgaaatcacactgtaattaatgcctggattcttcgcagtcacacgcatatacgataccaaatacattgctatattgccaaatgtatttatataacctatggaatcattaatttttcattcataattgttgaatgtgtaaaataaattttgagtagactttagtaaaataatatttttattaaaaaaaataaaaaatattcgaattaaataaaaataaactaaaatagactaagatttaattggaaactaaaaattttgagtaggaaggaacttagaatggtgtagatcagcgaagcgcagataatggatttcttcatgttggattctggacgtgatacgatttcatcattgcggaaggaaatggaagactggttagatgtgtcgttgagttggtccatcttacacttttatatcataaccccaaggctcggaaaattttaaaaatctactcaaattctgagctaaaacttaaaaaacatataagaaatgaatcatttctataaaatgtgtccaagatgatggtcgagaagcctacaatattaacaataaaaaatgtgttaaccccattccatagccaaaacttaataaaaaaattcattacgtttattccaaccttaaatgtgtaaaaccttatatctttaaagaccaaatgtgtaaaattttcaatctattaaatattagtttagaaattatatttttaatcgcaactacccggaaaatacaatcagaacccggaaactgttacaaatatatctcaattccagtgattcacaatgtaaattactattaatattgttttaaactagtttgaagtgtaattttaaacttacttttgactcattttattattttaaaccataatttaacccatttaaaaaatagtttgtaatacaaatttgactatttgcttgagtataaatttggagtaaaatggctgagataaagcttcagagaacactttacaagtacagaagtaaccaggcgttgtatataaggctatctccagtgtttttactgagtgttttggccttgcttttcaggcctgaatttctagcaaagttaagagtttcatggattggatgcctgaccttgactgaaacagagcctgggcgtcatgaactatcatcactcagagatattgactttcgactattcgtcaaaaccttaaaactaaccccaaatgagctcatttttatagtattaacgctgttagtattattatatacagtagttttgatgagttgcatttggtccagtggatttaagttatgttttttctatgaccgctgcagatttaaggagggaactccagggttttctgactttctgactaatagagcaactcacattttcatcaacgaattagtcctggatactaattttctcacagttaatcgcactaatagagttctattaccgttgtatagaactggattcatatattatatacacgactacaagaagtttgtctttagagtcgaaagcggccgctttgagcccgtagagcattttgatgaggttcaagtgcccaaagtattgagttggcaaggattattgagtatatctgagggcgtagaaaagatttcaggattagagccaaatttaaatgtatgcgcagatttatttggcccaaatgattacgaaatcccgagatgcagtttctggaaaatgctactagaggcttttctagcgccttttttcgtattccaactaacgtcaacactgttgtggatctttgatgattatctttactattcgctgatttccatcttttcactggtaatgatagaggtgcagacggtgtataagaggattcttgagtataacagaattaattccatgaagttaccgccatttcaaatctacgttttcagagatcataaatggcaagttacacacactaacttactctaccccggtgatatcatctttattacaactagcactattgatagtggtgctagtgttaagggtaagggtgctggtgttaagaatactagtgtagggtctagtgtgaagaatactagtgtaagcggtagtgtaaagaatgttgttactaagaataccggtggaggagaagatatattgatatgcccctgcgattgtttaatactggatggagaagtgatagtggatgaatcgatattaacaggagagtcagtcccacaatttaaaacgagtgttgaagataactctgtaaatcaaagaaactcgaccattttctcaggtacctcaatcatagtcactaggaatgttgctgtcactggtactccagccagcgcaactctgttgaagaatgttcattataagggaatagaaaagttaattcccaacggttcagtatgcttagtaatcagaacaggatttgagagttatcaaggccgtctggtgcactcaatactaaatagtgatccgaataaagttgtgggaagtaatacccagggttatatgtttttatttttgttaatgttatttgcggtttcagcagttgtttttgttgttaggaatagtaattataaaagtcttaaaaagttattattggtaagttcgagaattttggtgtctgtaattccgccagaattcccagtaacaatttctatggctgttacaattggtctgattcagcttaggaaaaagggtatttactgtactgcgcccaacagactaccactggcggctaatattgatgttatagcctttgacaaaacaggtacgctcacccaagatcaaatgtaccttaacggtttgtattatagtgatagcgtgaatagaggattgagtggcggtgggtcaccagataaaagtttagctaggggttcggtagataagagtttatctaagagttctagcgatcaaaggctagataaggggttggatgaccctgtaatgcactattatagtaaattagttattgcaggatgccattcattaacttttgttaatggagcgataacaggcgacccaatggagaaaatatcatttacatattttaataatcaaattgatacgactaataataatattatttatcttaataacttgccagaagggaatgttacacttaaaatactcaaaagatggaggttcacttctgaactaggaagaatgtcaaccatttcatcagttacacccaacaacgccagtcacaccactattcaccccggtggtagtgttagaggagaattattattgttgacgaaaggatcgccagagaagataaaattactgttaagagtggtacccagttattttgacgaggtatgtcatgatttaacgataaagggattaagagtactatgcctagcgtataagcgtttatatgatattccagtaaacgcgctaatcacaattgatcgcaccatagtggagaaggatttagagttctgcggctttttagcacttgaagcccctataaaaaagtcaagtaaacagtgcatgaagagacttaaaaactttaaaaaaatcatgatcaccggcgataacatcctgacagcctgctatgttactcaacaaattaacatggttaatgataaaaccacctgtcccattaacttttcccagaaaaataaacatggttttgggaggaagtatgggttattcagtagaaaacatagtttgtttggcggaaagcacacactgtttggaggcagcggaatgacgataaaggagtatttgaagaactacaactatgagttgaatgatgagtgtccaataagtaatgtaaagatggagacaataaaaaaatgcccgatttataaggagacaagttgcccatttttgcaaaaatcagaaaataatccaagctacattcaaagatgcccattaaatcagtcactatccagcaatacgggtagtagtttcggtggtagtgtcagtcataggaacagttacaagaaatttttagaatcttgcccattcaaacaatattctaatttggcatccactaatactaatagtggcagtgttaatgctggtagtgttagtaacagtggtgtaaggaatactaccaatactagttctactgaagaaaatctcattcctactactactcacactcctagcactagtaccactgccaccaaaactacagccgcttccaaaaccacagttcctcctgttagcagatgtcctattagttatatgacgagaaagttatggaccatgtatatgttattcttgaaggtgctctttccatactactatcacgtgtattacgggatgactgagactgaggattgtgaagattgttcagacggcgataactttgcaattctgagttatagtaagggtaattttgtgtggaagaagagaaatggtgaagactttttccctaattcaacgactaaacaacttattcacaacatgtacagattaataccaaatcacatcctttcaatcactggtaacatcttacaattactactcaacaataatagtaccaacagcaatactaacacacctattagtactcccaatactagtgcctcacctagtggtgaagaaatacaactgacagacctaataatgataataaataattgcaacgtatttgcaagaatgtcaccacagcaaaaggagttcataataaagtgttataaacttaataataaaactatcgcaatgtgtggtgacggtaccaacgatatctcagcactcaaacaggcagatatcggaatctcattactcaatatcatacacaaagaagataaatccaaaccgtaaccgcataaacacttagttatgctattaattttaatatattaattagttataatattaaattagttatttataccaaaattattattaaaccattaaatttaccacctatataatattaacaaatgatttagtgatttattaatggataatgaactaccgagtataaagttgggagaagctagtattgcaagtccatttacatatcacggaagtgatgttaactgcgtgttcaacctcatcaaatcaggcagatgctccttatacaatcttttcatgctctataaactcatgggaatcaattcactgatcacagctctaggtaccaatatacgtagttttatttaatacctagtcaggtttattttagctatactgttaccatattattaccatattattaccttattactgtattattactatattattaccatattactatattatcgctatattgtgattaggtatgtcggtgttggcattggatggagttaactttagtgatgcccagaccactttgtacagtgttctgtacacatacttggtcatatccctgaataagagtaagggcattgatgtgtcaagcgacaagaagccagagaagtcgatcttcagcccgtgcaactttatgagtctggtgctgcagatcctggtgcactcatatttcctgatatacgtgtggaacttgggaaagttgtatagaagcgcagattacaaggggttctttgacatggatttcgagcctaacgtggttaacacgctgctttactacgtatggtatgcaatcagcctgaacagtttcgtcagcaactacgtggactacccatacatggacactatttcaaacaacaagtttctgtttaaaccaatcctgttgtcatatttcacactgctgttgttcatctcggaccttgttaaaccgcttaactcgttcttctcactcgtgccgattagtcacatgctcaagcttaaaatatcactagtagtgttgtttgatctcgccctaaccttcgtcatctccaaagccatcaacttcttctactactcactcgactaattttttatacataacttatttggtgttatttactattacgtgtatatatatatatgtgtgtgtgagtagtgctttgcacataatatatgggtcattataccatacttcacactttagaagtatacacacctcaataacacgaacctaatacacataaccttaaaataacaagtaaaatagtataaaatattaagtagactgtgaaagaagtgatttgaaaacatccttgtttacatggttcatgaatcccttggcgtggcgctcaagagccatccgagcagattcaacggcgtcttgagcctcaggatactctgagtaaactctcctgacgtactttctcttttttacgttctggccaagttgctccttcctcttccgctccatctgtcttctgtacaccttgggcataatgtccttggtgacctcgtcccacaaaatcatcttcatcttccgctcaccctcgggcaaaatcatctccttgaacatcgcaaggtcgtcttcgtcgtcactgcttagctccacagtgtcggcgctgttgtccaaattagtgtcagggatggtgctgacactgtcaacggtgctgtcattggaagtatcaatgctgtcagattggagagtggtgtgggaatatttagtgggagttgaaatactattaagggaagttaaaatggattgagcaatggtgttgatttggttgggagtgggttcatcattgcataataaatcattggaaattccaagattaatttcattcacaggagtgtcagtgccagatcctgtacctgtgctcaccctgtcattatcagtgctgattctctcgtagtcagagctggtagatacacattcagaagcagtagagtcaccgtcgtaatatttcttcctcttaacaagtttattcagcagacatggtggtaggctcagtttaggtagagtatcgatatctatagtgtcaaattctgaaactttaatatttgcagtgctggtaactttaaattcagacaatctcttaagtatagtagggtgggagatcctaacgacagatgaaacagcttctgcagagagtggaatgccatgaaaacgtgcagcaaccagtaaagcagctccacacaaacccgtgggtctcctaccagtgcacaaccaatccctattcatggcttggattattctattaccagtattgatgatcttgtgaatatccttcaacttcaactgagtggcgaatctttcaaaaaatattgaagggtctacatttgggactgatatatgcaacattctcactaatttcatgaaaatctgcccaatagtctttacaggagttaataatacatctgagaagtcaattagtagatgaggagtcttttctctgcgacaaatagtatataaacagcatgaagcaacgtggaggttatttctacccattgtaaaattcctttgaacagccagtaaataaatcctcttagccgcatcaatatgatgtggagagagttttaaagcctctgctattctcttaatattttcatttccacgatttatcacctgttctctgctgtgccaattattgtaggatagggtttgtcttcccgaggataaatttgatacaaatctgcctaagacttgagtatttccagaactgttatctgcatactccacttgctctaatattgtgttttcctgcaatacggctccacagtcttgacagattaactcacccagatgagtatagtcctcaatctcacttgacccacagtactcacattttctcactcccatattattttactactaatgttatatattatgaatttttagtatattagtgtaatgagtactgagaagtagaatctcgatatggggtgtgtttattcaaataataaatagagtatatcgtttcccaatatatcctcttcctcctcttcgtctacaacaatattattattagggtttaaaattacttgttgagtgtttgggttccaggatactgcagttgaactgtgtggcgaaatcgtaattattaatctgagacaatgttaattttatctaattattttattacctttagaatttgattaattctatttcttaatagtgatctggaatctattgacttttgcattaaaatgtactttacaaatatcacacaatcctgctcaccgaagaaaggtgtaaacagcttcagcgtttcaaatatcagttcggacttcaccaactcattgacgttaacttcctcattttgaattatgttactgctagggaaacactttaccagtgattcaaataaacaacagattgtgttaacaaactccttaacactatcaggacctccattagtgctaccaccacttatctctatcggattgaactccctaatcgcatttttatatcccttttagttaattatgtaatttattaattattttaatgatttatgtagtttgaataattttgaactaattttaactaattttaactaattttaactaattttaagtaatttctaactaattttcaacaaaataacatatctataaagtacctcggaactagtatgtgtttattgaggtatagaatgagttggtatagatatttcgagtgcaatttaacatcaagttggggcacgactttagaataaattcttaatatccttagcgactcacttacgattcttccgtagggccacagcaatgaacttgccaaacataatagtatactcctcaacctttcttcttcaaccgtattgttcacaccgatactagtgccagcattacccaaaacactactgttagcagtactggcaccattagtattattgttgtataacttgatgaggaatagaattaaggataaaatttcatttgaacaatcaatgcatgcataaactttcagataatacagttgaattatcttttcttctacatcaccgttactgctactggtactgttattgtgtgatttgaagagtttgagtgatagaaattcatgatcgattctttgatataatttagtaataattacatcaattcgtttcaaatttaatatacaaggcgataacgtatgctttattatttgatataaataaaatacaggtatccattctattatcccaatcacatactcctccaacacatcatccctctgcgcactggttagactagttttatactgtgtgttagcactgtgatactgtataattgtgcctaataactttaatattgactgtctgaggatgtagatgtatcttctgatagctctgatggtgagtttgttttgtgtatttggtatggggaacacagtttcaacaatgagttcgagattatcttcactcgcaagtgcttcattgtatccctgcaatgataaccactcatcttttcctgggctcaatactgctttcctcaccatgttcttatcgaaaaaatcaaatttccagaaattcacaaaactcattaatatatccaccaccatcctgtacaactcctccaacacactagagttcatagtatttgttggtgaagagctatgactttcctcaccactatttcttacaccagttccaccattattactgaaagaagtatcacttccaatattaatcttccttaaaattgagtataggacattgatgatgcgatgtaggtgtttgcgattagtgtcatcttccaagtcattgaataaatatttatacaaattctcactgttaactccattctcacatactttttcgtacaccaccttaaattcattcacataattattcattatgccgctgactattccattaactgaactaccatttactgggctaccgccatcagctccgttactgctgattgtgagcagtgatattagagactcgatgagtaaatccttggaactatcattagtgacaatgagcaggcattgatgaattttggatacaattacatcaacaaatggagttaaaagatgcttacagtttttacaaaaaactactagacattgtagtgcacatttattcaaatttgatatggtggaatggacctcaaataggattttgctgaccacaaactcaataactacacctataaactggccattatataaaaacaatatcgacaacgttgataatgagtccaatcttcttatatccagtatgtacttatgcgatttacacagattcaactccatcaatctcattatcaccatattacacttcactatccagtccacactatccacaccatcgcaccgtgccatactgttgtaaggtgacaaacttaaggttaaatttttatataaatccactgataaccaactcacactactgttcccactaccactgttaacgttcccgttatgcaaatctatggtattgcttctcagtctgaatatcgtagactcaaggatgaagagaatcccatcgaacagaatatatttatcacaaatgtaatttaagattttttcattttttcggtagttacagcagtaaccactacattctgcttccaactcggtggagaaatttgacagcaactcaccaataattgaaagtacttcactcatgtaatctgggtttattatggccaacagtgaacaacaatgtaaaatgctcgaacgtaatgctgcaaatctagcctcaaaactcttcatctgtcctactgatatctcctcatccaccacactatactcggtcagctttgcaatccagtccatcatactcatcacgctattgttatttatctcccccagtatatccggtatactcgtgacggtatttattaggggatccatgatcgacaaccttgtgaataggttatgctgtgataggagggggttaatgagtgtattccctagtttaagtcctctaatgaataacaccaataaaaacttcttgtgatcaagccatgtgagtttttgtgagatattttcacccttttttagctttattgatgaaattcttcgtagtaatagtgaacaagcgtttaaactacatgttgacacttccactgacgggtgcatcactagtctacagattatataattgaacactagtcttaacacttctggattcacattttccagtatatagttactattcttctccattaaatttctaaatccttggcacatctgcagcacattcaccgtcacctgtgactggtttatctgtggctggtttactggcgactggttcgtcggtgatttgttgagaccatagtccagttgtaaggataacttctgcgatatgattaccaaattcttgagaaacctttccagtttagtgatgtacagtgactcattggtcagatcaaattcaggtactgtgtttaagtgcttaatacgcttatgggaaacgtccaagcagaggttacttactgtttgtaccacatctgatgtgttctccgtattcaaattattcagcaaaaattcatcaacgtcgaatgtgacaaagatgaagccgtcaaggatagaggaaagattacgggaaatggacaaaatcagcttactcagttgttggtttgaagccattcccagcacaattgatctgtgaattgtaatgaaaatatcataaacgtatgatttcaggaggtttgaaatttgtatcctcctcttgtgcaatagtgtcacatcaaggcattcacgaatctctgctgaaatctccactattaaaccccaaaatactgacaactcactcaacaactgagtgttattttcattcagtaactgtggattgttcttaaaatctgatcccaaacacatgaataatccgtttagtgatcctatgattgacggtatcaaatcgttccattctagaggccattctcttattgctattgtacatatgtattgtgacaccttttgattcactaacaccgaatattcacttagcactgtggttttagaagcatttttaggactagaaatgtggttttcgtcacaacttggattaatattccttacacctgtaatcccagcactgttgttcatagtagtatccatgtttgtaccatttgtaatattaagagtatccactgtataattagagaatagtgattgtatgtgtagtttgcattgcgttttaagcgaatttggtaagatttgccagttattttcgacaaatttaaccaggagtgtatagccgtagaaacggagcaggtttatgaactcggaatatttctccttagtaactgtatttgtggatttttgcaaaaaggtgattaaaaattcatttggaagggattctgataaacttacaagtgaaaacaataaatcagaggaataagtcaacttatttacaagttcttcagaggtataagtacctgcgtcatgtttctccacaagtccatataatagctggcttgcttttgggttaccttcttgagcggcaaataccgcgctcagaatctcagatgttaacattttttcgaggttcatacactaacatattttactgctttggagtagattttaactaaattttaagttaaaaattataaaactaccatttaaataaattattataatttgttatacaatttcttctttaatcattttttactatcaggccatctcggatgatcactttctagatttttctcattttgtcctaatttccatatttttcaaaatttccccaaatttttacattttaatgattttttcaataaatttatctaaaattgttataaatttgattaactgtgtaatataaccaattcttattgctaatataattttaatgcaaaagggtataaaaataattctggtgacttcatttgtatcaatttgtactatggaacttgtaatttggcaaaagaaagcgaatcaacgtaagaggcacgctggagttttaagggatatctccaatagaatacacagtacagttgaataaccttgttattaactttattcctaaaatataaattaataattgcaataatcttacagttatgggtggaatgaactttgataatgcctataattcttctagggatccaatccctggatttaatatgagtcgtgttcaaggtgtagagaattttaaacgcaatgagcactttctttaccttaaacaacaggaatctgatcccgggcacacttcaaatgaccccaaatctaccaataaaaatcctaatttaaattataaaccgcccaatttcacctctggaacagataaattttcaaaggtcagacaatacattcaagagaataaagatttgaaatcaattgccagaggcaaaaaagctactaaattagcttttcttggagtctcagttgttttctgtatcgcttgttctattggactctattggtaatttttttaaacaattcactccattcttcactagttcaccatatttttcactaattcactaaaaatttcaacaatttaatatattttatcatcaatttcactttaatcgtaatatttctaatgtataaattatattaatatattaaaagtgtatgactattatattagttataaatgtttgattaagtccttaatcaatgctagtgtgaatgggttttgttcattgtgtccaacgaattctggtattaccactccaaacttttgatactcatttctgaacttattgaggtggaattcatatgatacattcccagctgtttgttctaatgttgttaattctccaaaaggctcttcaatcaataactgtacgatattatataaaaatacaccacacagttcattaagtgcagcaatgtcgtagaatacggacttagttttctcaacctcaccctcattcaacttttcaacatcaaccttgttcaaatccccaacctgttcaacaaaatcgttaactttgttcataatgtaaaacacattgaggagagagcatagtctaaaatatgccaaaagcttaagtggtgttggttggaaccttgaaactccaaagttcttcaaatcattctttaaaaatttgtacaagtgattcgcttcacatggcgtttctgacactgaagaataatccaaatagtaatcattatcccttggtactactattgtgttatcctccaacaatacgctaaaatatactgcaacccttacagggacttttatcaacttatcaccgtcgttggtatttactgagaagtagttagtgttcaaatcaagttctgagagtatactgtagaggttacagagtgaatatggctcaattttcttccgttttaaaatgcttgaattacttgaaatagagtggtttggcacacttccgtacaccagtaattttgtaaaaaactcatttgtactttgaatttcctcctttaaattgttctcagcttcattttccaataagtttaacagcatttcgccaattgaatttatgttatacaacattaaattaaataaattcttactgcacattaacttgctcacactacaattggagttggctgtcgtgttacttgaattggcagagttatcagaattcgttgagttagagttaggagtattagcggtggatttaatggaatcgttgaagatttggagagttttgaacttgtaatcaatgaaggatttggtcaatttattaattccgggtaggagtgtacgcttaacaagctcatttggaaggctacatttaactggtatgatctcgtccttaacatcgacagtgataattttattagtcttgagcttgtaaaattcatctatagtattagaattcagattaaagagaggtaatagtggacctacaaatctgccaaccatcctcattgataaattcctcaaatccccaaatgtcttgttaaacaccataaatttcatctcactcccttcacacatcttcaatatgaaatacccgcccaagctaaatccataataatttattctcccgcttgcatccttattagtattagcatcctcaacaccatgagtattggtactattaaccatgcccatgttgttaagaacgtggttaatgaggaatttattatttttagtgatgttagtaattttaggtactccgatggaattagcaactgaggtataattgtacaatagtatcgaatttccagcttcaattagtgttgggatttcagattgaaatgcatgaaattcataacaagcagcgttaggcccagcatagactaacacattattcactcctctgtagcagtccattaccttgcagtatatatccgatccaaacagcatactgatagcattgttatgggaattaggtgtcagtttgttagtatacttgctacgttgtaaagtactgaggaaatccttgcttggaatgaaaagagtgtcgataacttcaccggttagttggtttgaaacaattctgctatttacagccttaaacttgtaaattagcagggacctcatgtagactaaattcccaaagccgtaattgggaggaaaaaataaatgtgaaatgaaccctctcgaatgttctttattcccttctaagtttaatacattacaaatattatacaagtgattagcatatgatacaatctgttcaaagaaagataaatctgggaattcaattaacacttgaataacatgttgatcagtcacaaatttactattctcggagtgcactaacgagagaaaacttatataatgctccgaatttaatttactagttaattttaccatactcttaaccttatccttagctgagttatagtctgtgtaaatgtcaatgttaactaaattattaaagtcaattcctttgggcttaacaggttcattggagagaaaaatcaaaaatttcctgagagtattatacagatttgaaagttcaggcgacaacctcaagttgtacacgttaactgatagataaagtgatgcgtaaatagtataagcttcattcagaagttctcttatttctgaaatcttccaatgctttgctcggtcatactgcacactaaactcagagccaagcctcctaaatagctcagaataactagtacaaaacatcccattataacttgccaagaatccatttagtataaagggcattgagattggtaccagctgtaactggatgaactttgaaattagaaagtggaacaaaaagcctatattcattagaatacagagccatcttgctcttttataggcaaatttattaataaaaaataagtttgcgatttttattaaaaatttcaaatacttcactaacctaaatctatccatttggttattctattgtacaaacttttaaattataaattaacttctaaaactacattaacatattgctacattaatatttctatcattacattatcattatactgaagattctatacacattacaccatcaagtaggtggggaattaatattcggattttaacttgaaaatcaaaattttattttattttatcgcataacgtaaatttgttaaattattttctttccaaaatgcagattttttaataatgtgttaacgttcctcaatcatggacattattcacgatcctctcattaaagtaacttttattcttacacatttcttatatttacacagtttgggagcttatttacttatttatatattagtttatcacttttaagcgttctaatacttatttaccagttacacatttaatcataataagttaattgaattttaaggagaggaacataacggtaaatttcccggaattggtggaaacacttgatttggctcttaaaaccccttcaaaggcatcagaacacattaaagcctttgaatctaaagcttttgaggttagtttaaaactattcctattgtataaaatattttttagatttacttaaacgctgaacagtctgtggaatggttaaataaacaagaaagttcgggatttataaatgtaatttccaaaattaacacattaatttataggaatcgctattatcttcttttagaatttcatcattgttgatcatagaacgttacaatgaactgaattataacactctaaagtgaattttttacaaattattattgtttaggggattactttacttatgtgtgttaggacatgatatcgggaaaactgttgtatcaattgtttgcaatactgaaatcactaatgatatctgtgatatcataattgaagttattaacccattactcgaactatacgataacttttcattcgtataccattaactataatattattatactattactataatattttcaggagttgaagaggaatatattagtatcattttcaaagttgccagtgattgccaaattatcaaattgtttacaaccaatcatacaatatgtaatatccgatgtaataaagaatccttggaatacgtaataatttgtatccataataatatttaggcaactctatgacttatttgtactcttaactattgatgaagataatttatatgatatttcacattatccaatctcaaaggtaattaatattttgatattatattttatagtttttcataaatgagttaactgactatgagattaaacatgggatgataagtaagcaattgcacactcagaataatgttgttaatggaggagtgaatgtagttttggaatcatttgatagtattattggaataattaagattatgacgaattgtattctcaactgtgatgttacagtggtttcgaacttttgtaatttattcctgatacccaatttgaaatatttaattggtgaaagattgccaacaacacgtttaaacctaagacaatctttattagcacaccatctcctaaagcttttattcagtattatgaaaatcaatgatgacgtaagttattaaatttatttatatttgttcagttgttggatgagttatgtaacggtttctacattttcgatttattactagtgcctttaaaagagtttgaacctaacatttacatcctatcgtcagccctcgaatgtatgtcactatctaatataaattattttttagtaatttgctatatactattgaatccttcaacgactgccaagtattgtgatattttaattgaagaatttaatccatcaactctcattaataatattaatactgaggataatgggctaaaccagtccagtatggtcaatggtgttaacaaaacaaatatggttaacggtgtttctaaaggtaaaataactaaaagtattggtaatactaatatgaaggaagtggatagtaatatgaaattgtataatgaaatggttgatagggaaaagtacttattaaagatgtataattggtactacaaattcatttcaacattgttatacctatcaaatactaatttcaatttaaaggtatttttattcataattacattcaattgttaggagtatgtggatgataaattattgagtcatgagttggtaacaaaagtaatggtgaacaatgttataattctaacattatacccaaatgataaaattgattccaacattgttaatcagttgttgcagataattgattctgtcccatcaatgagtagtaatatcgcaaatggagtaattaacagtatagtattaaccctagttaagagagtagacctgataaatcttaactatgaaaatgtttataagataattcaattgttattgtttacttataacaatccatcaagtgatcctcaagatcatgtggacttgatccatccagtagaaatagtatcctcaaacattgtaaacttagtaataaagtttataacagaaaattttaaaaactttctcaaattcaactcaataactgatgataacttgatgattttaattttaaaatgtatgaaaaatgagtcgaaaacacaaaaggttttacaatacagaatttatataattttttaggaaatttatattgaaacgtcagtatacaagagttatacacagttaataaacttgtgtatctataataatatgttaaagtataatagcaggcagtttttccgcctattattcttttacaattacgtcattttaaatgatgatcaaagaaatgattcatttgatttaatcagatatattaatagtattaatttggacaaactattcgacattgaatataacaatgttgatatcaccaatggaaagttggagattaagtctagcgctggcctaaaggactcgattacatattcttatagtcatcccatagaagatttatcatactttgaaagtaatatgaatgatgaattatcagtaattttaaacctttaattaaaattttttagttgattgtaaccttggaaattgttgacaaattattgctatacctttcacctctttattctatccactttattcactacttcaagtaatacatatttaactacttcattccatattttattttagtgacaggaggaaaaggaatataaacagtgagtactgggcaggattaatcaaaggctacaaattgacatatgaacaatttaatgtaataaacgaaaaggaaattattaatcgtctaatgcaattcaatgataatcgtgagctatttaaattaaagaatgttttagctgtatttgttgatgagtcaaattactttaaattgatatcaaccgaaatcttacgatccaacgtaatttttacatttctttacagcaaattttagttgtatgaagatgttcaaattaatacatcatacgttgtttcattatacttaaggtaactcttacaactaaatcagaaattttcaggatattgaataatctaatgagacgtgatgaacagattaaaattaagtttaagaatccaaatttcatacgaaacttgatcaaattaactgcaaatcataatatatttgataatcatctcacggtcaaactcatccaattcttcatacaattactaaaatacgataatcgactcattgtaattttatttactttaattttatttttcaggttgaatcaatggatattatcatcatttatgatatcatcaccaagtatttttatacacactatttagtactttacaatattatttactctttaagtactcttaatatcacacttactaataatttatagttttttacaaatgatatttatgagaatgatgtctgatttgaatattgagaatataatatcgaatgataatatccaaaaattattgttgtattcaagtgaatttctgttgttaattactgagcagattgggttagtaaagttttcagaaacttatgaaatacaaatattcttcgttgatatttgtgttaacaagtttataaacaatgaattaataactggactgattagcattttaaatgttattcaattttacaaccacatccacaccattaccaccgctgaaactgcttccagtgattcaaattatcaagttggacaaatcataaccagcatcgttattaacataatgtacattctaataagcataataaggaatgaggattataaatacttaataataaataatcttctgaagaatgagaacactgttattctcgccattataattcatgaaataaaactcaatgattctaaacaccagtttcagctacaattactcaatcgcgatacagtacaacgtgtaattgtgtttaattacatttcattcctcactaatttggaagatgatttggatcctagatcctcagttttatgtataacgaatgaagaaatatacttgataaattctgaaaacaccagtgtaatgcttaggtacagtaaaagtgaagtcaaattattcaacattaacaagggcctgttctacctgcttctccacgaaaattattatttactgttctttataaataataataatcatccaataacaatgtatgatgctcaggatttggttcttgaacacaaaactccaacactaactaaatcaaaagataacactaaacataaaactactgccaacacagtaagtaaatggtccggtataatgtgtgagtatgaggataaattagctgtactaattgatgaagatgactggattggtatatacaatgtggatgtgacactgttgattaaatacatttacccagagcttgttgaggataagattattttaaccaattttctaatccctaaatatgaattaaaggagaaacctccaacaacggaccctttagtgctggtaaaacaactagttgtaaacaacattaccaaggttggtttaacctattttacaattttttaggttgaatttaatgtaaattattattctgtaactttaagtgataaggaatcgaacgaggaggttgatttaaacttgattaatttttataattttgagtcctttaaaaacctactatacaacaaattgtacaggacaaataatatttggaagcggttattacgaacacatgaagagtaatttaatatttttcatacattttctggatattatctcactatacttgtacatacacataataaatattgagtatataaaatattataacattagtggcatcaggtaagtgtaaacgaagtaaacacaatacgacaccaaactcgacagtacaataagccataatacatacctaaaaacaacgtccattataaaaactaacctccttttattattctttttattactttgtttaatttcacttaaaatgtttatagaattgtttttactcttggcaacattatcctcaaccttatttaacccttcctcttgcacacttattatactcgatatatcattaaatatgtcgtacgtctaataatattattaataatatgtttaatagtataatataatatagtatcgtggattacttgtaagatttggtttttaatttgttttatattattattccgtatattgacaatggagtcggaaagaagcaattctttatcatttaaattaaatagtggtatcaactcttcattcagtaacaagtcattagaagtgttgttattatcatagataaactcgtcatacacgtcatttgtgtacattctgctactactggaatctatagcagtgctgccatcaacactttcactactgccactattaatcatatctgataagctgttgatatgggtaatttcacgttgaaactggttatagagtttatgatagttgttttcattgtattgtaaatttggagattgttgtatttggagttcccattccataaggtagcctttcgttacactaatcaatgagtttacattttccaatttattcctcaaagtctcgagtaacttgttcgagtaaaatttgttactcaaatctccaacctaattattattaatagtgttataatcgaatggttaggtaatttctcacattatgttgtatgtataaaatatcggctttaatgtgtttaatgttgtttgatattaatttctcgtatttaacatttgaaccaatttctaatgaaaattattataaaaaggtgtaaaattaccaaaagaaggtgctttcaatttattcatatacatttctatagttcgggataaaacaagcaactcatgtcgtaaaatttttgtcggtgtgcgtttaaaaattactgttataatatattacattgaaataattaaaattatgtgataggttgagaaatttattagcaccacaacgtgaatgttgattttatgtgagaaaatatttttaggatccttaaaatttttcatccacattacttaccgctattttaagaatccaaattgtattatacactttcactgtgttaatatttaaatgatctttattaacacatcacctcccaaataatattttatattattctctcattcaccaatttacaatattttttcggaatccagtttttatgctgaagatcaaactataaattataacgtaacaagttcttaaatgtgtataatagttatggattttgtataatagttgaggaatgtgtactgaaacattccagtatcatgaagattagtaattattatgaataatgataacacgaatttgaaaggattaaatttagtccaccctgaaaaccgcttaatttttctgaaacttttagagcttcgtaaattctacaccaataaatcatctaacatttcaaaggccatttcaacagtaagccaatatttataatactatacccattactgtatacctaatagtataactacaataatatactcgaccccaataatggtataggcaatacaatcattgaaatgttacccattacctataactagtataaatgacttaaacaaaatcgcaggaattggagtcagattctccaaattcattcaagagtatgccaatttagtttataatctcaatttttataatctcaacaatttttaggtcagtgaatctttctgatgacactggcggcaatattatcgactatgatgagtatgtaaattacaacaagtgtaacttggaccgcatttgtaacttcattcgtaagaactatttgaagagaaggaactataatcctacaaagaattctagcacttggagctttctgtgtattttaggtttattttcagattctgaggggaatgagacgagactgagtttagaagatattgggaatatatttgtcgaatttcgacatttcttcccagaagccagagatttaagagattacgtattcctaagacagttatctgaaaagggtttaataaattataaaatcataggctatgaggggtttgaagaacactttcaatataaacataagcatagatatacttatggactgacttccacggggagaagattaacaaataaattaatgaataaattagatgtcccaattactaatgtgcagggaatactaaataaactattcaatataaatgttacaagtgtaaattctgagaatatagtggaaaacatagttgaaaatcagtgtatcagttctagaagtaataactctagcatggatattgaaagatataaattcccagatgaaaacacaactaaccatgataacgctgagaatcctgtagatagtgactcacagcttagtgacacatttaatactgaatttaacaatatattcaattctgaattacataaaaataagagtactcccgaaccaagtaatttatcagctgaagataatttatctaaagtcaatatttcagttctttcacaagatcaaatacaatcctcagataccactgaacctgatcctctttctaacttaatagatgtagcatatcgtcccagttcttacagtaattatattatgaaattgaataacaaagcttactccactaaaacttttaaggataacgccagtgttaacagttcaaaccaagttgaacctgttcccgctactccaaaagcttccaatactcttaaagaaacttgtcacactacttctagcccctttaacactaagtctaacaaatcttacaccaattccaacaacaacaggactattttgagttatacaagtgctcccaccaatattaataccaaccttaacaacaatgttcacaccagcgtgcacagtgcaataaccagtaacgtaagcgttcacagtactgttcacagcaacattactaataacgttagtgtgaacagtttcaagagcaataaaactatgataactgaagaggatgttatagatatagatgacagccttggtgacgaacctgctgtcaactcagttgaacttaactctattgaacttgtcgataactcaattgtaattgatgaccgtgaaactgacgttgaagatgatgtcaccgaagtgtgtacaaaaagtttggagaacaggttaaagttaaaatacggcgtcgacgtgtttaaaaataattatgattacgagattataacagtagttgacaagagagaagtgatcaataaggatgttgtttcacacattaacatcgatattgacacctcgaatcccaaccttatgaataagtattataataagctaactcaatattataaagaatcaaataaaaaaatactattcaaacagttgccactcggtgacgttatttggatcatcaacatcaaaagtctaattagtcccaggaatagtagagccaatggatctagcgagtcctcaaattattatatattggattggatattggagcggaaaacaacacttgacttgaatagcagtatcatagatggcaggtatgaggatcagaagtttagactgttgaatttgaaaggttttaacaggattgtataccttttcgaagactcttcagtggataagataactaataaattctctaaaatgggcaataaagccttaaattataaatctattcaaactgctaaaattaacaccaagttcatttctggcttcaatatcatcaacacaaccaacatctcccactcgtaaccactacttctaggctatttagttatactattaactatactatgtactaaattattaaccgtactattaaaatactattaacaatggctatactattaaccactaatacttacattatcctgtaaaaaatgtttagagccagtacgttactgagtattcacaagatgattgagaatttcatgcatgagaagttgaggaacatgacaatattgaagaacattaacgttcaccgctatatcaggaccaattactactcactggagaagtttaaggaggagaataggaagaaattatcatattacgagttatttggaagacagttgagatgtataccaaagtttggcgaaaagttgacaatgtcaatcttgacactgtggcctactccttacaagttccatgaagccatgaacactttgacactaagtgacataaatttcaagttagcaataaataaaattaagatgcccaaagaggtaagctttaaaaaattcaacagtttcaggtgtacactttgtgcaaagaattatttacacaaggttccgccttgcactcggaagtttactctgatagtgataatgagccactctaacttcatttggcactaaaaaatatttgatataatataatataattaaagttaatataatttacccagtctcgactcctttttaggcatttcaggtttaatccctaagttagtcattataatattgataaacgtactattatgttgtttcatgagatttaatgtagtgttgagttgtgctttaacttttctttcaaggataacttcgattagtatacaagctgcttttttagttagtgtataatatctctgagggtttaacaagtttgcttgattgtaatttcgagacctatcgtaacctgcaagtcgcctcaaagtcgtcatttgtatcctctgcttagccttctcaactactgctacaaaatatagcagtttaaccttcatcaaattaacttcattctcgccagccaaagtcttatcaatatactttagtaacttagatttattcccaggagatttaccctgtactgccacgtcagtgctattccctaccgcatctctactcccagttacagcatttctacttaaaatggcgttattattaattatgtttaatttccttattttttgcaattcatctattaggcgctggttttcagataataacattaactgctcctgtctaagcagttttagctgtacttgtgagaatctgaacgagcctttctgctctgccgagcttattgtagcttggtgttcatctccgaaggcgtaaactttcattttaaaaagtgcgtttttcaacgccttaacactagctgaatttctacttgttatatttactagcttctgcaaagctgcgcccttcctcagggccagcattgtgatttctctcgactgctccgacgtcacccagtccgagtccgagttccccgatcccgtagccatttagtcttattttacagaattataattttttatatattattttaaaaatttactattattgtgtattaatgtgtcacattggtatgtatttagtttagtttagcctagacagttatttaaaaattgttaatttcacatttttctccaaataaacaataaattaaaattttttaagaaatttaaaacgtaaaaatagcaaatgtgtactcttaaacttagttttctacatgtggtacacgtcaggcaaggaatacttaatgtgtattaacaatattacatttataattttttccgcttccatctactcagcaaatttgattcttctaccaatgatcttttattctcatcttcagacattatatcatccaatgatacattgtcatcttgcctggcaactctatccgcattttccactattttcttctgattgtcatccaatttctcaactctgtcctctttgtcatcttcagcgtctgcatcttcagacatatctatcaatttatctttataattagttgatatgtattcggtttttgtattatccgttgggtcacattgaagccgttcaccgtcaattgtttcatcctccatttgttcatcgtgacttggttcatcttcaattgactgatattgacggtgttggatgtagagtggttcattgtgagttggttcattagttggttgaatgtcagttggaagggtgtcctgggactggtttacataatgttcagctggtgaaacattattgaaaaatccaccaactacaaatttgttatacactttgatggtgttatgtatgcacaggctgtgcttctaagtaattaataaataattcgaaaacgttaccagtttgttgaactcttccaatttaacctaattaatcatctgttaatgcttttaaaacttacgtctcctcccttcatatccagactgctcattatgtaatacatcgattccggctttatcagcatcaattccttattcctcaacttcttacatatcatcactatcgactataataatcattagagtgtataatcatataattgagtatacaattatgtaactgagtatataattgtgtaattttgtgtatttgtggatacatttttgattttgatgacgtgttcgatttcgaattttacattactgaagaactcacacaaattcgataccaaataattataattacccaacctctgaacaagattacagttaaataattcaagcagttggtatagttaaatattgtagccaaatagtataatcattctatatagtatggtgtgttacaattctcttgatgatgagtgcgatttgatagtctctgatgatgagtttttcggatttatctaatttcctcgctaagaagtttctgaatgcgataaggttcagaagcagattatatgatacaaagtccaattctggaattctaattttatgtctctttgaaattgacttgaacttcttgtaaatctctggtcctctatccacatactgcttcaaacaagtttctctgccgttattcatcacttgtattatcttcactctgccatcctcctttgacaaaatctcatccttcaacgcgctatacagtggtattaaataatgactatcgcaacacgcatagtccaacatctcagcatccaacggcctaacaacaaattaaactagttatatagttaattatatagtaaatagtatacataatggtataattaatagaataattaaatatatagttaataatattagttaacaatattagtcaacagggtattatatagtcaactagtgtaagggtggattaccttttggaccaatcggaaagttggaatcttttatttaatttgatgttgaaatacttttgaatgagtttagctaaggattgttcagcgaggttaagaaccttagcagcttctctggtatcaaacaggttaacaacgaatatattaaagtcacgttggagccagacaacgtcattagaagcgccgtgcatgatctttagtatcttaggatcagttgtgagtctgttgagcttattcattttcccaaatatcttgaaagggtcaatgatataattctcttctggagtactcagttgtactaaacatatgaagcctcggtatgtctcagtgtcatggtgttctacatccagtgatagaactctaatgttcttcaacttatccaacatcgaattaaagtcagcctcgttatcaattattttatacctgatcttgtctggacttgattcatcagtcctggtgctcaaagttgacaaacttacaccattggcattcttcttgctgggggatagtaaattattggtactaccaccgagaatattaaagccttgatgagtattatgtttcttatcctctgaccagtaaagtgagtttagttcctgagagtacaggtgagggttgacatgaactcccttgtcaattagggatagaaattcatgcttagggtaaatcttaggaacaaatcccttgtcaaagaacttagtatccctgtaggcactggagtaattgacctgtggctcaatcttgttaaacttcctaatcctgctatggttatggaacctggtagaaaagttgtcatagtggtttttccactggtcctgaggtcttgctccagtaatataattcctcaaatcaatgtcaatactattagtggtcaaaattgaattctccaagtttaacaagtgattcttgaatcccttctcagtcctatacaactcggtcttaacactactgttgtcgtgactctgtggtttcttctgaagctttgtattttctacgggctctgagagctctcttgagtactcagtcctattatgcttctttagtccacattcaatctcgtcaaacagaacatctacgtaacttgtattctcgtcaaagacgtgatctgaggtgagtttcctgatcatattctcaattttgaccacagaaccttcgtacatatccttaaggtgtgatagcttcttagagttcgatggagtagctgcaaactcacggtatacaggattagaaatcaagttagctgatcttacaacttcagtacatgaagcaataagagtattcagaaacaaagaaggttcctcatccttactagaatctgaacttggtgatttatcctcactactactataggaactggatgaattaaactcattagtaccattggagctaggcgatttaacctccttggtagtagattccttagattcattggtaaaccttgtgctggtttttgtagatttccccctaggtttaaaattagaatttcctggtttatactttttaggacttggacttattaacttttcccttttattatcggaatgtattaacctatccttcttataaacatttgagtgttccaatttatgattctttttgggagccgagttagatggtttatcaccttttttaacaccagtatttgagggcctgtcgtttttactagtgcttgaactcttggctttatcctgtttattatctgagctttcaggcttatttttttcttctaagccgtccgactttgatttttttctctttttgttaatttttaagcctttctgatacttgtcggacgcctgaatcttggagtcgatagcatccacaaacaaatccattgttggagatcttgatcattcgtgctttaaaattttaatggtattgtatataacgtatccatttaaaaatacaacaatatactataatacattgactgggcacactataattgtgtgacgtaaggcgctgttcattttagcaacaaaaaaataaaataatttaatttcaagaatttagattgaaaactttattataaaaattaataaaacatttaaaaactaaaatcgtaaactaatactaatatttgtaaccatgaaatgtagcgattaaaaggttaaatgttgtattaaaattaatgaaaaggatttttagaattaattattttgatgtggctgctgaaattagtgtcatacagtctccttttaaaagaatcctaccgacatccttctttacattcttcttcacgtgaacctccgtagcattatccaataccatattcatatactcatcaaatccctataatatacattatatacaaataagaacgaaatgtggtgactatgtactcagtatatcattatctatgtaaaattacataataatatattggtaaaaatatggaaggttgagtacccgtatggttccttcgattttagtattaggttgatcaaataaccaaatttgtacccttgttccgcctgtaaagaaacggaatatttggttctaaaaatccgttaacatacgtaaattgtaaagtgagaatctagtggaaaatattatttaaaattgaaataattaatttattaacttacaattggctgggtcataattttttgtaacttatccttcctctcctccatcttttatacgaatatcgacaaataatattaaagtataaaactgattaacaataatttcaaaaattatttacaattcaaagaataatttataagttgagaatatttattgtaagatattatttatgagttggatcatttaatggtctcatggtggggaagaagataacttcctaaacaattattatcataattatcattactttgatattatttttatctgctaaaaacatcgtgagtctgtcaattcctattccccatccagccgttggcggtaatccgtattccaaggctgtacaaaacgcttcatccggtggttgtgcttcatcatctcccaaatctttcgcctacaaatattattacacatccgccacatatctaattatctccatccagttatctaattatatatgtgttccgtaccttttgttgttgtttgaagcaatctctttgagtgattgggtcattcaattcagtgtatgaattaattaattcctttccgcatataaacaactcaaacctctcacatacattctccttacttctatgcctgcaaatttatataccgctctgtatctactactctatctgtgtgtataactctactagtggatgcgtaccatttggagagtggagaagtacattgtggaaaatcaacgatgaaagttggtttaacaatttgatcctcaatatagtgtccaacaagctaaaaattgataactcaattaataaatacttgatctatgagttttgccggtaccggcggctttggcatatccaatccagcttcttttattgctgttaagtacttttccacattctcttgtgaatcatatggtgggcttaacttcatcttcatcttattctccagttctaaaacacacatttgaatagtgatttaatagtgaattggtgaaataaataacttagtcaaatttggatagtaaactggataagaaataccttcaaccattgacactttgttaaatggaggagtgaagtcaataacaacaccttcagtatcaggcccgtccggatgatacaatacttcatactttccaaacaattcaaataccaacgctacaatcatttattatatggttaatattatataaatatgtattacatgagagaaattcttcggtcagtttcatgaggtcatggtaatcggcgtaggcccagtagaattcacaggaggtgaattccgggttatgtgtgggatcaatccctgaaaattacttaaacaactataaaaataccttcgtttcggaagcacttgccgatttcaaacaccttttcgaatccgccgatgatgataagtttgagtgggagttcaggtgcaattctcatgaagaggtccaggtcaagctcattatgatgtgttataaaaggcttagctgaggcaccagttgaggtagtctttagcattggagtttcaacctcaaaaaagcctctactcgtcaaaaacttcctcaaataatcaattatccgagatctgaaacaattattagcacagttatagaaatagtatagttatggtgtggtagtacctgagtttcatgactttgagactatcgtcattcatcatgagatctaagtatctttgtctgaatctcacatcattatctttaagaccaaatttatctggcaacatgtgcaaacagggtgataatatctgtacactcttggggaatacactcaactctcccctctttgatttacctatactcagttatacagtatgtaattacctgggaaacccgttaatcctataatatcaccacgtttaatattattgtacgtgtcattgaaatcgccagttgaggcatcatggttagcaaagtttgcaaacacttggagcttagttccttcagatttaatatcgaggaaacgtaattttgaggaacttgaagctattctggagactcttccagctattgaaaccagttcattctccaaatgtgctcctgcctcaaggtggtcatatttaccaacaaattccttcaacgacatattcacctattacacattatattacgagaatttagtaaagtagtagtatgaatgggtggattacatgaaatttgtgaggatacgcagtgccatttttacgccattgttctacagtttcaagcctattaaggtaataatgcctggaatcctgctcttcagaagcattagttacaactgtactcatttttcgagcctaatatacatcagtcaggtttaattccaaagtattatggttgttatattgtgtataacaaatgaataatttatttaaaaaattattaaaaatatctaaatatgttaaagaatgatataaagtaaataataacctttgggagataaaataaatttctatatttagggtagaataaactgcaatatgaaagttgatttaggaattttttacataacatttactgatttccacatggtgttaaggcacaattaatattgtgtacttttagtagatttatatgttgaggtttagggtattatatagaaagtttagaaggctaaagtatctttctaaactagtcaaaaagcctgatgttatcgcaaaattagatgaattttggggaattcctccaaattataaaggcgctaaaaaatgcaaaaaacgtaaaaaaataaccctaaataatgatcaaaaagatgataaaaacaatgttttaaattattttgataaaaaaactgtggaatccgctgaggaggttactataaaggaggaatcaaagccagagttaaaacagcatgaatctgagcttgattatgaatacgtaaatgagaaggaattttttaaagaatccgtaaatgacttaagaaaactaagtaatttatctatataactttaattatataaaaatttctgaattcatctaaattaacttcagtttatccacatctggatcctatttctaagaggcattttgacgaagtaaaactcacagcccttggcggaaaagtaagttcaactttattaatacggtttaattatatttttctgtaggtatcgcataaccgcaagatgccttataaggagttccttcaaaggcaaaaggctcttaaaaaacaccttgagaaaaggaaaaaattggtaccaaatatatacttttacaattctttgattatattctaaatttacgtttatgtactaaatttttttaggagattgaactgggtgttaagttaggacttgatacaaagggaggttttcggcaagctcagttacaaaaaaggtaaaaattttaactcgattaatattttaggaggatattgagtcaaaaaaggaaaaataaaccacttttcgcaactaatgataaaactggtttctatcacattaaactttaatattttcactaaaaattttactttacacatcaatttataaataattaaatgaaagttttgatccataaaattgatttgttggtttcgtataaaaatcaattaagatcatgtgtatacttgatatttaatttttagatcaaataaaatttaatatttaatggtagagatggataattttacttttggcgtgaaatctgtagttagtggtggattaaatcttaattttactgatcagatactagaaataattgggccattatataaatgttgttcaaagttttcccaaaatctaagtgaaccccttgaaaaaataaataaactaatcacatccatccactttgatcaatctgatactaaaagaagtagtcagagggatcctgtaaataacattggacaaagtgaattagatcctgaaatgtctaagatcaaaagtgactgtattgagttaataccaaagtggcagatgatctttactgaaattgaaaaaataagctcaaatctaaagactttttctcttaaaatggaagattcagcaaagggaattataagtgaaaagaagcaagaggtagaggaaataagagagcccttaccaacacaattgggtgggaagaaattcaccgccaataacctcattgacgtactaagatactttccagtgcccatgactgctaagaggaaagaggaagtgcagttgagaaaggatgtaattttagctcattatcaatattattcagctgttagaattctggaggatctgaaacaacttccctttgaacatgaagttgttgaattggttaaaagcgcaactattaccctagataatactcataaattactaattaacaagtgtactgagttgattctctttaatgagtactataagaagtttattgaggaatattttatcgctttggatgaaccgaactcagcatcggacgactatgccatggaatttgaagctatgatatcaagagcaaagaacactaaattaggagttggagctgaaatcaaagaagaaattgaaaggttcaaaaagtggacagacgaaattgtatctgctataaaaacggttatacccaaacaagtcgaagagaagaaaaggaatagcatgaaatctaaataatcaaattttaaataatataataaaatttactataaattaatcggttaataatgtgttaaaaattagttaatgcctagtagttttttagtttcttcagagagtcctaaatcttccaaatctaacatatttatgtccttatcaatttcaccccttgttttattcaccataaatatcttcttctcactcacattgacattattattcaagtttatggtattagtgttgttgactgagttaagagtattatccaagtttacggggttatcaaggttactcacattggtatatggttgatttagagtaatttgatgtagatttgattgaaatagtgaaacgggaatagaatcatccaatggagcttttaacctaaaatattaatatttataataaacttacgagttaacttgatccttttcaatactgaacttggtacaaagttcttcaatcaaattttctatactaatgtgtaataatactgaaatgttaaccaagtgttctaatgtgatgtttacacactttttttgacaagtttcattaatttcatcacgtagtgaatttaactcagaaatattaccacgtaacaactctatgaattgattctcaacttccggtgtctctatcaatatcacggaatctgattcggagtcactttcatctttatcatcagagctcacggtgttaacgaaattaatagtttcaagcttcaaggtgttaaaaagatgtgaaatacgtaaaaataactcctcactaatactctttcccatgcctaatatatcatagtatacttcaattatgtagttagaccttaagaatataactataacaaatgtgtaaacggtaaattatttaattgttattattataaaatttatagtaaaatttatgaaaaaataataaaaattaattttctagtataatttaaaggaatttttacgacaccataaggaataaatttactttattttttctcaatttgtatcataatcttttcataatttttttatcaatattttgttctagcgttgaaatcatgatctgtaatatttgatggtggaatcttcgaatggtaatcttgaggagatttcagattccgaatcggattccgattccattccctcaaatccaatcaccacctcttcaaacacaattaataactccttaaaccctctgaataactcgtcaaatcctctgaatagcttgtcaaatattaattttagtaattttaatccaaaacctaatgttacaaattctgttcccttagctgataaaccaatatcacatggagatgtggaacagtatggttataaatatgtttgggagtatttacagtaccacccagacaaggctaagcagttttctgttatcttggaccacaatagtaggaaaaagaaacttgaagagatcttcccagaacagtttatctcccataaaatatcacaacttgataccactcaactgagtatcgagtcttttgcaaattatgttatgcaattttgttatcctccgtcaccgatactacacctgttccatgataaattcgtctcagctcctgtgaataacagcactgtaagattggcgatattttatgtatacaaccatctggtacagacgttcacaaatgagaatgtttggcgctataaagtctcatttcacttcccagggttagatatcttctgcatcccgtgtatcatacatacgaataaaatcaactgtaataatataattcatatatgtaactgtattaatatttggagacagaggggtatttactccagggaagtgtgtgacaagttagagaatataaccaccaactcctcaattattaagagcgatttaaagatatcaagcgctaactttaatgtaaatgatgagttagggtaccttaatgttttatataatatatttaaaatgcctctagtagataaggtgtacgataatgccgcctctaagtgtgatgtcaaccgtataatcgaaggtggagataatgaatatttacaaaagatgataaatgagggagttgaagaagagtttatcgaggctggaagattatctggccaggaattaattattctgaacagcgcctgcctggacttgggcggaatgattaaggaaaacgatgaaaattttaaaatactcaggaaagaaatcagtaagctcgacgctttgctaaataggaagtaattggtcattttaatactcagaattcgatggaattgtgtaatgtgggataaatacattaatgttttacaaaatttattactcattatattatttgtacattaattttttgtaatatattatttcaaaattatacttctgtgtttaaaattgtaatttatcaaaatttactcaattatttccaaaatgtgtaatatcacataaaattgtaatttttaagagtagatgtaaattacttaactttgcgtataatatttatcaaaattcttaatttttaaaccaattaaaattaataaaatcgccttaaactattgaattaatctctaacttttaattcctgtctttactaaatgtgtaaaatataaagttaatcctttaagtcctaaaatactgtagtattgtgtaaaatatcaagttattgtgtaaaatattgtaaattagtgtaaatttggcataacatatttgaattaagcaatggaagagaaggtatcttattcgacaatgtccgctgtgttggagactgtaggtgacgatgagaaggttagagtagctctaatgcctccgcacatcgccagaagacttgtaaaagagtctggaatttcctcaggagctggagttttatcaaatgttaccggctcaatacttgtggatttacctttcaggaacctactttacgagtctaaaaaagtacaaagattatactttgaacttgaacccaaagaccctgatttgtaccccaaatctaaaactgtcactaattccctactactcattgatcctatcagactcacacatctactaaataatgatttaaaccaagtaattttcaacataatacaccaatttagtagttaattatctaactttacaatatatacacattttaatccgtattataattgttgtaggcccagcgtgtattgtatatgagatgttttactgatcgtatttggttaatatttctaaggcttgtaagtctgggagttggttctcgtctaagatctttatactctttgagagactctagagttgcaactgacgagtttctaagtgatttggaggaactacaactcagtcttgttcaaatggttttggacgttacaagatgtgatttaactgagaatacagctgctgagatcgaaactgcagttataaacggctgtaaaaacgtgtgtttccttgcggagcatataagaaatcactggaataactcacttggagaattcccactcctaaacgaccttattccatacctcaacaagtgtatgcttcatgttgacaagttactactaaggagtggtttcaatcaagataatcttaaactcggtgatggttcagatcccgtggttagtctggcagatcttggaacatgctcgcctctgaaggattatttcaaagatgaagaccagttaaatggccaggctgattccacactcgtccaactccagaatttatctaaagtcaactacaacctcaaggacatttcttatgttaaggttttgggtgatattcgtaactgtatagtctcagttgccactaaatctgctactctactcagcctcatgaaactcaaaattctagatttccgtcaaaaactctttgaagtaacttttcacacagataaattaattgttaaatagttaaattactcagttagacacgagtaagagtagttgtaaactcaattgtgttgtagttaccgggaagttattcttttattaacaatgaagtattgaggaagggatttttgagttgtaatttggatgaaaatgacgcagtccccttagtacttctttcccattgtcttggcgcttattctattcgggaatgggtaatacgattcttacttgaggttaaattcgataaggtttcaatctttcttaacccaacttctcaatcctcagttaactcttacggtttcaatgagtcggcctacttcagaactgctggacaaactaaaccaaatctcggcgatttcttcactctaatgccactagatctcagattatacatgaatcaacttgcttcataagtggtaattggggagttatcagacagagtaccgctccttaaaatggtgtaaactaggcagtattaaaatattaactatggaattgtaaaccctgtaaaaacgtaatgatgtactatatattgtatatgtatagattactttttatttttcatgatatttttgagtactttgatttgttcttttttgggtgctcttctgttaagtttaatgtaactgaaattcgtaggtttagggttaaacgcagcttttctttcccgtatcttcctcactgttggttttacatacgtttccttatcactatcatcgccatccgatatcactattggttcatcttcatccctacccaaagtcggttcctcgtactcatcttcatcttcctcctcatgtttactactcttgtgagatgtgtataatgacttattgaatcttctattcctagtctggattatatttgtgactagtgaaaagtgctccttgggaaatatggaaaacagataatcacgtttaagcctggttagcatcttctctactaatcttctaacgtaaatcttggccttcgaacaacaccgttcattattgaatagtttcattatgtttggagtcacttttaccaagttgtcatggttcatgttcaccattacaattctgaagaatttcagaatctgtatatagaatcgcgttgtcgctgagattattcttgtactcaagtatatcaccagtcgaatcgtttcgaagttatcaaacttgtcaaaactctttgaataaatattacacaacaacttcactattccaatgtttatcatctcacaatctgaaacacacagttaatcggtgttaagggtagaaattaagtatagctaacccctaactaataactattaactaacgactaataactattaactattaaaaataggtaaattagtacctttgttgacgttattgtgattatagtacattgtggagattgtaattttgaggacatcgtcgtgcgtgttaatgaggcagagcagttcatatattgagaaagcgcaagttctattaaccttgttaggactatagctattgatgatagactcaaaaaccagaggatttgtaaccaaagttaccaatttggtgtaattaacattggtgaaattggtcttgatgaagtggagtaacttggtgtagctatgcaaacataagactcgttgcttagaagtatcaacagtctcacttaaaagttccagaaacttcaccagctctgtcatcccatcaatactcactacagacttcacaaattcaacgtcataatcaatattgtcttgtttaggtacgtcactggtggccatgtttgtatttgttaattccgggttcactaattctgttttcactagaccttgcttagccacaggtgactttgctgagtctgtgttggacaaatctgacttaacagcaccaccgttgttaacttcgttgttggccacatctgcgttagatgctacattgttgaccaaattgttagttaattctgcgtgtactttctttactaattcagaatttgaatccatcaactgctgtgcggtttctattgacgtctttattgcaatgtaaatgaaccgatttcttggctgttttaggaagttacgatgtagtctacacttgagttctccaggtactgatggtaaaagtgctttagataatttaattaaacaatcatttttcctattccctaacgctttttcaaatgattgtaaattcctggataaattttctgctgggcaatacttagccacatttcctatagccacgaggatcccatcacacatgttccaagtctccaaattcttcaggccactgccctcaatttcaatgtactttttaaccaaaattccaattaaatccagtgatacaggctccaaatttgataaattacttatcactctgcaggaaatattgaacttctccactccaccatttaacaagtctactatgtactttaggaccaaatagttattctccgttaacacggagatggcatttggatccagtgataatggcaacaatagagataacaactcattatatatcctttcatattcttcatgcacctttgttaaaagttgtagttcatcatctgcgcctacaccattattactaccattagtactaccattggtgacaccactactggaatcacctgtgttaccattggcactggtaatgttattgacgatttcatcgaatttggaagttttggttacgaaatattgtatgcggttaagaacgggtaaaatgtactttgggaataaagataacttgaagcctttcaattgtctcttcagtactggaatcataaacctgtacgattttgtgtgataattctcactcgtgattgggatttcatataaattcgtcagagggagccgttttaaataatcttcaagtccaaaacaatgaaaatatgcgctcaaacaactctcaacttcctcctccacttcaccacaacactccgttatcacattcaataaactttcaaacattgttataaacatcgttttcaccagttcgctgtacttattatactttacatcaatttctgaggggtcgttagtgggattaggttctgtaatgacatcagtctcaactccatcacgtttaccaccgttagtaacaatatcatcagtatccattgcatcatctgtattactactccgtgtttgtgaataggtggatagagccgattgtaggatttttgagcccattacccaacgttttggtgatgacaatgcgatttgtgttgtagtggttctattaccaaatttacctgaaatgccttcaataattctctccttcttagttttaaacagtagacagcaaattggtgtggacagcttaagtatgtgttcaaaggcgttttcgtacatttgtggtatctctgatattgcccaggatattatagtcgatatcgtctcatctatcgtctcatcattcagcttcatcaactcattgtataactttattatatcacttatcgcctcaaatgatatcatcacagtgtctactcacattattaatgtgtggagataaccatgtaattatttactctttaaaagtatataattattaactatataaataatatgtaaataaatgtgtagattataccttgggtttgaacttgattgttggtgatgagttgtaattgagtggcgagaaatttatcattgaattcttcgttgtattcatatttgaaggtgatgaggttatgtaaaacttgtcccgtacagtagacaattgctaggaacttctcaatttcaagattatccaccacttccaccaggcccacaacgctgttatcaagtttatccaccaccactgtgagaatcgcattcagcaacatcattaagttacactttaatattgaactatttgtttcctttgtaaagtctaatagtaccacaatgcagttgatcgattcaatttgtaattcagtattacttgtctcatttaataccattagaacttgagttatcaatctcatcctgtgtgatggtggtaatttcggtgtttggtacatcaacttacatatcttcatcagtaatatttctttatccgtggtcatcagagtgttagtaattccattgacactgttgctatgttcagtggtgtcagatttagatgatgtggattctgagtctgtataatcttcttcactatcttcatcaaaatctgatacgctttcttcctcatcactttttactgtactttctctattggaaacggggataaacttttggtttctacaattaatgagaaatttaaccagtgagcaataccagcaatcgataatcttagtcatgaaaatgatcaattcctcattaatcttgtcaggtgcaatctgaccattaataacatataaaatgctgttaataaccctgttaatgaagagtatgacgttgaagtccaatgacctctcagatcttgaaactgcgattgaaattactctgtaaaacagtaccgaatgctgtctgaagatgagcttagtgttttctggcatcttaaccataaatcctgacaggtaaagtctgcaaaggtaaactgatatacaagttaaattagcacttgtcaactcataattatacgctgttttccccaatagatttattagttgtgataacacaaccccgtctgtagaatatgccagcgggtgaataaactccaaactcgtctttatcaggagaaataaaccctcatacgtcaatgttccagaatcagtacaatccacactattcgccttactctccctcaatcttccattaacaccacgatttgcggtaccgttaacggtgttattggtgtttagttgatttaggaggcagtctagtgatgatcttagaatgggatatataacattgaaggtgttgatatcgatatttttaaggcctggattccagtttaaatcagcgtaggactgagaaaagtcccggattatagtaaaagcgtcgagagcgcatttcttaatcttatctgccctgccagtttctatatacttttgataaaaggccacatctgcgtcactttccaagtattccaaatcctgaggcaaaaattcacaggcgtaagggcttgtggcctttatcttagtcacaaaatttgcgattattaaagattcctctgagtaaaccattaatcacagctccaaatcattctaaaattattattaagctcgattattaactctattaaattttatttgtcatgttaacggattttataattttaataatatataatttattttactatttgtagggaattactctcgacaatcttccagtagaattttatcaaaataatttttaactatatttaattgtaaaataatgtaataaattttaaaataataagatttaatataaattaatactataaaataataagaatgtgaataaaaagtgaatggacgattttgaggatttccaggtaactcgcttaccaaaatctaccaaatcttctcataaccataactataaatatgctgaggagaattattccaaagtttctgatccggatgtggattctgctattattcgtgattctcatctgaataatagtattctagatcacatgtggtatgatagagatgatgacagttgtatgatgtacaataattacgatgaggagaattcatattacctggaatcgagggagaggaaacgcttatctcaacttccacacacttctcaacttgtaaacactagaattatcaatagcgctgggaaatttggtgtaaaaaagtcacaaaaacatatcgatgataatttgtgggagttggatagactccggcaaggtggcggcggaagtaaatttgctaatgctgagctggaacaattaagagcttcaaatgtacacaaagatgaaactaagaagattgtactggtgaggaatattattccaccgtttatttatgaagtttataactgtaataattctactgaccagttaactgatgagttaactgaggctggtgatacttttaatgatatatataataaatttttaaatcaatctgtttccactgtgaaggatcccacttcagatatcgcactaatggctaaaaaaggtagtcaaatcctaagacaaatgaaagatgaacttgaacgctcatccaccagaacacgattctgggacctcaccaattccaaaataggcaatctcatcttcaaaaataataacagagttggtaatagtatgagtaatagtggtaacaatagtgcttctgctacaggtgatagaagaggatatatggaaaatgaggagaaggaaggtgaggaggaattgaagaagattaaagaacatttagaatctgtacgaaaatcattaccagtttaccagcacaaacatgaaatcatctcgctcatcaaacaatttcaagtacccacacaactactcatctacacagttatccaccactcagccctctttactcagttaagtactaactaatcagttatttacacactaataaatttgtttaggtgataatattggttggtgagactgggagtggtaagacaactcagttgccccaatatttatatgagagtgggtttggtgataagggcataataggttgtacgcagcctcgtagagtagctgcaatgagtgtttctaagcgtgtagcaagtgaaatgggttcaaatctgggtgacactgtcggctacacaatccgcttcgaagatgtaactagcagtaacactagagtcaaattcatgactgacggaatattactgagggaatcactaatggactcagatttggataaatattcagtggtaatcatggatgaagcacatgagagaagtcttaacactgatgttctatttggtattttgaagtcagttttaactaggagatgggatttcagactcatagtcactagcgccactatacaggcagataagttctcagccttttttggtaactgcccaatattccatattaaaggtaggacgtaccccgtgtccatagagtatatgagaagtatttctaatgactatgttgactcagctgttgaaaaatgtatttctatacatatttcacaaccacccggtgatattctcatcttcatgacaggacaagatgatattaatatcacctgcgaactcctcgacactaaactatataaactcatccaatccagttcttcaggtaccgttcacactattttacacattcacactattacatactcaatattaattatataataataatatttttagggttgatacaattgtatgtggtgttgccgatatattcgacattgcctatagagttacagcagaaggtatttatgaagtacccatacaggaaaatcatcgtctccaccaatatcgccgaaacctcaatcactttcgaaggtacaatctatagtattattagcattattgttagtattagtgtagttgggtagtacttggtcataccaaccccaatacataccagtaacagcacaattttataggaattcgctatgtgattgacagtggttattgtaaattgaaggtgtataattcaaagattggagtggattcgctgcaaatatgtccgataagtcaggctggagctaatcagagaagtggaagagctggtagaacaggtcctggcgtatgttacagattatatactcagagaatattcatcaatgatttattcgagaataatattccagaaattaagcgaactaacttgtgtaacgttgttctcttgttaaagtcgctgaaaattgttaatttactctcatttgactttatcgacccaccctcaattgaagctattctttccgccatgctacaattatatatcctaaacgccattgatgaacttggtgaactaactcctataggtatgaaatacacagttattaacacactactctattacctattacactatttaccacactactctattacctattacactatttaccacacctaatactcaattgactactattacaactcccaaaactgttaacgtgtttaggaaataagatggtacaattcccactggaaccttctttatctaagataataataacggcaatagatttaaactgtttggatgagttattgacaattgtgagcgtgttatcatctccgaatatttacttggttgaaaatacaattgacaaggagaaccccagtagtctagaacgtgagaagttcatgatcccagagtctgaccacttatcacttctcaacgtgtataacaattggagaaataataattactctcaagcgttctgctcacagtataaactacaatacaaatcactcaaacgcgccaaagaaattaaatcacaactccaagacattgtagacctcaaatacaaacacataaaacaaactgactcggatggaacgggtgacaggttgattgatgtggttagtagaatagttgatatgaatagtaaagaagacttagtacgtctatgtgtttgtagtggttattttaataacgcgtcaaagttgaaggggtttggcgagtattataatttaaggagttttataccatgctttttacacccaacttcagcactctacggcatgggctatactccagaatatgtcgtttaccacgaagttgtcattaccactaaagaatacatgagatttgttactaccgtcgaacccgaatggttatatgaactcgctcccaactttttctacctcaaaaattttggtactcttcacactattttactgttattcccagtattacacagttaataatcttattatatagttattcatcttattacagagttaataatcttattatatggttattcaaattattatatagttaatttagtagtaatataatattgtgtagagatgtgtgagatggtgcagaagagtagggacaggatagagaataagcggctattgcaggatttgaagattaagaagaacgtcattgacactaaacccaaagaagttaaaaaggatttcgtacaattcggtaccaaaaaacgaaataaacacagataatctcgtacactatacatactttacggtgtatagtatatatacatgggtgtatagtatatagtacatagtatacattgtatagtgtatagtgtatggtgtatttatatgagattgattggcatattgaaataatcatgaattagtctggcttcactttcaggtaagaaattacaaagttcctttaaacttaattcgctcaaatgtaataatgatttgacctaaagacaattataatataataatttattactcttgtcaaaatcagtgagaggttatgtgatgtcactcccggaatattccttagaatcttcaacgcatcacggttctttacaaattccggcctcttcagacctattaccgtctcttttacttcattcttttccacagtttctgatggctcatcctcattattgtccaagttatcctcaacggtatcctcagggtcctttgtctccacattaggctctggatttacattttcaacagtagtttccgcagtttcatcaggtttggcttcctcaggagtgtcaacattatcatccgccttagtatcgtcagcattggcactctcagtggtgtcatcgggattactttcaggaacttcagtagtattttcagccccaggtttctcagtttcatcaggtatattaatattttcatcattatcttcagtattaacattggcattaggattagaattggcattagaattgggaacctcagttgtggcatcagcgtcttcaactttagctttaacaagatcttcagtcttagtatcaatatttgcaacagaagtttcaggtttaagattttcagtcttaatttcctccactttgaggctgtggtcggtcttgttatcagaaacgttatcggtagtagtttcaggtctggtttccagtttttcagacctgtttctgaagtttttaatgagataatcattattgatcaagtccggctcagttctattagcctaaaaataagaatacaacggtatcaaaattaccttgaggtatttgataatgttagctgaatgtttcggtgacgaggaccaaattaacctcaatttaggaaaattacaacataaaatcaccaacctaatggataatttattgtgaatatgttaatagtgttgactaataactaggtaaggggtaaaaagtacttgatgtagatgtagttatagccgcctttggtgaatcctgtggatggcaggtggaataaatcttcatcctcaaattcaattaataaaaatggattattatacgcactgcacatctcacttatctacaacaaatcatactattttacctagagtaccaggtaagtggtacctaaaatacctaagatactaaatagtaataactaaagtactaagtatgtagatacttgtttggcgagtctggcgttattgagtgagatctgtaggtccatgaaacttttccgttcaatgcagatatccctagtaataagataatcaccgatttcaagaacatttggcacgacgttaatccctaaattgaacaaataaaagggtaatttacagtgcatttcccgtgtgtcaacaataacctgccctatcaaactggctctattcagcaaaatcccctcgtctaatcttaccacctgtgatttcttctcattctgcagagaactccaagcgtcaacttcagattttaaacactttgcaaatctgtgagtttccagacaatccttgtacgacagcacgtggacctggagaaagttcatcttcttcctccttaaatcacctctggcaaatttatgtgcacagtagttctcaatagttctgaaaacatgaacatttggcgagtaaatcaagattatgcaaggattcacattcagaagtgtggtcatgagcctgtcatacttgtcaattttagtggtatttatgttactgtaggatttcacaatgtacaccgaattctctatatacttgtcaaaatccactgttatatctatgtagttcattaactcattcacatctattggcttctcatttattatactaaatacttcattatcagattctgactccgatacatatccactctccagctcctcttcctcattttccccattatcctcattgtcaactttatccttatgcctaattttattgacgtttggagtgttattggtttggggactatttgtattattgacattgttgagagacttgagcatctcaacattaacatcggactgttccagctgccttaataatattttatacagattgtagatgttgcttttatttaaaattttcttgttgatattagtgtagtattcactaatgaagctgctgttttctctggtattaacactgctatcatggtagagattcgactgtaggtattggattagcctggtgagatggtagtctggacacttaaaatactttgttaggtaatcaaccaggtagaaattctccacaataatgaccacatttctctttaatttcctgccggagttgaaatgtttattaaaaaacattaaatgggttttttcaattcggactagtcttcttctgctaacacttaaatttagatacttccgcttcgtcttcaacttgtccaagtaattccgtatataaaactgattgtaatgcttattcggcacacgatcatagattttatagcgcttgaaattactctttattatctggaccaactgctcattcgttatcggagttctcaggatatccacgatgtactcaagcttcaaattcttctctatattcaattctatcttatcattctcaattttaaacaatctacacataatataaggtttgttcataggtatatgtatatgtatatgtatatgtatagatatagatatagatatagatataggttttaggtagtagataataggtatcttgggtattaagtacggcctaactataatagtactaactgactactaaaactgtttacaaaccgttcatttgattttttgaagagtttaatgccgtttggagtgcagacccagttggagttttcagtgattatattatctaattcttccagaaaggtaattggatcagtgtaaagcaggtgatctaataatcttctaaacttcaagagcacatcaatataaaaatctttactacttaattgtgtgttttgtgtcttattctgcaagtgatgatacactttagtactcttcgcctgtttcctcagtaacctaatcaataatttgttagtggtgtagacaattttattcatgtcaacttcatactttagtctcttcatgctttgtacaattgtccaaattatcttcagtatactattgtaggcttctgaggcgatttcactgagtggtagtgacacttcaaaggtaacaggctgtaccagagtatcattgagtacattttctatagactggtgacatctgggaaataagttaacatttttcgtaaaaacatttttcaggcaatatgtcaagttgtgccctttgaaacagtgcacgttattgctaatagccttgacaaaggctactttgttcctcatccgcagtagtctaatcacaaacgctatattacagtcctcggtaatttgatgtgcattcatcaccacaatgccaccaatgatctctggcaagattttactcgtcaaaatgtcattcaggagtactctggtgttaatacagaagtaaccgccattaacatataactgctgtctagaactggataccacactgccgtctatgaagactaatttaggtaacaccagctggtcagaattggcaggaatcactttacagtactctttacccggtgggtcattcagtggattacttttcagttgtttcaagccagttgacgatttctcccggtctataaaaagtttgttggtcaaatatttgtaggcagtttcataattttcgaaatctgtaatctcaaatcccaagacaaatactaaatgtgagtatattgtgactgtagactgcacattgacatctgagaataagtgcatccggtcagtcaggtttggaaagtctgattcagacattgagaatattttcctgtacaatgagtttgattttaacaccaaattactattcttcacactcaaattgtataactcatcttcctccgtggtactgccaggtctgttgtacagctgatagtagaatttagttgtatagttggagttggaataatttaaacttttatcacttattaagccatttttatgttttttagacgtgttttcacagtttgcagaattttcgtagtcatcaattttttgtcttttctgacctcttttaccatttttatgcttgaaactgttaataatagtaacggtattagtgtctgtggtatcggagttgaattgatttggattaaatctgatgacagatgagtcattttcataaatgtgtagaggattagcgatgtaaaatagtaaataaaacaagagtctgctggtatcaattcctgaggagataattgcgagtccattttggaaatctgagtctactctttgacttgttcctacactctttgataagctgtgattcttccgcttatcgagagtgccatgtttaaagtataaaattaaactctcgcgccatgtcggtacgaaacttctcaatatctccttctcatatgataacggaggcatcagtaacacaagttcattttatcattttttacttaatttatgtttaatttaaagttaattttaggtaattttacgggattttagagtgatttgaggggattagatgtggaataatctgacagttttaggtataaaataatgagtttgtgtgaccaaattaaatgaaaattaatgagaaaaaattaaaatataatgtaaattaacaacaatttgaataataaatcgggaaatggagagatttagagaaattatttatcaggcagttgaaaatggtcagaaaatattttccaaaatgtcatttaatccaccactttcacaagacgttcatacaagtaacttttaaaattatttattaaattgattttattaatttaattatttttttagagaatttattacctcttctggccaacggggaagcttacattcttctacgcccaaaaactcaagttgctctacaactcgccaaacggtataatcaattgaattgtctacttaattatatcattaaatatatgattaaatatatacttgatataatatgtgtagaaaggtggttggtaagggaagtacggtattaacaactcataggatagtgtttataaaggaccagaatgaagattttaaaaaggttttttcaagcttaagtgtaccttattctcacctcgaacatccccttttcgtacaacctctactactcaccaatcacttcaaattcacagtctactccgtatcatcacgtttagtagtagtaattatagcagttaagtatataattaggtagtagttagggtaattagaggaccagtttgagagctttttaggcccatttaaccctacccccggacataattaacccctaattatcactcatttaacttcttatttacacataattatcaccgttgtaggataggaatggagcgcatccttttgagtctgagggtgtgtttaaattattatttgtgtcgggaggcgctcaagtgttcttgaatatgttttataaattctatgccagatacaggaataatccagcgttaatgacctcaagtaacccaatgtcagacctcagagacgataactgcgccttcgttgatcccagtgatccctcacatctatacttcacacaacccgaaaccactcaaattcatgatcccaattctaccaatcatacacaaactaactcaaccaatcagcaacaaactaatcagtcacaaaataatcaatcggaaggtaatgtaactggtcagactgaggagggtaatgcaagaacggctggagaaccacagggagatagtggaacagggcatttaatgaatcaaataggcaaatgctcatcattattccgtatcggacgttaatataatttaagtttaattgtaatataataatttaatggaatgtgtcgtatgagattccatccctatatgtgtagaaaaataattattttaatttatttataatttattaacaatattaaaaaatgaataattttgaaatttttaatgtaattttgttaataacttgagtaagttaaaagagtgttaacatgtcgttaacgtcaaagaagttcattttcctaaggagattcctcaggaaaactattattcccgccaggtaataacatacaaagttatataattaattactaattagttatataaatataataataatttgagttgtagtaatgtgttgtttgtgttggtattgtttgggataatattcttggatcactttagctataatacttcggtacaggaacacggctaccttaaccgctactcactcaatgagcttacaacttctgaaattaatcaaatgtacaccaccaaacaggatttaatcagacaggaattaagtaaatctgacacagccaagttcagtaaaaataaaataaatcgtatcctaaagctgggaaaatcaactaaaccgaattctcaatctcagtactactcacagaaaaatcattactcacatcataccaaccgtaatactgataatagtactaaggatggtagggatggtagtactgaggacctgggtgaaagatactcatattggtcctccgaacctcataatgacacacctgaaatatttataactctaaccaacttattgtcgaacatcaataatattgaaattggattcaacaagtttttactccccctgcccactgttaatatcactaaccacggtagtacccacagtagtaacagtacacttcatagaatatctggacatagtgtattattccgtctgaattgtttaagatgtatgccaagaggtgctacactgttaatagctactgtgaatgctgagaactataaatctgacgtaacaagtgtaacacttgcgatcgcagcattgagacacttatcaagtgctaaatatctgtcacagaatatactactgctcgtgactatgagattaccgttttcagctggtacaagacaattcctgcacgattactataccagtccatacttccagtacagatctggtactatccacaacgctatggtattggatttaggaacaaataattgctcatcatatttgatatcttatgaaggaattgacggctggttaccaaatcaagacattgtgaatatattcgtagaaatttgtaccgtcgagggtcttacagttagtgtcagaagtatgtggaataccatcttcagaatggccgttaacgtagataggaccagatctcacatttctcttctagagaggaatattaactcgttttccttaatatgtaaacatactaccgatagtgacattgcggtgagaaattcggaggagttgttactcaaatccctcgtgctggtaatgaggaatatgaataacttggacactgtgctggagagatcgtttaatttctattactttgtgactacaaattctttcatttcaatttcaatttatagccttgtggtaccactactcttcatcagacccatagtaaagttgttgctggatcccttttttgataacttgccaatgatcctgggtgtgctattagtgttttgtaatatatttgtgggatcaattccagcgtatcttatgttactaagagtggtcaggagtgccagtaacccaccccagtcatacacttttgatcaggttagactagcactactactacttgtggtatcttatgttgtcatatttttgtttaattcgttattattttacaagacgagtaacttatttggcgatgactacgggggcgtagactacatttccaaggatttactgttatctagggttaataatgtaaatttaaaaaagtttaaacttaaacaaatattactaaatatcaaacgtaaacttaaattcgtcaggaaaagtgactctgcggagactatggagactactagggaaaccgtggagaatcctgagggcacaatggacagtaaggtggagaatagagtgaatgaagaggtaacgtcagtgatggggatgggatattattggtatataatgagattaccggaccgtttaccgagtatagaattgtttctattatatgcaatttactttgtatctttatcatttctcctgggattatcagtgttgaactgggctctgtcatttttactctcactagtcttactagtgccactgaatgtcatcagtgtccgtagtctgctgatgagtaaagtgacttcatgtgttagcactgtttattttatgctatttacagtatttttctacccgtttgagggtaaaatgaagattgtccgagcgtttttatttgaaaattttcgaaaaatttttaagctactgggacacttgctcgggtcaaatgttttcaaaaattacaaactaattatggatttaagtggcaagttgttgtatatttcggatcacgtatttggaggtaaaacacggtggataaactctagaggtgatttattcctattaaggaagatttattcggcttcggaaaatcacatactctttggatcttataatattattattctgctctttatgtttggaataatcgcacacattctctttttaaacctccttctactcgttaaaaagaaaaataaagttaaactagattaatttacctattgtgttgccaattacttgataatattcatagggtttaatgtataattttataaatttttaatttttttaaatcatttaaatatatttaaataatttataatttgtaatatatgaagaaggaatctgaaaaggtaaagtttttatccaaatttaattctatcacatttttatcacattttccaatcatttacaaatatattaataattttcatatttgattagaaaaaatcagttaaggctgtgaagaatgagaagaagcgtgagaggcagaggattcgaggccttgatccaaaggttggaagaaagggtaaaaagatgtcaaagttactagaattaaaagcacaaaagaagaaagaaaagagaatagagagaaggaaacgcagagaagatgagaaaagaggaattccagtagttagaaaaacacctcatacaattgaatctctaagaagatttgacgagactattgttgaccctgaagacgtcgaagttaaatttgaagagcaaatcgatgaattctccgaccacttctccaggaaagttactccaaaactactaatcacatccacacggtactacacataattagtatttaagggttaatttagcctatttatcctgtatttgtaccctttgagagagaattttcacttttaaacgcattttaaatgcttaaaaatgttatttattatgactaaattaactatataaaattaaaatttatttattttgtgattaggaggccatctgagaagatgaggacatatatgaaggaattattattagtcttatccaactcttattactttgccgtatgtcgcaaataaccaattaaattatattagagggaagagtataaattgaaggaagtggtgaaacatgctacggaaaatggatttacaagtatattattagtaactgagggcgctgacaaattacctaacggtctttacatatgttcactaccaagtaacatgctaattattaatttggattaggaggaccgacgacattttttaagcttacaagtctcaaactggcctctgagatgaaaggtgctggagtattagtagcaacaaagcctgaaattgtacttaactcgttcaatacaagactaggaagaagaataggtagacaaatcgcatcactcttccctctggtacttttttacttagattagtaatttgggattaggatccggaatttgaaggtagaagagttattacattccataatcaaagagatatgatcttcttccgtcatcacaggttcaactaataccatttacccttacctatactacatatccgagttattacatacctatactataaaactgagtatatagttaagttagtgaatggatgtatagatatgtatttcgtaatgagaaaaaatgttcattgaaagagattgggcctagatttacactaaaaacacattttgtacaggtaattaagtagataatgtatttgggttaggatggactatttgatcttgacggtggtttatacgagttcatctggagacctgatttacaagtcgatagaaaacgattcttcatataatctcacaaccaatatactattaactatatattatatatactatatattatattgtagtatattggtatgagtaattgtatgtagatctggcaatctatgaatctagaaatgtctaaagttattagatcagataatataaagtaatttaaaatgaagactttgcgttacaacgacattggttcatatgaccctttagaaattgttcatctgaaacctgtgacagtggaattaaatgatgaagttatgacgaatagagaacatgctgtaattagcttacgtgggtatgagccacttaaaggcttcatattcaacagagttgtcagaacagacagaacatctggaacggaagaactgatatggcaaacaacaaaccccaatgaatatgtccgtagagtaaaaaattatcgtgggcaaaataaagacaaactttatctaaaatttgtaaatggagatgttaaaaagatgattagagatgaaggagtctggtcagaatctgaacaattaactataaacataaactcgaggaataaatctgacaattggcgcggtagttttagatgtggatatagaacttatgaggctgagtattcctattttattaaaaggatagtttgggatgatccaatatcaaagtcagaaaaaaccatttgggaaactgaaaactgcttaaaatttgctaaaaaagtcgcttattcatgtaggggtgacgaatatattgccatattgcaaagggataacaattttgtaatcctcaagctggataaatttgagtggattgatataactgaccagagactaagtttcaatattttaaaatcatactacggtgaatctaaccttgataatagaaaaaatgaacgcattgtgttcagctgttctttagagtattttggtttcgtcgttagagttgttccttacgttagaaaaagtaagccagaaacgggcaatgagtgggattacaaactatcatgtgaaggaagagagcgtttagtgtatgattttgtttatgatactctggttatattgtattcaaatggcattgtaagggaaattcagaccagaatcccaggcataaacctgccaaaaaatcaaaatgtaatactctgcgaaggctcaaaagctgctaaaaaagttgaagaaatctattgtcaaatagccaaaaattatgataagaatataataaacatactgattgacaatgacaaaatcggttttctaaccatttactcaatcaattacttactactaaaaaataacttattaaacaattatttaactgcttttctttcaaacatttctacaaataattttatcatgaacaataattcgatgaattctccacttaacagtaatctagaactcaatacaaaaaattcatgtgaaaatacatcgaaaggttcatgtgaaaatacattgaaagattcattgggaaatgatccagtgaaacaagaaataacagaaaaaatgatgaaggatgagataaataatgtagtgagcgatgaaataggtaatctagtaacaagtttgattgaaaacaaggtaataggaaacattgaatgcgattctattttactgaagaataatgtaatattcaccgacgtaatggtcgagagtatacaaatagacttaaatatcaaatatatgaaggaaaaaacgatatataacacgcggacgagggataattgtagggaaatgtactgtgaacatgttttcaaatttgcaagggttgtagactccaaatgtgagcctggtaactcgttgatttgggaaactaaagaccctgcagagttctccagaagattatccgttttcatggtcaaggaaaatgagaatgattatcacgataaatacctttgtatactccaggataataataaatacctcctcttcctaagggataaggaattgaataactggcttgacataaccaagacgagggtaaatatgagtaaattccagttctactacaatgatgaggaacttgaagaggaagaatatgaagtaaaatatgaatatttagagtttaaaatatacttcaaatttggctgcaacaaagttaaatatgacaatgaagaattaataacagaagatatttcaaagattaatattaatttaccgctaagtgcagttcagtcttatttggaaacagggaaattaataacaatattcattaaacatccagaaaatgttcctggagatcttgaaaatgatggagactttcaagaggatgctattcaaaaaaataatgaaaagaatgaattgcaaacaaaagttatctacattaaaatttaaaattaagagattgctataaattaggtagaatttgccgtttcctcttttaagtgttttcgttaatgctttatggttgttttattaactattcataatatactttatatttatatatgtgtttatctatagtactgagtgtactttagaatatatagcgtgaattagtataagaataggactaaattatgtgtttttacacagtattaaacaaaagtcctgattgtctaatactaaatgattttttaaacttaagacgttgactttacttattaattattagattaagaagcatgaagtgctagtgcgcttacgagatgatgtgctggaagaccttcaacgtcgtgaagacctgcaaccaactcgtggagggcggctacaaaagcagccataccaacggctttggcagtaccaggatttgctcctgcttcgaaggcaaggaacacgtggactgcacctcccaaggggtgaagaacttccaaatggacaaacttcttactctccttgctacctacaaagtgcaagtccaaaagtacttcgtctccgactgcctcccagaccaagtggtttccacagacaactttgtttaccttgccgtggactggtctgacccatgtgaagaaatgatcacccttggcaaaagtcttgtgaaggaaaacggtatcaggaagatcaccaagaggacatacaccgacttcaactgcggttttatcaccttcaccgtgtttcccgtataggacaaatttcaaaggcttcaagtctaatacctctgctgatacatagatgccagaagtcaatgccgctaacaaagccaatgtaacaaacttcatcattactatcaactagttggtattttagttgttatttggatgaattccaactgtgaattactattcccattcctaatggggagaacaccacaacttattcctccccattaacactgacatatttctcgtcttatcctcattttccacaatattaacaccatttttactagtataataatacttatagtataatatacagttaactgtcttagtaataggcatcctaagtatgatatatagcaataaatatatagtgtgtgccatcaaggggattctatactagcataatcaagcacaatatagtatagtaatagtataatacgtatctaaaaccctagtactccattataccctatgtaatatacaatcaataatctatactaaaccctaagtattaagtatataatgtgtgtagcaaattaattctatgttacattttacaaaaccgcttcatatgtcataccaattgcctaaacaaaaggttatacaagttgactgaagtgataagtaaaggtgtgtgtggtacctgttggaatatttcattttgattaattgttcatccatggtgaatttctgggatttaaactgtgagtattcatcttttaatagtgaaaaaacatcaaatttaaccttgacaactgcaaagtcatcttcttgttcttgtgatttcggcttaattttcttcttcttcttcaaacttgcgacgtcagatttagtgaacattttaacagattcagccaagtctacatcatttttagagcttaaaatgcccttagagtctcggaatttaggtacccaaatctttggctttgtcactggctcctctacctgctgttccacttctctaggccaaatctgctgagttttacgctcctgcgactcttttacagagtcttcaggctctccattttcaactgtttggactatttttaccagattcggaccaaaatttgatggagcctgtatagcttcatcactctcatcactactcacacgccattcattatcatgttcagactgagcttcctcctgctcctcagcgtctttatcttgctgttcctcctcactttgctcctcagttttctgtaacagcgtcgaagccttcacggcagtcttcttcctcctctccaaaaatgataccaacgtatttgccataataattctaccaataatttataaattaatgttaaaaatatttatttaaataaaaaaattgaaaattgaagttatttaatttgtttgataaaattcgttccacaacaccatcatctttacagtaatatttataattattaatttttttatttatatacaaaatagagtaaatagaatgtaaaataaacacatttttaagctataaaaattaattttaaagttaaaattttctatccagaacacataattaacccctaactagcactaactaatgaatattatagttgataagatattaatatttgggtattttaattccaaagagttccagtcttcttgccagtgaggtgtagatgctattcagctcttccgtatcgtccactcctcccaagactcctgaactcgccgtactcaacagtatcacattattcgagctattgtgagtcgtaacagggtgattagtaacggggtgattggtaccagtgtgtgtgttcagggtgccgttattctgcgagttaactgtgttatagttcccgttgtagcctccattataaccgccaacgcagttgtaataacgttgaaagagccgctgtagtattttaatgttaatatttggtatttgggcttcaccgttgttactattactgagtgagtaaacttccataacaacttgtgccgcctccttgaacagtgatcctctgcttaacccttgaattatagtctcaaaagtcttggcgtcgggtttaacaccgttgattttcatatacttgtaaatatccaagaccatagagtacttgccgttagtgatacaggcgctcatgagacaagtgtagacatgagtattaatactgaagttgtaccgttttggtaactcgtcggctagttcaaagactttatccagctgtccgctccggccatacatcttaatcagaatagtgagggtaaagttactgggcggtatgttatactcttgcatttgtgaccacagcttttcgcatagccacagtagaccagatttaacacagccttcaagtaaactgttgtataaaatcacatcgggcattatcccacgctcatacattacactcagtagctgaaacgacttgtccatgtcagactgtacacagtaacccttgataattgtgctaaaagtgattaaatcaggttctatgcctgaggataacatttcctctagtaatcttgtggctgagttcatttcacctactctggcacaggcgtcgatgactgagttgtatgtcacggtatttggctgtactccgtcctgctgcattagtctaaatatacgcatagccttgtctagctgtttattctgaccgtagcccttgatcagagtggtgtacattatcgtattgggcttcactttgcctcgctctttcatgtcctcgaataatctcattgcgctatccacactattgttattcacatatgcatcaaacatacatccgtacactatttcattattcgtcacggtgcttgcagatggagtcacggggttacttacctggttaccaccagtcactgtaccactagttactgtaccaccagtcacactaccgttggcaccattgaccccgttaaccccgttagtaccgttggaattaatatattgatagaacaattcctcacaatcgtgaataagattagaggaagacagtgttttgatgatgatcccgaaggtttgtatatttggtaacagtccccagactctaaacttgttaataattcttaatagtcttttattattcttgagcttaatgcaggagtctaggatgacattgtaacaggcttcattgatgaggatactcgtcctttcacaaaaggttaagaaagagtctagcttagatctcgagtctaatctcgtagctaccatcattagcatggagctgatctcctcgttctgatgatttgaacgcagtaacggtttcacatagtttaacgctactgtgaagttcaatatcgctatgcagacacggactaaatacgtactaatcctaaccaagccattggtcatcgtactggagttagagatcccagagttaccagtgccagcagtaccatttgtcattccattctctacaaaatattgtctccgcaggggtaaacaagtaggtagtaggcaataagtaatcccagagggtatgaataatgaataactaagggactaaataactaagttggtacaagcaccgtaacgcacctgtatcattattgtaggatgaatgtgtgaggaagacttcacaagattcgtaagattgtgtgcccttgagtaatctgttgacgtgattaaaattcccctttagagctatggacaggagtactttttcacaaatgggttctgaaatcatgccatagtagtcacagtaatacttcattacggattcacagctttggaaatcctcggccaacaaacaacactccaccagtggcacaaataactccttattatcacttccaaacaattgcttacacacgtccaataagtttgtcaccaacctaccgctcacactgtttactgtgttactgttgattgagttggtggtgactgtgttagtattgacagtgttaccactaccaccattaccaatggtttggatgaggagattaatattttccagtgtgatgaattcaaatttcccaaagttggcgttggtgaactcaattggcacaacacttttcagagtctgtagcgacgacagtgcaatctttgtaaccactgaggggtaatcaataattaacgcaagttgtagggaattaataaatgacagggcgttgaagcattttttctccagtagtctcaccactacggtgccataacttaggccaaagttgatggcgcagaattccagaaacagcagtagaactttattactctcgatgaaatctattgtgaaattcgggttcaccatcacgtccacaaatcttaagacgaatttaaccgccgtcgtcagcttagaatagaacaacattctgaacattctggacagtgtggtggtacaatcagaatctgtcagattgaggaaattatcaaatttcggcttccccaagagatcaatttgtaccaaatagccaacaatgagacaactcaacttaatatttaatctgccttgatgattttctaatatatttaagacccgttccattactcctgggtcctttcttatcaactggattaacattgtgacatacttctttatcacagagtctataccattggactgatatgatagcagatgattcaacagtgatcttgataattggactgtatctggtatactcagaattgataccaaagtctcagtatacacttccacagtcacgcctcttgctggggtcacactgttcacagagttgacagtgtcagtgagttgattcgacaataataaaagtttgtgtgagaagggtaatagtagtttgtgattgcagtatttgatgatggtgttgtagacttcagaaggttccacggtgaactctgtcataaacatggagaacagttcattctccactgtaatatcacccattaaataacgttccaggagtccatgtactgattctgcaaactccgtgttcaactctgaacacaatggcgtcacagtctcaccgcacagcgtagtatcagcactgaatgtagtgtcggcacataagggcgtgatagtatccgaacacagaggtgtgatagtatcagagcagagaggagtaatagtgtcagctacagtgttaacactgctaacaacatgtgtaaacggtgtttcatcttctttttctatcaagtcgatgtagtttccgtagtatcccatgtcaaattcctcctcaccgtaccctttaccgtagtgtttaccatagttggagtaatagttgtgataaagcgattctgaagagtaatttgaatcaccgaaactcgttgaaacactattcaaatactgcaataatcttccatcactcttttccacactattcattgcgttcatagagttgatagagttgatagagttgatagagttgttggtgttgggttgttcaggagaggagagtagtgatgagccttgttgtgtggaggtttcgtcacacattgagaagagtcccttttcaaactcactaaatcccgccaagtcatctctaaacccaaatatgtcctcctttaatcccagcgcatcatctttaaactctgttaaactatctttatagcctagtgaatcactcttaaaatctagtgaatcacctttgtagtctagtgaatcactcttaaaatctagtgaatcactcttaaaatctagtgaatcacctttgtagtctagtgaatcactcttaaaatctagtgaatcactcttaaaatcaagtgaatcacctttgtagtctagtgactcaggtttaaattcggttagttgatctctgaaggtggagtagccggattcacagtagtctagtccactggttagtctagaggctttaaagtcaactgcataatcaccgaactctgtgccatagttagtaccgaggtctgtactgtagttcccgctgttaaattccgagttattggagctgagtgagtggttgagagatttgatcatatcattgattgtactattgagtgtgttataagagttagtgtgtaatgtgttgtgtgtgtgtgaatcgtttggcaactggttattggcattcaattggttagttggttggtttaggctatcaaatgttcctaaacccaagtgacttgatgttttatcaaatttttcattctctttaaaattaaaatttttttcactagaaacaaaattgtcttgattcaaatttaaaatattattaaaatttaagctttcattaaaatttaaattactttgattaaaatttaaattactttgattaaaacttaagttttcattaaattttaagttctcactaaattttgagttttcattaaattttaagttttcattaaattttaagttttcattaaattttaagttgttttgattgaaaagttgattaaattttaaaatatttgtactaaattttaaatttttattaaaattttcttcattctctttcaaatgcttttcactaaatttcaaattgtcattttctccattaaaatttctaacttcttcattcaaatactgagtcttattttcactaaatttcaaattctcgctatcttcattaaaatttctaacttcttcattcaaattctgagtcttattttcattaaaatcttcactagttaaaatcttatcattagttaaaatagtattagttaaaatagtattagttaaaatcttatcagttaaaatagtatcattggttgaaatcttttcattatcttcattgaaatcttcattattaattagattaagaacttcattatggaaattatgtaattgtgtaagtgtgtgttctttttgactttggagccttggtttactcaactctgtctccaatgtttcctctcctacactcgcagatccgttttctactactttatccacaaccttatcaactgtattaataatattattagtgtccactacggtagtggtgttgagtgtgttgttggtattgagtgtgttactactgttgagattcaaattaaaaattgtattcttcattataaaatatattattaaatttggtaatgtaataaattcaattgtgtaatgtaagaactggcagtgttctcagtgtgaaagggtgatggaatcccggttgtaaagggacataatagcagtgaatgtcgagtgaattaaatataaaactgatgaacaaatataaaaagtgtaacgggcgtgagaaatatgtgagagtcagagtaaattgagggctcacacactagggcacacactttgggctacaactacttaaatgttaaaatttcaataaaaaagccatttacataaaagaaagcttgtaaaattaattactgaattggaaagacacaattaaattactgtttttacacaatcaggcaaatacaacgccctagaatacccacaaataaacctattacacattcgaatattatcaactccccataccaaattattattattatacacgggcccatgcctattaaccgcgaatccgcctagaaatgacatttacaagtggattcccaacctcaccttacaatggacacacatcactcactacacattgtcatacacaaattttaattctttactttttacacttatttcaacggattctcacctaaaataaattttagaaaattttaaccttccaaaaggagtattagtcaatcatactataccagaattactccactcttacacaacattttcatcattttttcaataatttaacagtttaattatttatttatgatagaattaatttaatttttggaagattcgggggattttttatgttttatccaatttagatatatccatttttactcattttaccactgtattcttacacattttcattattttacctttaaaatattcagaaatttacattattttataaatttataatatttgacaaatttatgattttttattgatttaatgtgagaatgggtaatttttgagggtttttaaaatttttagatgattttgaagaaagttcccaaaataccgatccttcaacccaaaacggtattttaccctctctacactatttaatatatataatttactgcataataatataccttagtggaggatgctgaggatgatgagtcgggagtatcatatccaggtaccgctataaatgatcttatttatgtgttaagagatgttggcggaggttgtgttgttgacaagttctcttggaggattgaagaaacaattatttgaatctgcaagagctcaacatttgttagattgtaaaggcttggtttattacattgttgatgccaataaagatctctccaatgctacaggtcattcatacactgttaagttatctattcttaggtataataggtatactaagggtattatgtagttagttaggggtataaatgggtcactggtctgggattatctgggccaggtcaatcacatagctatagcaataagtacaaaaaatattaaaaaatcgaatcgtggatgtttagataagagttttaagagtattctaaagttataattaaggaactttatatttattttgtaaatttaagggaaggttctagaattttttagttcagaaatctagtttatttaactcaatttaggataatttagaattatttaggttaatttaaggttaatttgtggtaataatttgaaattttctgtctaatagataaataacactgtataataacacttcaagtgaacctgaggatccataaggaacccaaattttctatagttaaaactaactttttttcttaaatttaagtagtttgatgtctaaaatgatgtttggaatgatttgggattaattaatttaattttcacaatagtcgaaaaaaatcgatttttttcaaaacctaattgtcacttttgggtccgggccaaaatcgaaaaaattcgaaaattttattttttaaaaatgtcaacagaaatcaacagatttaacattgttaagcaccagaaaattgataaataaaataaattagctatccgcactgaataactgtgccctaaagttgtgcttgacaaggcccagatagtcccatgcaggggaaccgaaatataaccctaacatatactaaaaccttagctatataccaaatactatatatttagtctaggtataatagtatagtagttaagagtagtatataatggagtagattggaaagattatgaactgtttgagaattggaaatccgaaggcatcttaagattattcaaagatgattccggtaacgattcaggtaaccaacacactattcacactatcaactagtgtacaagttgtataattgtgcacatttgagtttaaaattgtttagttgtgttaccgcaagtgataattgatggagtatcaattggtgatcaaaaattcctacaagatttagaagatgacggggatctaggcattattttacaccatttttccatagttatataataactcactatgatattagactaatgaatttggtagattatatagtggcgagattaatatgtccgaattgtttatgtgataaggaaacggaagaagtttcatgtccaaaatgtaaaattgaatacaagaacattgtaccagaggaatacgacgataatacttacatcagaaaactttgtcaaggcctgccttgccaataaattcgaactcaaattttcaaaatttttcagcaaattttcacaaattaataattttaaaataattttttcaatttaaaaattatataataattaaaaaaatgaccgtgtataaataatgtgtaggagggatgagtgaaaggggagtaagacgtaggtgagatttgggtgtgtaggagtaaataatttaattggcaaaaataaataaataaatttaaataaaaaaaggaattgtagaagataaagtgaacaataggagaaaggtaaaaacaacatcaagtggcaatgcgattaggtgctaaacgacgttttcagttatttttaaaagtttttatgtgttgttcaaatgtgcaagatttaactaaaatattttaggatattttaataaaaaaagatttaacataggctgttattcagactatacacattcacttacacattcacatatgtgttgatttaaatgcacatttgagattcaaaatgttcctcaaaccaactttgatttattaaaattaactctcaagaaaatggtttcgtacaagtttatcatacttttgtttatatcgggcaaattcactacagtactctcgctcaggaatctggccgaactcaccctcgctaataatgatacacatcaagtcctacaatccgctgatcaacatacagaggtcaaaggaccggacagtaatttaaaaactcaaaaacctcttgaaggacaagaaaatcaattagaacaacaacaacaagagtcacaagtacaagaacaacaacaacaagagtcacaggtacaggaagttaatgatagggttgccgatcctgcaaaaggagatctttccgagaaaaaacaagaaaaagagttagaacttcctcctaaggaaaatcaagaacacactgttagtgatcaaggagaacactctactgaggggaccaaaaaacaaactactcaggagagcaaagaggttaaaaatgccttaccagaacgtgaaggtgatttggtaagtcaaaatgctaaacgtacagaaggatcagatggtcatacagaagaagcctcagttgaagccggtggatcaggtggaggtggaaaagccggtaaaccagaacctggatcagttatccagccaccacctgaaaaagttgaacaaagagaagaaggggttaatagtgaagataatagagttactggagagcttggagctaagagacccgctgctgaaagaggtagcgagggtcccccgggtcaacctggagagttatccaggccagctcaagaagaaggccagactgattcaagatcacaattacccggcccagaagcagcattaagtccctctggtaagggatcagaattacccaacccagatcaaagacaagtaactgatacgaatggagacggttctggtggtactactgtcacaaaaggcgctacttctgaaaatgctttgaattctggcggtgcttctgctactggagatcggtctactggttctagagctccggccgaaccacaggtaactagtacgaccgttttgaatactggtggcagtggttccatgaataatcctactggtacacggttgaatcatggaggtagtgctggtaacttgttaccatcagttcctagggttgaagaattaccttcaagagcaagtgcttcattaatacatcctttaacacctgatgaaactactattagacccagtgttcctcaactagccggtgctgaaacaactgttagatcacaaaccaaacaagtcccaatcaatcctcttcctaacactagttctaccaatgcaactccaccgccaactcctaatccagtaacacttcctactgtgttaccatctagcccaagagctccagatgcagctccgaatactcctcaggcaacacctaatacttcaccacctaatactccacccactactcctgcaaacaaagacgatggagtgaaaaatgtgttaatgagcgtgttgagagagttggagaggagtttggatgaggtgaatgaaattgaactatcacgtcctgaaacaccaaataaacaatctttatgcgatgttttaaatactacgaccacgaacatatgtcaaacaaattctaacccagctaacgcggggaacactggtgcccctgtgaaccccgagttactaggcctggtgaacagatactacgtgaacaacgcgtgtgtgactgagaactcactgaatcaattgtacaacagtggcgacttttcatacaaattgttgtccaaacacttggcacagtttagtaaaaaagcgccaaacaaaactgttcaaacggtttatgacaagtctgtaccagtagtaacaaagttaactgaattattcaaagacgctgaaacggctctagtttcagacactgtgaagaagttactggaaaaaagatactcagttttaaccacggcactctgcggtgtcgcaaataaccaacaagactttctctccagcactgagctcaacaataaccacgtcacactctcactcaatgaagaagacttcatcaatcaagcggtaaccctcagttacatagttaatttatacatttaataatatataatataatttatgtgtagactaaagaattgatgaaggcgtatgagccaatggtggagttgctgagggagtttaacactttgttaccgaagctgtttgagttatttgaggaaggatttgagaataaaattaatttagtttcttcactagcacatgttaaacctcaggagtccactgccagtagtggtactcgtagtgggtccggtactggtaatacgggtgtggtacctggtggtggtggaaatgctggacctccagcacatgcgctgatacagtatgtagatgatcaggatagagaaatagccgcagttcatgggcatccatctttgattcaaagaattaaatctctattacaaattaattctcctgctgatccagctcccactagacctaacgaaccggctccagcacgtaaacagcctcctagacgggaacccggtacatctggtcagtctagacccagtggtccagattccacccctgtgaatgggttaaggttattggatagagcatcaccaggaggtgttaatgtggatcaacatactcctagaactgctacttcgggtttaactccactaccgggtccccaggctccaagtaatccaggcactggaaactctggacaaggtaatgtggttcccagtcccccagcgcctattaatcctggtgctggacttggcagtgcagatgcccccggtgagactgatgggtctgaaggggtatttggaggtttaaagagaaggctgaaatctctggtatccaattcaccgggtcaacccgcaactaaaaatgtacaacatgaaattgatgatgagcttttaaccgcggcgtatgcacagtttgaacacttgggactctttaaaactaaaaatgggaaattagttcccgaactcgatgaacaaaaagttaaaacactcgttcgatccaatctactctcactcaagtaatcatactacatagttatgttacctaattattcacatatttacgcattctattgttgttgtagtgagtttgattcgatgtataatttggtgattggtccgcagcgttcgatgcatgggttgtatgagtttgtggagcatttgttgttgtcgccagatgctgatgagaagatttccgctttaaacgacaagaagttgatggagcaaatcaacaaggttgtcagtcccttggaagatttatatgaacaagtaaagtcaaattccaaagatttaaggctaagaatgccaaaaattccagtagaagaaactgttacagtgaggagaacaaagagaggcgccgctgaacataggccaagcactgctggttcaagctttcaagtagtttcaaactcaagtggagtcaaagtctcacaagaaggccaattagccaaaattaaaaacctgttcaaaccactcttgggaaatgtaatctctcaatacaatagttaatagaataattagtataaataattaatataatttaaataatgaatttcatagggtatgacgggatcgacgtggtttttagtagtatcatcggttttaattatactaatataataatattattatgtgctagttgttggggaatttgtaaaactataccgccgttaagtgacgtatactttgattaatttataaatttttgttttaaactgtttataataattttaaccattggattggagcggaattagccaaagtgtgtggactggctgttgatgatacctgccacggaaggatgcaatataatgcactagttcaatcactgttgattatgaacgaaaaaaatataaatttgtggaatttctttaaaatttactactaaaatgtttaattcaatatcgtaacttttttaaattaaattttccaacttttttatcgtattcctaaaaagtacgtttccagcccatttttctacacattattcttattattagcacagtattagcaataattaattcagtataattagtagctaatggaattaatttagtgctgaataatatagtgaacgagactgacagtgtgttactggcgaatccgaagcttatcaaggatgagcagcataacgcttttcagggtttgctaagtttcgacgagtctctgctctactcatcagggcatttttcgtccaggaatgagctcatctcttgcatcgtagccatgctccatggcgttgaagttttaacttatcttcccactctatacctctataaagacgatttcaaaatctctccaggtatatcttaccaagtttttactcaaatttcactcaaaatttactcaaattttactcaaaaaaattcatttgtgacgaatctgatgtaaaattgattaatttatgtaaatttttatgtattgtaaattgattgatttgtagcgttgttgacgtttattttgggtttgataaggttgcccttgaattctaagttattgttggcgtttatgagtgattctgtaccgatttttggtagtcggaggaaaagttatttggctatcggatccttcatttgcttttcctcaatgttcatcctcggactcttaaatgaaagctattccattatcctcacaactttactcttcgcactctgctctctcggatccgccgtatcccactaccctgttatacagttatactattatacagtattaactaaaattatttacgcagtgcaataattctttagttgtgtagtgtgattggagaggcactggtgattgagtgtgcctataaacagagtacggatcaggtgacgaaaacaatttcaacattttatacatttcgtaaattaaccttcgcagccatgtcatacctctcctccatcctcatgatgatcattaaaaaacgggtaatctccaagcttattgtagtgttagcttagcatagcatatagttaacagtttagtcaagtaaatagttaatgccgtagtcaagtatatagttggcagtgtgtatgtggattaggaaatatttatgatatcgtcgagtttaccgttttgtgtattttttacatcatttttcattcaagagaagccgtttgggtattacttgaccataaaggaacagtataatcgattagtctccttcgcttcaaaacctgaaatcaaaaatccgtccatattcctcttcatctcaatggtaccctcatacgacttctaattatttaacctaaggggtgttcacccctagactttatacacagttaatataatatttggtgtagatagtaccgagtgctggtacagcgatgttttattttatgactgagcggttgcactttcagcctgagatttttggtcgtttttcggctttacaagctgttgcaagcctatttggaatctactgttaccttttattcttcaggaatatcagtatccggaaattgtttgtctggactacatacttagtagcggcattttgctcactgagcattgtattggtaaagaggtggaatgtgattttgggcataccagacaaagcctttgcaattactgacacctctctgatccagttcattggggagatgaactcatttcccatttacgtcatggctacgagactgtgtccaagaggaattgagagtagtatgtactcgtttctgtggactgtccagttcctgggaatggacattagcacatacatctcctcaggacttacacacctgtttgggatccaaagccataattttaaaggcctagtacccatgatcatcgtatgtgcagcggcacaacttataccaaacttctttgtatctttactaccaaatgaactacctaccgtacaaatggatgacgatgttacagccacaatcggtataataatagtagattaacagctatatagttaagtatacagttaagtctatagttgtagtagttaactagagtataatgagtatgaatagatgaaggagaggagggagaagggaatgaaatccaggcaggatcagagttttaatttttttaatctttttaaacaattttataccttattttggattttattactttgcaaattgttggaaccacaacattggaaatataattctacaatttattaaaattttaaaaattatattttttatttaaatttctatattttacttgtaatttaatacctttattagaaggattaagttggccatagaatgtctcagtttatgggccgtatgagtaaattggcaggtttaggcgctgctagtgtggcccttccatacctttgcttatttgacgttgatggcggtgaacgtgcagtgatgtttaaccgttttgccggtggtgtaagcaagaaaacattcggggaaggctcccacttttatgtgccctggttccaagttccttatttatatgacattagagctaaacctaaggtgattaataccacaactggtactcaggatttacaaatggttagcattagcttaaggctattgtacagaccattggctgaacatttgcctagaatccatcagaaacttggtccagactttgatgagcgtgttttgccttcaattggaaatgaagttttgaaggctgtagtggctaaatataacgcagaatcgcttttaactcagagagataaagtgtctaaggacattagagaggccatcacagctcgtgcaatgcaatttgatattaaacttgacgatgtcgcaattacacatttgagttacggtaaagacttttcaaaggctattgaggagaaacaagttgcacagcaggaatctgaacgtgttaaatttatagtggccaaatctgaacaggagaagattgccgctataatcagagcagaaggagaagctgaagctgcgaatctcatctctaaggccgttcaaactcatggctcaggaatgctagaggttaggaaattggaagccgctaaggaaatcgcagaaacgctctccaactccaaaaacgttgtatacgtaccaaataatctcaatatgctcattaatcccactaatctctaatcttatttaccctttaatttgtgttgttttactgtatattaatactatgtaatataccccgtgatactcctactactatacaaatacatacatactatacatacacatagtatatactatatactgtatactgtatgttacataaaatgttattgattactgcgtttgggagtcattggtatatttaaaagccttgcgatattgaatttattgcatgaatatctcacaatggtctgaaataggaagcttggaattaagtagaaaaaggcactgctcggcatcgaaagcccgtaaaatgttattaatattatccctatccttgatattatcttcatattcttctgtctgttcttcaacttctccaatctgctgtctaatccatcatatatcagtgattaataattaactatagtaataactgtgtaataagtgagcagcgtgattgactgaatttacctggcgtggattgtaaattgtttggaatggtgagagaaatattatgttcgaaaacaattgtcatgagaaagccaaaaattgttggtagaatgtaataaggatctggaagacaaagactatcaagccagagacaaggctcataggtgaagtcaggtcgtgatttaggatcaattgcaaataatcttaatccaccgtaaacagttccaaacattaatccttggaccatagtagctcccgtttgtgtaaaaacgcctttaacaaaggaatttctctttgttaactcgaatatcttaagctgagtttcacgtgctaattcatgatttttagtgctaaaggcctgttttgccttttcttggagctttacaacatcaggaacaatcacagcatttaatctccgactacgctcagctgctgaccaaactggtaacaacaacaccttaaagaacaaagttataagacaaattgtggtactccaactcaagtttaaggtgtcgtgaacagttataaacatttgctgaacgtagtctacaggtaaaaaatgctgtaaaaaacttcttttactgccatttgattctgtgattctagtaagtaagtactggtgatagtctggaatttcaaataattcctcaattcctgaactttcctctccaatttccaactcctcctccaattcctcaattaaatcattttcggccttatttttagtattgtagaccttttcattgagatcatcagtactcaaattggagtttttaaaatttgagaagaatctcggataagattgattgaaggtgttagttatagttaaattaaaggaaaatgtgttacaatggttaattaggattggtaaattagaaaatgatttaggaaggttatgtgttgagttatttatggaattaaagtgtgaaattgatcttttaaatgtattcctaaaagagaaaacattatttacaattaaataattatcatttatatacttaatatttttatataagtttaacatttaatacattttgaccacaataaccactcaaaagtgttttcacaacactataaactgtttatatatttaattttctacacatttttaatttgtacaataatttgttaaaattttataatttgttatttatttcaatatttaaaatgattccttgtgaaatataattcactaattgcgttagtgaaatgttatctactgtacgtagtttcgatttagtgttattagaagaaggtgaggaatatgttactgatgccgcctgtactttattcactcatttccccaatcaatccaccgtcaacaacaataatctcaattctaccaataataacccaaatcatacaagcaatgtgaatagaaatgtttataataagggtagaataagaataggtacaaaatcattgatatttgaacctgattctctggatatgccattactcaaattacaattccagcatattacacatattcaacatcacaacaataataatattagcaataattcgcttaatatcgtgagtaactcggtgaatagtatgaataatgggatgattatggatgagaatggaatattggtgtgtagtaagcaggtaacatcaattccaacatcaatatataatggaaaatcaagattcatctcaccatatacaacttacacaatcaataactcaaccagcaatatcactaatttaggtaaagtaatagtttatacctattagtattgtggttaatactggtttaggtaatataagggatgcaggattgagtagtttggaagttgataacatttcctgttacacgtttctatttatttattccacttctgagctccaaaaacaacaatttataatctttaactctttgttaaactcgatacagaattcaattccagtcccaaacactatcccatatggcactggagttggcgggatatcgatgggaataataccaaatagagaaaagctaatattaggagttgggaaagaatcgatttactgttggcgcttgaagcggatggtcagacatggtggattttgtgccttaactgaccgcgccttatacttccagccctcaccgaatttcagcagaaaattatttaaaaggattaatttagacagtgttttacatatttttaaaagagatagtggtttgactagtactggagagtgtttaacggctctggaagttgtctctcttcccgaagaaatcactgataaaattaagaggaaacagtacagatgcatttacttggaatttaaacaaggcattgacagagataaacttgtcaacgcactcaaagatattgttccaaagtatcatccagttatggaaatagagataattagtctaatattataccttagttatgtattcacaacccaggataactctataaaattgtttagagcattttatgcaattgaatcacgtggatttcgtaacgagatgacggaattatggcggatgggactgctgcccaactttcaatatttggactttctaaactgtatcgcaggccgtagtagatatgacatatcgcattacccagttttcccctgggttctcactgattattcgtcctcaacacttgacctcggtgataatagggtttacagagacttatccaaacccatcggatcactaaatatagaacgacttcatttaattaaaaaaagaatgtacaatctttttctatccaatcaagtgaatagtatggacaaaagtttggataattccatgaaaaatgtaaagaattgtaaaaatctgaagaatcgtgataacagtggtggaaagaatgtgaataaccgtgattccagtggtaacactaagagtacgaagattgtaagaggaggagatgaggatttatgggatatgggatattatatatatggctcgcattactctacacctgctttgatagtgttttttttaatacgtttattaccagaatgtcaactaaggctttatggtggtagatttgattcatcgtcaagaacattcaataatatacaacatacctatgaaagtatccgttacggtgcttgctaccgcccacttagtttagttattcactacctagttatttcttcccacttatttacaatagttttataccttaaattacctatataaataatatccactacctggaggtaatctgttattcagatgtgatgaacggacattcatcatttttcgagttaattccggaattctacgagagtaatgagttatttttgaagaattctctgaacataactactcaggatggtcgtttaggtgacgtagagttacccaagtgggcccacaatagtccaactcagttcctaaaaatcatgagatcagctttagaatcagactacgtttctaaaaatttaactaattggattgatttgatattcggttataaacaaagtggacaggtatcccgtcacgtcgggtgattcccgctactacctagttacacctagttttcccctacctggaactcaattttacactatttacactagttatatagtctaaattgtaaatattactcttaatctggtccaataaagttctttagaacagtataattcataataatacgtatcatccgttgacgtatttgggaagtgttcacgctgggaagttgagaactacttctgctattcaaaacctcttgaagactatggactctcatgctatttctgtacaagttagagaattcggtcagtctccaatattacttttcgatacgccacatcccagaaagtattccgttacggttcttgccaacaccaacagattagttattccctagttatatcactcctgaagaacttattatactattatataccccttacgatgttatttaatatagttaacaccatattaactctaatattttgtagactggtgtttaatgagtttgatgtggatgatgtgtactatagttcaccttggtttatttacgttgagaaacactctgagttattctcaaagtcgattttttccaggtcagcagagtctgcagaatccttacgcttgaaccgagcaatactcccaacccattctggaggtcatttgtaccaacttacagaactgcactctgataataaactcaaatcacttaatctggaaacaattgagaaacttaacaatttgggatttcttcctcataacttctattactttctcacttccggttccatccaattcaatcgcttcaacagcaatactgatgttgacactaccaatactaatggtgacactgaaagtattgattccgatgtggataaattaagtttaaatgtgtgcagagagagtttaatgtgtgggattgagataagtaatttattatttacgtgtgatagttctggtcatttacatatcattgactacaatttactactcaatgatgataaggaagaaatattccataatcacatgttcatacctgaaaattccactaatttcgatcaaggaagacactttaccacttttgtaactcattaacactattattagttgtttagttagattagttaattctaacataaatatacttaatattgtgctgtttagaaattacatgaggatggtataatgtgtattgataatgaggatgataatgttgtcacgggttcactggatgaaactgtacgtctattccaaatcaccaatacaggtacttcatacccattctaaactaagttattctttagacatgagggaggtgatgatatttgatgaatcaagcccaatagtatcattatgttttagaaatgatttactactgactggtgtgatgagtgggagtttaagtttatatgatgtgagaacaccaaatacaccaatttggtcctacgaaccaaccactgaacgaataatactttcgtgcggaattagtaatcattttatccaagcagtttctaaaagcttagatccaatcctcttctgggatattagaatgctaaactctctaggctcctgtgattcatttatgaaacaaatccaaaccaatgttctaccactttcctcctattctgatttagctgatttcatctcaattactcataacactgaggatactgcgagtagtaatggtatgggtagtagtagcagtgtgggcagtaagttggaaatgtatgacttgaataaaaggactagaataatgactatgagcttgaatatggctaatccgacaatgactagagttaacactaataccgatgatcaaattaaagccattatcgcaaacaataaaggacaatccatcgcactatactcttaatacaatacacattttactcttattatacatttaatatatacttagtatagttttgagagtatattacagtttaaaaatgggtagtgataggatttcttgtttatatattacaacaatggctagtaggcatccgagcaggaacctgagaggatagagcattattctacgtttcttgtgttgttcaaatctctcaatgatcagaattgactgagcaaagtagtctaatccgtgaaataaagcaaccaaatcattccgattcaagtccaattcgccaagtttatccacatcagtcattaatatctaaagaacaatattaatatagtgaatgggtataagagataggatggttttatggtatactactgggttagggtagggatataactaagtccctgtaggttaaagctaagtaataaataactagatgcagggtgagcaagcaccgtaacgaaccttaatagaagtttgtatggctgataactttaatttgccatgcaatttgcacttttcacactcgacacaattcactagttctattaatctatcaaacttctcaaccatctctttaccacatctacaaaattattatgtgatattacataaatataaccctgtaacgggcgaataaccaattaactgagttgatggatagtaaggtactctgtttgtaaattgttgtgatttgagccgttggaatcagtggtgatattacttttattgataaatgttaaaaaatctttcaaatgtaaatataagtcattatttaccaactgtaaattactgttaaaattgtccaggtatccctttaacctgaccactgccgataaaatatacttgtacgtgtaatagatattctccagtctatccttatgtttggataacttgttgttatagtagtgatagttactctgatatgagggtaactcagtctggtcttcgtaagcttcataagcatttgtacactcgtagtttaaagctgaaaaagctgaaattgcaccacgcatgccagaaattaacttgtaaaaatgtaaactctccttacaactcatgttgtcatatttgtcaatctcgtcatacatcaatctcctacaaaaaattaataccatcattattatgtatactattagcatatagttaagcatgtaactaagtcccagtgggctaagtaactaagtagaagaaatagtagtaaagcggtaccagtcatcttgaccattatatccagtgtatgatggaggatttctcaacaaatccacaaaaacgcagttgtctggaaccaagttactcctgaccaggaagtctctgttaaacccaaacccatcagtgctaccaaccaagccttcgctaaaccttaatacgtaattctccttcctgttacccattatactgagcggtacctcacgggaattgcatctgtccacatgacatttagcaacttcagttttattactgttaggagttggagtattaagaagactaaaaggtgtagcgccattctttgttttattcttatcgagtgagagataatgagtttgagagggacatgaattaattcttggcttcgacttgcaatttgagtctaaattgaccagaaatatgcgaaagtagtagtccgataaaatgttgctgagcttcaggtggatggtttcagcctccaaaaccagcctcgtgaattttactatattctccacattgtcctcctcaattgggctaatttgcgagaagttggagctatttaaggagtaatgtaacttatttggattatttgatttgtcgacgattatactactgttcttttcatttatattgtagttgttatatactgtacagtcacatgctattgacagggtgaacaggaagatgcgataaaaaataatatataataacatattaaaattctttttggccaaataccatgaaattttacactaaaatcaggattgttgcgttaagataagagatttttttacaccagaattttatttaaaattgtctaatttatacattaaattatggactttacaaattaaaatttatattgaaaatatgtgagaaataattgtctgtgtacgactatgtggcgtggtttatgtgtactactggaagtacacaaagtattcctagccttcttaatttgattgattttcccccaaactgataaaattacaccaaagaataataaattctcagattattcactaatgtgtaatttttatcttttatttacactttattccaatattccgcaacattccattctaccatattttttccattctttactttgtttttatattttttgtcttagctgttatatatttaatatgtaatttattttaatttttttaactatttaattaatttaaaatggtaaatgattatttaaatgtatttttatctgacaagtatataaattatcaagttttgggtcagaatctcagtgagaatgagttgcagttacagaaaatcgcaaaaatacagcggaatattcaggaaagctgtttattacgtgcttccatgatagggcttggaagtggagttttaggtatcttccaatattccattaatagcctctattctctcaatttgactcccgtagatagctatatacacctgtgataagtatacttaactccttatcaatactactcttcttattagtactgaatattgtgatagggagtttggttggaacctttctgtatagtataaacatgtcaaatactagcgtggaacctgaggtttctgtgaagaaagagttcataaaacagtataaaaactttgtaccatacgttaaatctacaattaaaagctttgctaaacttggatttctctactctcttttcgaatgcctcattaacaaagtttgtcctctctatcccctaatttagcccttatttaccttatttcccctttgtttactattagtttacctatatttagtataataattgtgtagagtagtggcaataatgatattaataatgtaatatatgctggatgtacgactggtgcatttcttggccttaaaagttggttgaatcattctcataatctttagatggccctttcgctactgttggtggttgtatcggttttgccactttctcattcctcatggaatcgtaccaacgtaataaacattccaatacgtcctactaacattcatccattgatggagtgtaagtatagaaaatgtgtgcgtttggtaggatttgagggttttgtatgaagtttgaaggacttttatctcgttttcgagccagaattgaatagtttatgccataaccaaatattccaaatttgcttatttccaatttcttatccaccaagtcactaaacacattttaacactaatataatctaaaatatgtgtaaatacagtacataggatcacgatgttcaaagtaaccgtaattccaaggcacattatcatttggatataattgcaacaattccctgatcaaattgttataaaagatgtattaactaattatatacaattagctaattacatatgaagagtaggtgtgtacatcaattttctgattggatagtaataaatcttgcctcgttcgaccgagaggaacttggctgaaggtttcatgactctgtcaacttcactcattagagcgtctgggtcctccactgagcacagtgagtgtgtactcacaactgtattgaaactgcagtcctcaaatggaatgctcttcacatcatcacataatattacaacggggaattccggtctttccttctctacaacaatactatttcatataatatcactaaataactgtaaaactggcccatagggggatagcagtgaaggaggtacctatttttttgaccatttctaggcacatatttggtgatttatcaatacatgtaagagaatcaatgttgcgataaaagggtaaattattcaaagtacccgaacagacatcaagtacatgacccctagcactccttaataatatcttcttagccttcgatattccatgtctctatcatacatattatcactatattataacactaaataaagttaattaactgtaattataggtggaaggtacttcgaaaacgttattgaaagtggaatcataagttgaagctaaattgtcaaaaattgcgattctgtgtttttctataaaattattaatttttattaattctattgaataattaggttcgaataattttttcaataattagactaaaataggataaattttaggtagagaaagtcgaggtaccggttggaggatcaatgtgtaagaattgaggtcgatttttcttaacatttgtataagtatagtaaaaaattatagcatttgttactcctaaaactattccaatctgataaaaaattaacagaattaattaacgtaaattattaattaaaaattacattagcgattgttgatttttttattttattaattccaaatattctcaacatttattatacaaattatattatacaacgtattatataatatataatgtatatagtattaggtgtagtgttagtgtattacatatggtaagaatttgaaaatttgaccttctttacttgttccattttactctcaaactctgggttcgtcttatatttcatcataagattttttggttcctcagcattatcatccataccgttatttacttcattatttataccatttgtggtattgtcatcagtattagtactggaactattgttatttgtactattagtattgttggtgtgatcttgaaagtctgtgagaaattgatttgggggatttgaagatgtgtttgagtgttgtaagtaaaactgtaatatcatttgaatcaccaagtttattagtaagaacaataattctattaatcctctgtaactttctctcatctccacgctgttattgccaagtgtggatctaatattcgtaattagttgaagtaaaatattctcaaatcttggaatgaaactcccttcatcggcatgaccattgttaaccaagtcacttgaattttgagtattttcttgcaaaaatcttgattctatagctgataagaacccattgagcatgttgcctatattattacaatccaagatattctgatgtgagttaccatttgggggtagcatgattgagttgataacatcacctattaatctttcaatcttctcaaattcgttgattaacatctcttccattctagcattaggatcagatacagtatgaaacaaagaatccgtatttatgtcagcggttggcacatcactagcattaacattagtagtatcagtattattggtattaacattactatcgtttgtgttattagtattagtattgttttgcgtattactattggtataaactctgtaattaccactgggtgtactaaaaaaggtgtaaccacttgtgttagtattcgttgtaccagtgtttgcataagtgttagtattagggttgggtgtgttggtataggtgtaggtattagtgtttggagtgcctaggttggaaataaaggaattaacggcagttgtaaaaacccgtgaaacaaatgttcccaaattattaacgagaggggtatcatcaacacctgcggtattagtattatttgggtccacattaccagtatctgtatcaggtacagtaaaggtagcgtatattgggctcatatatactcccatcggtatgccatatcccattccaccggtataactaccattattattttgagtattttgagtgtaagttcccgtgttttcggtatttgcattttgagcgttttgagtataattttgagtattttcagtattagaagtattatctccagtattattggcggtgttttgaggattattagaaacaatgtgtatggtgttgccgcttgtaatattataaaaatcaagggtgtggtcatccttgagcaggtgacctctgaagattaacctttgatgagatgctggaatcccatttctgacctcaatgagagacttaacattccttaccgtattggaagagtccaaatcgtaactaaaagtagtctcatccatagttctaaaagttatatttaccaacatttttatacacaatttttttaaaaaattctctatagtaattaaagtaataaatccaattaaaataataagtttaattaaaatgatcttataataattgtgataatacccacaagtacttatacaacagtttgtatttattaattaatttaacaatcaatataccaaataatataaaaataatgtataaataattttttgtcaattgatctggctagatctttgaaaaaatgagctcacaattattagattcacaaatgggtaccaacttacacatttctaccaattgttccatttatttatccaaatttatgcatttattctttatatattagtaatacaattatatattaattatattttacataatgattagaggatagtttaactccgacttctcaattggatttgagtcaatctcagggttattttaatacggaaacgacccctaaggagtatgaagaagatgaagaggaaactattgaagttggtcattattctactaatagaaaaactaaagattggctaatcgcaagattactttgcaggtattttatcactggcagttccttctataacctacacattcacgttatcaccactgattatgcagtcaacttagtatagttaacacatatctgggaataactttgcattaaatgtttagatggtggtatgtatttccggattggcctcctccagattttgattataattctgagctggaaaagaggaagtttcgtctgtacagcgttgaggactttgaaaatgttgaaaatgtcgactctaatggctactctaaagtttatcaggttaccgcttttccaggtaattttttacctctaatatttttatccaccagcatttgacatttatttttcactgattttacctcattatgtataccattgtataaaattctgggcataaaatgttataggcgtgtttagagattataatggagtagctcatgatttgagaccgttggagggtaaaccatgttataacaattactgcaagttcagtgaggcaaaactctatgaactcattgaaaagggtattaagaaacaacttgaaatactttcccgctctaaatacgatgaaaaatcaaccatacgattcctcaacgaggtataaacactcattttactagtaatagtattcatgaattattcaggagttacaagtcattttagaagaaaaaagcaagagctcttcttagcattaaactcttaattattattttaattgttattttggatagatttgtatatcattgttaatataaaagtatttagttctcggtataattaacagataaatgtgactagatattaacagtttgtggccatttttccaaagttatactcctgaattttttgtcagcgtcttgtttgtagatttcgtcatctgcttctccatgactaagtctatgttttgtgtaccataaatgttcagctagatgaggtgcaaatgggcttagtgtgattaggaagatctctacaaccctgagtgttaacttcttttcctcatcccaaagcttcattaaccttaaaaacgtgaaaaactcagaaaccttattcaacttaaaattctccatgttatacgtcataacatttataaactcattcaacttactttttacactagggtgtactatattagagtccgatgtgttattgtttactacattagtgttaactgaggactgggtaaaaagctgtttgaaaaagttcgtaacaaatgtgttgattgatttaagtaacttgtaggggccttgaattgattgaattgaccaaattctgtccttatcaacgggtccttggaatagcaagtggagtctcagggcgtcagcaccaaaacggtgtatgatttcttcaggactagctatgtttcccctagatttcgacatcttacatgtgcgaatttggacttgtattgacttgtcagactttaatacatacttatttttatacttcattactaagtggtcaggcacctcaaaattctcaggatctaagtcactttgtgagtcttccaatggagtgttatagttgataatttgatcttttaaatcagatttcaaagcgttaagagtgttttgtggaataaaatatcgaacacttttaattataccatggattaggatctttctaaagggttcggaaactggagaaactccaatgtcgaagaggaatttgttccagaatctgctataaaggaggtgagaaactgcatgttcaatgccaccaacgtataaatctacaggcaaccagtaagaagccagtgatttattaaatggctgaaattgattgtttgggtctgtaaatcgtaagaaatgccaactacttccagcccactgaggcatggtctcaaccactgatggtgataattttacgggaagaggtttcaattcatcactagagctatccactggtatcggttctccccaacctctattcctactaaatacccaatctttcatattataatttacatactccttataatatttattcacatgtgtactagagttacttaaagtattttccgtcggaatatagttttcagatgtatcaactgtgttaacggttgtttcggaaactgtatttgtgtttgctatgttacagatatcgaaagaatagtttagaattgaattaatgggttgattagtattgattgcagcatttgtgatgaatagtggtacttgttgaaggttgtgagggttggtaaaatacagtccactaaacactttccttctatttctctgatctaaaagctgtagatttgactttcttaaagtctcttctagtagctctctaactaattcaactctttcaggactacagtaacttaatatatcctcctgtaatactgacatttctatactcttgatctcgtctaactttttaatatcatctacaaaagctatacactcattttttaatccacccactttattatccaaattagtaaccgagttgtttacactatcaactgagttaatacgactgtggttatcatttatgagcaatttgaagggtatgagaaaacctttttgggggttaatccaagttcgttgaaggtgtagtaatcgttctggaaagtctacagtcttgaggtcgtcatatagcctctgagcatattgtgtaattcttagtttccacattgattttagtttcttgtatacgtcataaccgcctctaacggatttcccgtcaacaacctcctcgttagagagttcactgtccaactcggaacagtaatttacatagtccgtatctaagtaggccagatttttaaggtacatttgctggaatatccattgagtccacttatagtatgaaacatccgaggttaccagttccctagagtagtcaaacgagtatcccatggccttaagctgttgacggaagttattaacattctgttcaacagcttcttcaggggttaaattttgcttcttagagtaaagctgtgttggtatcccaaaactgtcatagcccatagggttaagaacattaaaaccctgcaacctcttataacgagctatcacatccaccactgtatagcctagtaaatgtcccacatgtagtcctttccctgaaacataagggatcatactaaggatgtagtattttttatcattactaactggattctgagaggtatcatgtgtatatgtagtagttggtgaggaggtgctgtaaggtgttgtattatcttgattatatggtacattattgtttaatttaggatcaattggtttgtacaaatcattggtttcccaatagtcttgccaaatattctcataaactccacagtcatatggtacctcagaatctacatcattgctccccaataatttaccaaacttattaaagctatttaattgatgtaattgagggttaaaattgttaaatcgatggaatttagggtaaaaattgttagaatttgagtgtataaagaaatgtgtaaaattggagaaaattctccttttcgatctaaggcttaaaggaacacagtctagactcggaagtgcaatcgaaacaataacaacaatgttaagaatcccaaaaaacatttatggaatcaaatctcgcaacctcacaacttataaacacattttacatcaacatacacgtattaactaatttttaaccattttaaattatttttgaactttttattaattttaatactttaaatagtttatattttaatgtagttctaactaatttaggatagttagctatttttatttttttgggcaatttcagaatttttttcggaaatatagaaaattcaacaaacaaattttttgctgttttttaagaaagctagttttcaatttaatattttaacacaatttatataatattttaatattttacgtaatgttttatttaacactttactactctgagatattgaaatgagtttttttaacgagccttatgatgtgcaactcgttctaggactaactctcgtcggagtcccgaattcatggtaggaatttttcttaactgctaattatttagtaattttatctcttacaaccagttgtgtatagtattgctggcagtagtgaaatattgatgtagggatgacgtcacgttggttgggtatatgaagagttacagttatgcttttgggtcaaatgaggtctcaataatgtcggtgtttatagaaaatacagtcagttcggaacgtaaagcacacatcacttgcaataatctctactcaaaacaggtaaaccattggttcatttgcccttaaatatactctatttaacctctaattgctattttaattgttatttaacttgattataagctttaatgttgtttgtagaaattactgaagataagactaattcctgtgatttgcggtgaagagagtaaatattgtcaaataattactgttaggccttactgtttttggatgtcctttaaacctgattcctacccagtaccttacatgcttccaaagtatggctcccaggacctctcctacgaagttgtcgaggcgaagatgttgttacataaaaacaatattcacccgtcaattgttacttgtctcatggaattcaatttattacctaaaggtattgcttaaagttgattgctaatccctctgagggacgtactttcacagttatttacacaagtcatatagtcttagtttagtatagttattagttgatatggtcaataagggtttaatttagatggaggatattggtgtgcctcagatgccatagcaatttggctaagtttaaaggacgaaaacgtgacattgttcaactttttggaggagatgttgtcaaagataaagatgacggcatcgacatttcagccatattcatacgaattagatgacgaatcagtttactcctcaagatgggaccaactcgtaatacagtacaataatgatttgttatggccttgggatgatattaatccacagaaaaaattaaacattacgcacaaaggtaaccctttaccctatttctcagttatatagttagtagaggagaataattaaatgccattatatacaatctaatgataaagtaggaagaaggaggaataagaagataggttgtataaggtatgaaagcagtaggaagagatgggtggttgacttatcattagatggtcgtaggttacagaagtgtttccacgagtcatactatggactggtaggtggtttagcagaggcgttaaagtggcgtttggagtaccttgttaacaacaatagagttccaacaccagagtctgaacttaagagcacctcagacttgttcgacaaaatcttgcaaatcaatgtggatggcagccagaaattgctactaattgaggtgttaaagaggccaattgagggattcgaacaatacagaccaaacgaacaaatcgaacaacttatcgcagaaaaaatacaacagatcaataactcaaataacctttcaaattaacattttacttattacacagttctcgactattaaatatatgaaggtattaggggttattatacaatacaaatttatttatagtttataaatgagattgtttgtgaaaaaacaaaaaatgaaaagataaaaatttaatatacatgaacaaaataatggaagaacactattttaaatattgtgttgacatttttaataatcatcattatttatgttattttatttttcattttaacttaagttaattgaccgctcaatgtgccatattatatactataatggcccctattctggagcaatttattgaatgtaattccataccactattatacacatttttacgcaattttctcatatttactcaaatttaatcaatattatgataaatttttaataaaaataataaattgaagataaatggtgtttaggtagtgtgtttgttatatcggtagatggtagagtgtttgtcggtgtattgaagggctttgaccaattaacgaatctggtactttataactgtttggagcgagtttatcatccagatgcaccggtagaggaattggagcttggaatctacctgttacgcggtgataacatgtactatatacatatttaccttgtttatatatttaaatcggttaattattttaaatttagtgtattggtcggagaagttgatgttgacgttgatagaagcatgtctggtattgaagctttacccattaatccagttatatactaatttcttgtacacatacactacctactatggtataattaatttattgagattaataagagcgtattggcaacttattgaagaagcagttgatgacgtatttagttcctgaagttggtgtagttccagcatggatcaatctttcatccatttctcctgaatcggtaacatttctccataaaacaccactgtttgcgattggacttattcctattccaagctcaggaaacacggtttctcctccttccacatctataaaatattagtccggcccgttgaaatattataaataactctgtcatatttaaaaaggagtttttgatacagataagataccattaagataaagcaaaagagtgtgtgatctgaaggatccatcatggtgttgattgaaatagtcgcctggattatatttgaccataacaagtttttcaaggtatttcacatcaattccagcaaccaaagctgcacgctcctcaactttgcttataatttcatcctcgtaatgttcgaatattatactcttactcttacgagttctactcaccaacgttgtatattcttcctgattatcagttatagtatgggataaaggagtaaataagtatgtaacttaatataatagagtaagaaatacaactactcataatattatactaggtatatttgttgaaaataatatgggtaaaaatgatacggggagagaatgtgtagaaccgatagaggtttgtgagtcgacccagaggttatggtcaaaattaattaaataattgacccaatcttcatttaaaatgtttaaaataatagaaatttgagggtcaaaatatatataaaatttactcaaaaccaccttctcatcctcgtcattgtcgattattaacgtactttctttgtaatatttaattattaatttattttcacatttacgaacaatttttcttatatctttgaaagatgtcagagtacaaagtttctcaaaactaccagataactcatctcttttaccaagactgtcatctatcaatttattcatctagtacataattaatgtgtggagtaattattaaatcgaatcgtagaaatttgtagtaaatcgtttaaactctttaaaaagtacaaaataaattataaataataaaaactaaataataaatacgttaaaatatttagacaaaataggtgccaatgaagattttgtaaaaaaatcttaaaactaataatctactccttatgttaagtaaatgtagtgaaaaataacctaaatgtgtgtcaataattatcaatggagtatggatcaagattctttcaacccccatatgaacactaataataacatcctcggtgttattaatcatttactattagaatattttagatcatatcctttcgaagttatacacaattaatggtaatattattatatgatacaattttttcgaaaaattcataaatacaattaatataactacaatacaatatagttcagttaaaaaggtaaaatggggaatttcaagaatatattgaccagtttcgtttatttattaattttattcccttctgggttctttttctctggatcaagcctgttttgtgaagccaaaaatgaaaccgacgacgtcaaagtcctcactgatgacactttcgataaattcctcaccgaaaataaattagttatggtcaaattctacgctgactggtattttttggctacataataacataaaattatgtacatataattagttacacatgattatttattttacactagtcacttgactattggtgtggttatctattttttaaacccattctgaccatttcgtaggtgtgtacattgtaagaatctggctccagagtattcaaaggcagctaagatgctcaaggatgagaagtctgatgttgtcttcgccaaggtcaggaacgaagaaggtgtaaatctcatggaacgcttcaacgtcagagggtttccaactctctatttcttcaaaaacggcacagaagttgaatattccggctccagagatgttagtttccaatcaattctataatacattattacctataaattttatgtatagatattaatatttaaggtcataatgaactgcaggctcccggactggtatcgtgggttaaagaattgtcaacacctggagtcaagtttgtcgaagatccctcagtgttgccaatggacaaagttttcgttgtctcctattcagattacagtttgtcagaccttgactctggatcagtctctcctcttttcctcaaattcgttagagagtctgacaagtaccgctcatacttttctttcttcaacctcgcacacacccataaggacaagagtagctggaacaagtggcgcacaactgaagagtggtcaaaatggaaggagttttcccaaaaacatagtgaccttaaggaactgaccgaagccttgagtaagcaggaagaggaatacaaggacaaggatatgaaggaagaatatgtggtccaccagccttcagaaggattcacgagattcgagggaagcactgaagacgagcttgagaagttcctatcacgtgaaactctaccgctatttgctgaaattgaccaggaaaactacatgaggttcatcacctccggaatggatttggtctggttctgcggtacaaagtcagattatgacaagtataaggatgtattcacaaaggtggctcgtgttctccgccaccaaagcacctttgtctgggttgactcagataagtttggaactataaaagaggtcttcttactcacccaactgccagcagtggcttatcaaacacccaccggacgttatctcttacaaccaaatcaacaacgtactattcacactagttattaactataattctagttatttatcttcattctagttagtgaatatagacaatacttagttgatagagttaatatttggttaatatagtcaatattagtaaaatgggattaatataaaatttttgtagaatctgtgaaagaagcaaagtcgtacaattttgacacgtttgactcacttcttgacttctaccacgatgtgaagatgggattagtaccaaaatcagtaagaagtgaagaggaaccgaaggaaaatgacggtccagtcaaggttgttgtcggaaacacccttgagaagctgtttgactcaaagaagaacgttttgttgatgatccacgcgccgcactgccagcactgcaagaacttcctgcctgtgtacacggagttcgcaactgtgaacaaggacaacgactcgctgattgtggccagcttcaacggtgacgcaaacgagtcgagtatggaggaggtcaactgggactccttcccaactctgctctatttcaaggcaggcgaacgagttcccgtgaagttcgccggagaacgcactgctgaaggcctcagggagtttgtcacgcaaaacggcgggttcgtcgaagatatccacactgaactataacctgtaaaaaaattcctcaatatatttcatacattcattgtgcaaattttcatacaggtttattatgtctctgtcattgtttacactgttattagattaatagggtattaatttagtaaattattgatggaaggtttagaatctcagtattcctcgttatagggtgatttttcaaatcattctcgaaaataataaatatttaaaatattattaagtagttaaatgatagtgtaaattagtgggaaatggaaaattaaactgtgtgtgatttaaacgatgaaacttactgggtaatttggtggtctacacatggtgttgtagattccaggaatacatggtgtttgtgatgaaaccaatgttgagggtggaacacatggctctgattatggacgggaacagaagatacgctaagaatctgaacctacaacaatcgcaaggacatctcaacggcttcaataaactcctcgaagtatttacaacacactacatacgcagtttatcatgtaaatataaatattcaaatgaacaaattggccgtagatattggagtttagtagcttgtttggattgaaggtgataacgatattcgccttctctttgctgaactttagcagaactcggaaggagatttcagacctgcttaaccttttcgttgatctttcaggccctaaatcacaactagagtattttccactaccagaattctcagttacatatttgcaatatacaaactactgtattataatattggtggttttctctctttaccttaattaggggtgataaatagtgtattagggagttgtgtgaaagaattggatgtaaaataagattttgtggcgatttttcatttttaggtgaggatattaaacagattctgaacgatattcagtctaaaactaatcattacagcaagtaaatctctattacacacctaattcacataggatgactttaaacgtatgtgcatcatacgggggtagaaatgaaattatcaacgctctcaacaaatttaactcaaatgttgaaaacaatactacttttaacactgataacaccaacaataatgctagggaggaatattatagaaatttgtacactggtgattttacaccaccaaacctacttattagaacttctggtgaatcgagattatctgattttctcatctatcaagtagtattctatttttatccttaatcatactttattttagctaaatttgcattatttatacatttaacagttaattattcatggtttaactgtcaatatggtacataaatgtttagtgctctgaacatacttgcttttattttgttaaggagatgtggcctgagcttagtttcaatcggttaatttgcatattgatacactattccgttttccaaccaatactaaactgtgtaaactcattcaccaagttcataaatcacaaaaactaatttaataatagtgtatggtaaattatacaagaaaatgaatcatgaaaacaaattagaggtgttgacgaacgttgtctgaggaggatttgagaacccagttaccgccagagaggttgaaaagagcatacccattatcggtgaaggaaagtcttaattccttggagtcagggtgataagttaggcgagtaggatgaggggagccttccttgaaactccaaagcttcttgccgtcaaagtcaatcaggcggcacttgactcctccgattaactcatactcgaatgaatccttgtatctggtttgaatgtaataatcctggccaggtaatagagtcgcgccctcctcagagtacaaggcgattttgggaatgggaaccacaagagtgatcaagcacatgttgttgtcatagcgaaacgaggaaattttatccttgaagttaaattgaacgctttcaaactggtaatcaaccagtatatattccggtacgggttcgccttccttgtaagtaaacagaacgtcgtcgaagtatttacacatgcaacatagtaccccaggtttcactctatacaacctgtaattattatatggcttggtcacaatgtaatcatctggattcattaacatcctggtacgagtggcgattgggactgaggtatctgaaatggtatagcgagaactgttgccagaattggtttcagaaagcttggaggcggtattcgaattgttatagtagtagtcgtcaaattcagagtctgagggtaatttgtaaagtttcagtgggttcgtgtcaatgaaaatattctttttaactccattcggaaaaaccagtgtcatgaagttgtttttactggtaaaaaatatacatttagggtggccattcaatttgtcaacggaatactcccagtaccacctttcatcgtattgaacaaggtgcacatctttatccaaaattatcttgtacatatcatctgaagtctcgattttcgcgtcagaatcagtgaggaaagagtaatgaggtactttatctggatcagattcagtcaacttaacatccaaggagtacaggtatagtttgtcaatattgggcttaatcaatttgtgttgttcaggcatattaaggatatgctctggaccgctaggagttgcgccatagaatcccgtggatacttgggatacatacgtgcttgggtcgctgaacgtcttgaacaaatcaatgtcactgattacattgaagaggaagcccctcctggccttaaaattcctagatgagggcgaacagaaggtcgtgtactggtcagttgacattatggtacggatatccagtggaactggaacagagttaggtaaagggcccgttggcggcgccagtgttgataaatacttatttgtagattcgtttatagagaatgataatcctgacatttctggaactgctaatttacataaaatttggtacaaattagtttacaaaaaataataaaagattcttgtgtggttagtagaaaacaatagatcatggccgcatcttttaattcaaaagcaccataatctacagattatttagaaaaatatttgagaatagtgttttttaaagaagaatatagagaaatcttcaataaaattttagtatacacaagtgtacgtgtagtatttactaatgaattcctgaacaatgagattccagtaaaatagtgtgtgattaacacactttcaacttaacagtcattcttattacaatgtattaccattttcacaaaaaattaattaattattggtttgtccattagacaacatggtttatattcttcaggtggtttatatacaaagttgggtcctataccatacattacttcttcttggtaaataactaggtagaataatagtctagagagttgcctagattaattgtgatagaagctcccatataaagtgaaattgctgggtgataatatccatcatatacgtcaatatccaatttatcatatctacatcaatattagttttagtcttgttaaatcaataaataattgtataaactggtttaaattgtaataaaaaggtacaatttgccgttgattgaaaattgtgtaaaagaattgggatttgttctggatggtggtatattcttagggtcacataatactccatctataaacacattatacaaatatcttctacgattaataattatatatctaattaggattaaattagtgtattttatacctctgagaaattcgtataactttaaatcgcctcggggatcatgaaaatcagtagtcggaatctccaaactcaaataacatccaatcacatctccaacacctaaattccattatacaagatttataactttaaatagtgtatagaattactgaatgaggtggcataggggtatttctttgaattataacaagcctttccatcaatgtcggaaattgagaatccgtaactattaattccaacaggtgtatcatatctctgatatctacatgcataacccactctaaaacaataatataagagattatacatgtagaagagtacctaacatgccctttaatctggtgtttaaaagaattatcatgaccgacaaatttaagatttttataatcttgatttattttaacttcataatacctaaaataggggtaaaataatgtaaaaaataccattttccagtacaagcacaatgtgtacaaaacaccgacgaccaaccctgataccataatcaactgtgtaagtaaataagtttaggtggaattttcaaaaaatgaaaattttaaaaaattaacaccaaataataaaattatcatcaataaataaattagggaataatagataaatttatatagataattgaaataatgctaaatagaagaatactttgtaaccggtggctgaaagtcgatcaggggtcaatttgatatttttatccttaaatttgtaagatagtttaggaacaacaccgtcatcaattcctgaacaattagtgacagaaatgagtgaaattatgtgaaaattgtataaaaatacgtaaaattaggggaaattaccatttttcttcagcttatactcagcaatcccattgttatagctcctctttattttagaaggaggtgttaaactagaagtatcaacttcgcattcacctttcattatatattttttactgttaccacaattttcacacaataatcaattttttacacaatattaaaatttttaaaactaattatgtatttttataaaataatttattttttgctctatagttaattgtttggtgtcgtctttttttcaagagtgttgaagatgagtatattatatgataatggtgacgagaatgaaatatatctcgattgtttttataagggttacaaacatgttttgtccttttataataagcctcctctttcaggcgaaatcgatctcagaagctttcaagaaatcgcagcaaaacgtttagcacgtacttctcttacacattttttacaatttcatctaatttatatattttaacaatttataagcttttcgcaattttatatgtgttgtagtattgcagtatattgatatgagaagtgaattgaagataaaatcccataaatctaaggattctgagcctttgaaatatgatcaaaaaacaagtaatttaagctttttagattaatattattggttagtggagaggatgaacgagattgaggataaaatgctagaatttgagcttatgctacccaaaattttatacagtaaagaagaattatatgattttatacatatcgcacaaagagatgttatatcacattttatactacgaatggcgtacaatttacccataatacatatttagttatatgttttactaattttatgatatagattcagtcgtgaaaaggataagatggattggtttgtaaagaatgaatgcaaattatttgatataagactcgagagactgagatcagtaaaggttcaggaagttgatggtgtcgataaattggagactttcctacacaatcaaggaataaaatatcctgtcgtatactcttaactatataaaatccctctatacattctatactattggtttataggtgaaaaatcctgcgattactaaaggacgttatatgactaaggaattgatagattttactgaccttataagatttagacctgacgtcaactctatagataagctctaccaagtaatacacacaattattactagcatatttatggtatattttatttactaggttccattttatcctgatgcaaatcaattagtaagaatgaaattggtcgccattaagagtaatttttaaagccaaataataatacattagattctattgcttatgttccaccaaacagcctcttcattgttatatcaaccaagtttaggtattaattctattctttttctcactttagttatattaactataatgtactaaaatgatactatagttatgtctaatttattcataacttccattatactctgagttaactttttttagaaatgaattacaacattcaatgaaatatttgaatgaaaaccaatcgatgttggattcggttatagtgaatgatgaacgattgtgtgattttatgagagtgttaccggaatcatatctagccaatgactactccaaaattaccttcacagatgacacaagattaacactctcaaacattaatcaagtattttttagttatttattctgttttatactccgtttaacaattttttaggtatataagtttacatttccgccctgcatgagaagaatgttttcacatctactgtaagttttattcttatttaatatttaattccccttaaactcgtgttaatataatctattatagtaagaatcatcatataaagcatgaaggaagacaacagttatggctatttctcaaggtaatcacactgatagttgataataaataacacagggttgtggattaactatggaagaatcactacagttaaatcgcaccttatggaatgattccggcaatttcgataaagagtttctattacactacattcatcatttatttgtatttacactaattgtttcctcaggcacgcatataatataagacatttgtatggcaaggaggggaaaagaactagttatccaccttattcttgcacaagaatgattaaaaattcacccgtacattttctaaatagttatttacagaactatttatgaatttctgtaaattaatacgtaatttttatagccaaatgtttctggaactgcacatggttgtccatttaaagaactagatccaaaatccttatatcaattgttacaagaatttggccttaactgtatctatctcactattatttacttaatacgtacacttatagtgttaatggaaataatttttgtttagccactcaaattgaaccaataattgatttaaaaacatcatttcaatttcaattggcgtgcgttgaatattttaaccaaactactccaaacgcatgtggtaactaacatcactaccagctttatatttatatttatattaccgttaatgtgcttaatagctgatggaattggaacgagtccaaacactttttttcattcaagtttcaaagctaagtttttgaagaataagtctcaagattttgaacaatcgcaataatctattatccaccatatagccgtatattttattataacttttagtgttttttatggatattgtggttttaaagaatattttgctgatatactaacgtaacaggtactataatagggttttactactagatatagcagccacaatcaaatgtagctacaactcctcagactcaagctccgtaaccgctaaagctactcctgcaccaactgctcctacagtaactggaccagcagttaaaccccgaccggttacttcttcaactactactcctgtagcaacacctaaggtagctccttctggccgacccgtaacacttaacatcagtgggaatgctagtactgaagactttgattacactttggatcataatagaaatattaagatttacactgccaagggtagttcagtgttttaccagattataaagaccagtggtaattgtggaagcgggtgtcttgggttcgagacccgtctccatcaccgcccagaccacttataataaatgaaactattaactataactaatgaaatgaaggaatttagagaaaaatataatattaaagtgttaataaagtttgagccaagttgatgaatgtactattatgatgaaaaaattgacctaactctccagcttgtgttattttgggatcagattcaactgttacgtgtttacctattttatacttttcacataactcctttagttcattagcgctcatatcatcaggagcatcagtttggtccgtgttgtggtccagaaaggagtttgtcatgttctctaccaacattacaatctcaattccaacatcagcactaaaatattataaataggttaattcaggagtaaaaatgaattttgaagaaatagctatatttagggtaaaattataaaattatctaaaaataaataactgaaaaataagtaaattagtggtagaggaggtttaccaaaactttgctgatctttttacatcatctattgctcttttttgaggagtagtcaccaatacgcccatcaaactgctattgtcagctcttctaagcatcttaacggtgttaataaaggttatatgctcgtctgaagtcccgggaggtgtgtcaacaactaaataatccaattcaccccaattaacacttgttaagaacttcttaattaaagcgtctttcttagcgccacgccaacttatgcaatgctcatcattactcattaagtaaccaattgacataacacacattctgtcagtgacgtatataggagaccaaccgagaagtgattcaaagacctcagagtggcgagtgttagtcatggctggaactgaagggccagtgatgtcaatatctaaaaggccgactctcttccccaagtgttctaagctataagccaattgaacagctacggtagatttaccaacacctcccttaccagaagcgattaccactatgttattaacattagtcagagagttaggagtgttggagttaagtgagttggctgagttattggaggagcaagttgatttattaggacatccttcacatgatttactcaatcctattaaagttattagtatatataacaggtggaaaaataggcaagttaaaataccggcatattctgttccagggcctggacaagattcaggaatatcatcccctataatatgtattacacatttgaaacatactccttttgaaaaaactgaatgtgtttgaaaatttgttagagtatttaaccaaataatggtaggcagtaataaatgcgataatttttatttcggtggaatggtttgaaataaatttcaaaaagtcattccaaacacctcctttagattccttcttcattttctccaattatttaatctaatattgtacagttttaaaagcagtttaaagacagttaaaatacaagtgtatatttaattaaaaatagaagtaattttacaagtttggtgaaaataaaaaaatattgttataatacagatagattcctatatttagacaatttgaaattatccattaatattaaaaataattttaaccattttattcaaaaatgtattatttcattggtctacataaggtggaagtaccaatagtgatgtggtaagtatcgtgttgttcattacattaattgcttaaaagtatactcctgttattaatacatgattatttgttttcagttccggaaaattgttttgaacaatttttacccaaagaatgccattgaaaactctgcttttactaaatagttattaaatcactaatttttgtgtattcctctagttttacaatatttgttaaaaaatgggtggattttgttcaaaacataacagtaaccatgtttctaaaaataccaccaacggaaaaattacgaccaatttcactccaacacagattgacggtaactttttataaaaattttttatttgatttaattaccgcataaccattccgtggttgtgtttagttgttaaaatattttttaatttttctaatagaccagtttatggtagagaagcccgaatataaattcgtcgaaggaggattcggtacaaagacgtctgaaaagtgggacttagactacttatcaactcaactttgcacttcaattaagactttggaacaattatcaagcgagggaagtgaagagcaagtcgttgaactccctccaatacttaacgatgattactcgatttattatggacaatggaaggtactggttttacaacagctgattcatcctcataaccagatatagcacctgttttaactatggtgtagaatggaaagtatgaaggaaagggtcatttatttatgactgatggatcacagtacattggttcattctcaaacggccttttcaacggtattacctaaacaattatattatcttgttaactggttaatttggaactaattgtcttatttggtgttaattattcatttaggggctggtgaaatgttgtttttgaatggtgatagttttaaaggaatgttttcaaacggtaaaaggcgtgggaagggaattcttaaatttaaaaacggagacctgtatcattatatttatactaattatttgtccataattactagattacaataaaataatattgaagtgattaatccatgttctaataactaaacaaattattaatattgttgtaggtttgagggattgtggaataatggaactagaaatggctatggagttgaacgttttgctgatggaactgtttttatgggcaattttaagtattttcaacgatttagcatttgttttcaggaacaataagagaaatggccgtggtgagattgccatgcccgatggtacaaagtatgaaggattattcaacaataatgaaatcaatggtattatttacatagttaattagtttttaaaaatgatgatttcactaatactttggtgaattccgttatccactcatacacacctagaccttaattatttcattaacacattattgttttaggatatggaatgatgagatggttgaacggtgaaagttatactggatacttccggaacggagttaagcacggttttggaactacgatgtggaagtcaggagagtttgtgagcagaaaaggaatttacaaggatggcaagatgtgcggagcattcaagtcagtaaaacgtgacggatcagtcttcgatgctctttaccgggatgattcccttgtcaagttcttgacagaggatgaaatgaaacagtacactcacaagaatagtgataggagtgatcgtagtgacagaaccaactccagtaggaccagcaatagtacaaacagcaggagttataaacagttcagcacctctaattcctttaacaggcttaacaccaacggtgtaaatgcagcaaacgacctaaacactaatgccagccatgaaggtaaagataccaatcccgccaatgtagtgaataatcggaataacaggagtaacaggaataacataaataaaaggaataacgtgaacaacaggaacagtgttttgaacaataaaggatacaggggaagaagaactcagacaaaagtgaatgaaagttaatttcttttatttccatgtacatataaatatacattatatcattattttgttagtctaaaaaaccttgaattcctgaactaatcagctagtaaattttatttgaattatacactaagtcggggatgataaagaagatgtcaatgttaaataaatcactaattaaaacttgtttcgctattataaaatagtgaaaataaaataacatataatatacaataataataaattatcgtagtcttctggcctcacgctcagtttctaataatgctaagatatcaccttcacgtactgggcctttgacattcctaatgagagttctgccttcccagccagactcgcccataaaatcaacacgtacttgagtaactccaccacgattgcctgttctgcccaaaactttattaactttagccaattttggttgctccatggtttataatccaattatattcatataaaaattgattactttatggtatttgttgggccaaggtatttggatgccaaaacaacgatttcaaaaataatgatactgaagtatgatatatatgggaataaaattaataaaactgaaagatgataataataaatatagcagtaatggaacagatgggggaaggctgatggggaaatagaatcatacataaacattatataatcaatacagataattattttggtcaattatcctttaaaattcatgagtcagtaatatacttccaatataaaactagacatagttacacaattttatacaagatgtaaaattattgataaaattaaaataatgattttaaaattaaatttaattccctaataattcaaaatcatcagtagttcctgtgaattctgcgattttctccttaatctttgatccctgggaccatgttatatgatcttccatattcctagttatgtgatatgcaggattattaactatatccattccaacctttatgtctatttaataaattagagcaaattttattgttttaattgaaggtaataatcgatatttagctggatatgaaaaatagtggtactaacggccttgttcgataaatgttgtcgcttgagttagatgttgacagaattttctggtaactaatactacagctaatcttcttctgcaaaaaacagaggcagatatacgttcacaaatctccaaattcccttttgttgatattaatcccatttgatacctaaattaggaaattattcacatttatctaataataaaaataaattctattaaaatagtgtaaacatacaatttttctaataaatcgtccgtcattttaattctaaaggcgtcatcttcaggcaacttcctcaattcattcgttaatttggttatattcccaaccaatttattatacctatgaattaattagcattatttgtattataattgggtatgttcaggtaatattaagaaattttaaataaatttaagtaatattgactatagaagtacttatgataatcttcaggcttttgtatcatgtatttattaataattttagtttcgcgatgagtattaacatttttccaatcgaaaaaattggtttttttgagcaatttctgctcatgatatttgagtttcctcatatccacaaatatactactattactcttttaaaatactattttacaaatatttattaaaaaatatattttagaaaatacgaaaagttgggtttaaaaatataaaataataaaaacattaaaaatattgtgttatgtataaccataataacgtctatgaaatgagtcctgaatttccctactgagttcatcacttatatcactatctcttattgttattctttcttcctcattattattatattccatggaatcttcctcggcaccacccttatctatggctctggtgtttagttccagcggcatattgtatgcatattccaataactgtgatctcttctttacgttgacaaactcgttccgattgtacttgatgaacttaattggaggtgtataacccaactcaagcttccttgcgatcataaaccttaaccttgaagatactttatctagtcctttctggacctcttctggatcatgttttgatattatattatagtaacacttgactgtgctcttactagttggcatttctacgtgattaatactaattgatgccccgtttaaatgtgtatataacagttctggtttattacatgttaataactgctcaatatgtgtatgtaacattgtgctaattctagcagccctcctcaatacgtgtttttttattggatccaatacctcacctgtaacaatataaatattcataatcatttaaacatttatatgtttataagtaaggtaaaataccattgacattaggaatagtgagtttgttaatgagtgaatttgattttttctctaatctaattttagttctaatcctagaaacaacttcatcaaatctattttgttcaactagtttattatcaagttcattattctcctccaactcatcaattccattgtatattacactcttatcttcctacacatcagtttaaaaactatataattagaaaaataagtaaaatttacagctggaatatcttttaatatagttttagcgtcacgaattgggtcaactttggctttattagcatttagtgaattgtaaggatcttttattctagctttagcagtgagctcctgtatatattgacgttcttcgtgagttaaatcttggtatctgggattactctttaaactctcaaattccaacttttcctccaagtcctctttaaaattatatttctcaatatcagagttctttagtttgtctgaagaaacctgagaatttggtatttcttcatttttagaccattctacagtcaattattaacatttactatatgtatatggcatataagtaggtgaagtggtaggaagatacggttggagaggtgaaaatttgaggaattatgttttttatgaaaactaacatcgtcagaaatgttaataatattctttaaatttttaaaatttttattaactttgttattatttatagaagttcttgaaaatttcaaaattacactttttaacattatttaacacaaatttgaacattattatagaaataaatatatagcaaatatatcatggtgttataacataataatgtgtagtatatataatagggcaatcgtatgtattattgtgtatttataaacattaattgttttatctaatggatcatgtatgtaagttaaattacatagaacaatctcaattaattatttaaatagttatattaggtattttgattaaattgatttgattttatatgattctgtagcaaatgttatttgtggcggtattgctggaatagtaaccgatttattattatatccattagatactttaaagactagaagtcaagtaaataaggacattttattccaaagtaaagctaaaacaacacaaattccaccaaagttaattaaaaaacggaatcttaaaactaattctttgtattctggcttgtttattttactaagtggtgatttaccatcatcagcagccttctacggcgtatatgagcttactaaagatattcttaatgctaacaacggtaactactggaccacctattatagttatttagtgtaacattgtttatataattttagaaacgaagaaaccttcaatgccattgtcgtttatatattttatgggatcttcatttggacaaattacaagtttagttatacggtaccatttaataaactacttacctttgcgttaactataaacacatgttaatgatatgtgtagtaaccctttcgaggtagtgaaacagcaacttcaagctggattatatactggtactggcgaggctttttataatatttatcgcctccagggtattcgcggactctatgcgggttttttctcaacactcattcgagaaattcctttcgatggcatacaatttgtattatgggagaagttcaaatcattacactactcatatagtatcgttattattgtggccttatgaatagttatttatttaaaggaaagaaaatatattaaacaccatgatgttggataaaggcgaaaaaatatctccacccaaaacaccctttcatttagctatattagtaatgctttgttttagaattatcgcattatataagtgacaagggaaaattaaatatatccactggaaatgtaattgtatcggcactcagtggctcctttgcaggttcttttctacactattcactgttgttatataataccatgttatacatagtacttttatacatgctaaaattgtgataggtggtgtagctggagccttaactaatcctcttgatgtcgtaaaaactcgtatgatgacgcagggggagaaaaaaatggtaaacaacctacaaattacaaataaactaatgattcattttaattaatgtttagtataaaagtacatgggattgtttgactaaaatagcagttgacgagggtacgagcgcgctgtttaaaggccttggactgagagtgacgtggcttaccctgggcgggttcgtattcttcgcagtattagaagcgggaaaagttaccgttaagcctatactcattaaggattataaaatacactagatcatacacacttctaaataaatctcacacattaactttataaactattaattattcttgttaattatggaattttgttaatttgtattatatacgttttcatagtctttgtgtgggattccaacacacaaatatcgattagttcacttttttaatattttatcataatttaagtaaattttacttgaattaaatttaattttaaaacaaaattttaaaattttaataatagcagcttcgagatggatactaaaatagatatatggattgagaaatatagaccaaccactctcgatgatataattgggaatccagaaatcactacgcgtttacaattcatagccaaagaggggaatatgcctaacctactcctttgtgtattttttttagttatattgttaactataagaatccaatgttattgtgttttactaatagtttctaattattatgttttgttgttttttcaattatttatctattattggttgttagggtccacctggaactggaaaaactacgtcagttttatgtttggctagggaattgcttggaacacacttcaaaagtgccgtcattgaacttaacgcaagcgacgacaggtttgtttggaaaaataactttttctttctaggggcgttgatgttgtaagagagagtattaagaactttgccaagaaatctctcgttctgcccccaaataagcataagatcgtcattctcgacgaagtggattctatgacagaacctgctcaacaagtctgaatctacttagttatatagtttacaatggttgatttacaccgattacactaatatgtgaattttttgttttgtaattttcccctttaatactcattgacggtttatatgtaggctttgaggagaattatggagttatactctagtactacaaggtttgcactggcgtgtaatcagtcgaataagataattgaaccaattcaaagccgttgtgctgttattcggtactcaaagcttcaagatgagcaggtactttaaacactttaattatgacgttgtagatattgaagagactagttaccatttgcgatatggagaatttaacatatactgacgaaggaatggaagcgttgttattctctgcagatggtgatttgagacgagtaatactctaaaaatatattataatatgccatttatattctatagttgttaacaacattataggctgtgaataatttacaaatagtatctgcaggatttaaagtagtgacaaaggataacgtttttaaggtaagtttcacaacactattaatgttttataggtttgtgatataccgtctcccgatttaatacaaaaaatgctcgagaattgtttaaatggtaattggcgccaggtatcctcactactagcttacacatttatcttcataatatgtatggttttatatgtcatataaatcttatattttaatttaggctcatgagaaagtcgatcagttgttagaactaggacattctcctgtggatatactagtaacgatgagaaatgtactgaaaaccatggacgcgcctgagcatgtgcttttggaatacattaaggtattttcctgcacatcacaccccgactgttatatttaaaaataaaattatacctataaccttttagagtgtggctttatcccatatgacaatggttaatggattatccactcaactacaactagagtaattttttaatttccagaaatttctcaggaaactactggcgaatttatgcaagatcgcactggcactaagaactacctaatttattagcatataattttacatattaataattgatgtatatatatataagtggtcggggttggagatggaacgagtctcgaacccacgacctaagtttttttaatatatagcaaaatttctaagtttcacggtcctataatttgccgtcagttgagataatttatcctttaagttattataaaaatgaaattttgtattttcctaataaaatatatactaatactatagttaagtgtgtaaaatagagaataatataaaattatttctttttgcgcttaaagtgaggtaacttcttcctgaagaatttacgcctcctcttgtgccccttgttgctcctctcatcggtcttcttaagcttatttcttttgagttttttagctaatttgttgtgagaatgaggatatatatgctgcttaacactgtcaatggtggattgcagttgattgttgatgagataattggggataaaagtgaggtgtttcttctcaggtttaaggagctggttgtcattttttagcactgacttaagcagtagcatgtcattctcgtcaacattcttcagaaactcttcctgctctattgcgctgtgcctcacggattgaatttgggctatctcaaccagctttggcgttatcatcttcagcacatcgtttattctgtacttaaaagactcaaatatttcttcgcctattttgatttcctggacgtcagaatccagtgtttcttcatttactccatttagctctagattattttcggcctcattaactccttctaagtgtgagtctttatcgtttgcgcttgaggatacaagttgtcgtaacagttgatcactttcatttgtaaagaaggtaagggatgaaccgctttgataattgcggccagtgcgtccgattctgtgtttataaatcccgcgactctttggcttgtcaaagttaattacgcagttcacgttcttaaagtcaattcccctgcttaggctaaactcgtcctcgctgtcatcgtcaatcagtattaaacttcccagtagtccctgattaaaactctgcaaaaacattaaagctgtataagtgaatttaataagtgtaaaatatcttggaggataaaacatacctgtagtatagtgtgccttaattttggagatagtagtttactaatgatgttaatgtccaagcataacttccttaaaaagcagtacaaatagtatccactaaaacattattattatcatataactgttataaatacatggttatcgtattattgatatataattattattctattgttggtgtataattagtttgtaattgtttaatagtaaagttgagtagaaagatacgtcttattggtattaacgaatataattgaaccgtatggtatgcactccattttaaggagtaggtatagagtgagtaacttattatcttcattaaccagcacatagtattgcttgacgttacctaactttggagtgtaaggtacgtcaatgtaaatcggtttatacaggagtagatttgcgatatttttaatctctggatcaagcgtggcactgagcaaaacagactgaaaagacttgaatttcgagctgttcctaagtatttcaatgagttttaccatgtcattcttatatccaaactcaaacaataaatcagcctcgtcaattattaagtacaataaccgttgattacttaatagttcaacggctattgatggctttgtaatcacaatattcgataaactattactcaattctgtaagtggttttactgatagtctgtcagaacactttcttaagagaactttaagaagatctgtgacttgattaatcaaatcattcgatggcactaaaattaatagcttcaaatcaaatgggttaaatgtgctagatttctcaagtaatgagtttaataaagggattaaagctgccagagtctttccagagcccgtttgagattttatcattacatctctaccggataatattatcggtatagcctaaaaatagattaaatggtgaatgtatattttgataggattaaaaataaagaaattggaattaaaagtaccttttgttgaattggagtgaactttttaaaacgagttaataaattttctaagagtactggatttaaattcgatcttccaaaggttaatatgtcctcatccgccagctctgaagattccagagtatcttcaggctcctcctcaattttgctggattccatcatgttttaaatttcttcaaataataaaactataatacatatttaaaatttatgctaagaaataatagtaattatgatgtgaaatggtgatgtcaccactgagtatccttatatataaattataataaattatttattttgttaaacttgggattaaaattaatggaaaatgaagaagttgtcgattcaacacaaagctccgaaacccatccaaacttactaaacacctcgcctggaaacaacgtcgatgataataatacaaaaaactcagaaaattgtaataatatagagaataatactgatgttgataataattgtaaaaagagcgttagtgaatcggaatgtaatcaggagaatgattcagctgaaactacagcttccgatgctcctgtagctaatccttctgaaaaccccttccatacagttgttgagaataatttattcggctcaccatcacctgtatattataaagaacgtggaaatgagtgtttcaaagataacaactataacgaggcgatagactggtataccaaagccttggagaggttagaattctcagaggatgataatttaagagctcaaattttttgtaaccgagcagcatgccaccaagctcttggagattgggaatcttcaatctcagattgtaatgatgctctggcgttcaatgattcataccctaaggttttatttactcagttttatttcgtaaaattagtctcaattattctttctttaatactattttttcttcactaatagtacatttaggcatatttaagacggagcatggcatttgaaaagaccaaattctatcagaaatcacacgctgatttagaaaaggcacttcaacttgatccctcattggagtactcattcattcccattaattaactattttattaactacattgttaattgcattattaattattttattaactgcattattttataaattatttgtagagaaaagtatttggtgaagaaaactcagcttaagaaactgggtattttaacaaacaaattatatcattgtttagcggacgctgaatttgagactgagaaggctgagatgttagggaaattgaaggatttggggaataatctcttagggaaaatcggcctttcactcgataatttcaaggtgcaaaaaaatccagaaaccggatcctacaacatacagtatcaacaataattcacattttaacatcatcaatttgataattctgtacccttaatttaataattgtgaagtaaatgtttattttcaagccattgttgtataattgatagattatcagcccatctaaaatttttaatgcataataagtgtgtaataaatgttaatgagtgtgtaattccataccttataatggcattcttggcgacactaatttgatttttcaatacattcacatcgacactgttatcccctaaagttttctctagttcttcaatttttatcttcaaattatcgtacgtctcaaatattttatcaatctattaataatttattctgtttaacttacgtttatgccctttaactcttcctttaagttgttactctcaatttctaaacttttctttttttcaatcaatttctccttctcatctctacaattatgttaactaacgtgtgttttatttaatgtgtttgtatgttaaatagtgtattttgtacattaactggtctttctttttggtcaatacaaccgtttcattgattttaggtaccctatcaacaatatacacatgtatgttcattaccagtaaacagtagaaataccggctttttcagataatattaagttttcgttcagtaaaaagttcattgaatctaattatgattaattttgtatgaaaacattacctttgattgccattggctgaatcaggcactttcttgctaattgctcgaattcctttttattataaaatccgccttcatcatccattaatttatacagtttcattcgcttctcctcaatgctgttcttcttcatgtttattacatggttaatatatactaaaataattataaattaatgaatggaaaactattttcctcaaaaagaatttttatctcaaaaaataagtcgaacacatataatttttaaattaaattaaaatttaaactgtttcttcttctttttcttatttaaatccttattttcaggtactacaatttgcccagcttcctcatgtacctttttagctttctcttcatgatatttcaattgcctcaatatctgatcagttgtactagttccatccacttctacgtcaattatacactggttatcttgttataattaaatagtatagtaatttggaatttgttgaaaataccttcagttgttagtgatggtgttgccatacctcccagcggtgtggttaagcctcccataccctaaaaaatcgttactgaaaataaagcttaccagaggtgttgcaactggtggcggcatctgataggtgatttgagatccaaaaagagcatttgagggtgctgcaaccttgggttcaagtacagtgtaggcttttcttggcgcctgagtggtctgcatcaagggttgtagtggtgtatccagtgctgataatccaacatcaaccaaaggggtattgattccaattgatatctacatcatcattaacaatgtcaacagggttactgtgttaaatatctaaataaatgtaagttaaatgtgtaatagataccggtgtgtctgaagtagcctgtgccgatttaactgtttcctcctcttgaacctcctcatccgattctataaacatttttaataaacgtgttaataaatatttgttaattgaaatttaataaaaattgttaattaagtatgctatttgaataactgtgttacctgattcttcctcttcttcctcaggtaattgtgggatttcaccaaagaatgtcttatcaatatggttatcctcataataagatgagtcaaagtaaccgtataatggattccctgactcatccgttgggatatttccccaaccacctggctgataaccgaacgacgctgattctggcaagggagcattcactcctggaatacgtaagttgggataacttggcgggggtccaaatctgagaattattcatcaaatatatcaagtaaccatgaataattaaataaatagtgtaaaattaagaataatagtggagataatacctttgcatattaattagccatgggggaggtgcgttttcgcctattcctagcgcattcttgagcctttcggataattgtcctggtttacaattcctcattcgcaatgccatttctttcccttcataatacacgtcgccgtactttgtaagaggcggcttaactgcgtatttaaaaaaggcgtcgtgaagagtttggtaatctatatccattctgtgggactttggtctggccttttcacgctgtttctgcttcaagctcttttcattctccttaatctggagtgcagaccttatctcagagatcttagttgcctcaatatgaggcggtaatttgtatggtggcttatctgagctgcgcctgttctgcataaatggagtcttctcactccagtgagaaggaacaggtactgtgtttctctggcccttgagccatatcaaaaacttcggatcagacgctgtcgtatcccaaatctcaaccacttctggtttgtcagccgactaattcataattaacatacaatataattgtaatatgtaattggttgtattttattgtaattagttctgcaataatgtaattacttgtttaagttcatagagagttggtctgttcattaatctcatcaacttcttggcgctcattttcctttgtgattcctgaaaaataaagttaatgtatgaaactaacatcttcatctgagtccgactcatcgaaacgttcctcctcaggctcctgttccacaggcgttggttcctcctctactgactgattttcgagctcagaaaacttctcgaaaactcctttaaaatctccatagtcctcaactaaaaaaataaaccacactatctaacaatgctaaatatatataaatataaatgttaagtttcaaatacctaatggaacgtattctatttcaatgccttcagaatctttgaggtgattttcaaaatctttgaaatggattttcaaagattctttcaaagtctgggcgttagttttaacttggccattggcatccttgtgttcagtttgtttttgtttccttttctacaaatttataagtgattaataaatcaagtggattaaataaaatgtgattcgataaggttaccagccgttttaaaagatttttagcagttgaaggattcttctttctgactatttttatcgtacttaaatctattttatttgccatgataaatacaaaattaattgaaaattaaaatatagttaaatttttaaaatcaaaacgactcataattaaaacaaacagattttaatccagtatatagagtgttagcaaatatgtagtgttaaaaaagtgtaaataaccagaaatatagaaaatatattttataaattaaaaattattaaaacagtttagaaatctcctttaattgggcattttgaaagtcaaaattattgtagaaatagtcaacttgattctgctcgttctcttcaatttcgttcaataatttgtttatatgctcttcttctgaattacaatttatcaaattattaataataataatcataaatttaccttcattcatgttaattgcctttattacaccctagatcgcattatcaaacaacattaaaactcttatttaaatatttaagatacaaaccttgtttgaatcctccattcctatatccatggaagcctttttaacttgagggtgaaatagtaaggaaaagaaagtgggctccttatccttctcaacatttggtgttgcctttacattttaattaacacacaaaatgtattaataaattatgtaaattattatatagagattttcggtgtggtttagcgggttaatatcgttacctggaggaacctagggtggtttaacccactcacattttgagcgtttttatcactaaacccaactacatttcgattgtgtgacccataaattatatttaaattaattaatattaaaaaaatgaatgatttgttgtacaataacatattacattttaatttatatataatactttgtgtgtaacgttgttgttatcaggattcgtcgtgatttataaaaaataatctaatgaagttgaaagactttaaaacagcatatatacaatgttcttgctaaaaactaatggtaaatattgagaaatctctagaaaaagtgttaattaacacatatttgaattttcatattttaagtcaatttcaaacgaatatactattaaaatttaataataaactttaaatttttgtgtttaaattataattaatggattatatccatcctaaggtgtgaattgcgactttgtcactctaaacttaaataatagcttttaagttgtaatttcgtaataaaaattttgcattatgattgatagttattttgaacaaaatttggctaattttggggaaattcacaggaataatatgacgttttacgatatctccgaatgtcaacaaataaaatttttcttaaaattatttgtatatttatagatttattttaagatgtatgaaataaaaatagatggaaggttgggaaatatcacttcattaatttgacaattaaagctgaacaaatagtctactgactttaataacaattataacaaactaatataaaagtctttgaaatactaataataataaacatatgttggtgtaaatataatttatcgaggaaaattctacattaacagctaattaaaattggtaacgacaccaatttgatgaataattaatttaaacaactaaaaaaaataaaatttgaaagttagaaggataatacaaattttgacaaatttttcatcataagaataattaatagatctataaaatagtcagacattaaaattatttgagaataacgacgttgttattcccgggacaaagaggcaattaagatatttcagcgagaataaatattgaaggatctgttagaaacattaaaggcgattaataattaggtgtaaagaaccccgaaaagcgcgtggaaaagattttatagatcattgttggggttaatattggaatcctatcaccaatcggccgatgcatgcataaatcaactcattaataatatataataataaagaagatgcacaaataataccaaatagtctaaatgttatgtataaaaatcttctaggaagattttagaaaatttactgtgttttttctgagataaaccatatgggtcaatgacgaccagtttctaaggagaacatcgacattttagttttactctttatagcgaataaattgttcaaagttagatgaattgtccaagagtcttattaacttgaaagacgtgttccctttgatgattgaatacttttgtcttttatcgttaaggataaaacattttgaaaattttcgatcacaaccatttttaaaatatatatattattgataagaacatttttcacattttattcggatttattgcagtttcaaaaccagatacctaaaaaaatcacatcaattttaggctatctaggatattatttcacagattttatattatactcaccttctcgtaaatctaaatgaaaaatataataaatttgataagataaatacagttgaaaatcataaattcagtacaaagtaacaaatttgaaaattttaatgctctagttctcagcacatttctcaaattttaaattgaattatttcttctagttttttcaatcattttcaatcatttattaatcgaattccgtacttgttgatcttattgagttaaactttcttgagtgatttaattgtttattccttttagtatgaattcagtagcatcagtgttgtgcgaaagtaccgagatcccctctaccgaggttgatacatttctggccaatgtatccgaagaccatttcacaggaatagatgagaatccttccttctatggactcggaagctattcatcctcttcagaccctctgttttttgaaaacggagtacagttgagcttcgatggctcctgctacaccgattactctagctcagcatattctggctactcctcgaccgaatgcagttattacccagatttcaatagttccttgtataacattggctataaatcagagccattcccaggtgactcaaagtactcatcggaaggtaaattcgcagttgatggtagatacagcatggagacaaagtacagtatggatggaaagtatttacttgatagttcagacatactctcacatagcccaacgccaaatctgcaatacttgacaccgaaaatgaaagcaggtttcgactattcactggctagtttgtcaagcaatagttcctcttcaagtaatctctcatccagtatggccactaccatgtctagcatatcatcaaacatggcgagcataccatcaaacatgaataatatggcctctattaataccatagcaacgaccatggttgatgttatgacacctggaagaaatcagttccccactaaggtttcaacacacgatcttgaaatgttcaatacgatgatggacgggaactcgctgaccccgttgaagtcaaattccaactacccaaacagtctaaaaatgacaagctcaataagcacagttgcaagttcctcgtcatccttgacatatgataactattccaagtattatccctacgatgataagtcgtcatctccatatctaagacaaagtacgtttttacccacatttactcttatatatttattactatacacataccaaaatcgaattaataacattgtttaggttatggaaagaatatggatttattatcatatccggaacgcagcttgtctggaagtgacggtttacaggatctgtaccaatctgaccggacggtcggaaatttcccattccagagcagcaacgacattgagtccattggagacaactattttacaccgacgagcattacgaggaacgtcgtgacgactttcaaggttcccacctacgatccgagcctggccccagaggagagatacaaggagattttgaagataattttcaagatcccaccatctcctgagacctttttgacgccaataagctcccacttgctgaacagtgagtcgatttcggagattgcaaaaaggtatgacgattcccagcgcacagcaacctcacctgaatcccacgtggtctacgtgcggaacggagcggagctgaacctagtcctgaggaacgataacctattgattcagaacccgaaccagcagaaggagccgcgtaacgagaaactaaagttaaccaagcaagttcttaacaccaagaacgtggccaccagctcagacctcaacgagagcatgatcaggtccaggaatgatgagcaagggatgagctaccttccctatattagctgtaactggaaaggcgtgcatgagacgagctggtggatgagcgacgataagggcgtagtcaggaacttcaaggtcaagtttgacccggttgtctttggctccaagactgtagcctttgaggaagcgagcaagttcgccaagtacgtcgagggtctaatcagaccagggactctaatcaagtggtacccgggattcaacatccccattggaaccagcggtcgagctaacctgcgaaaggtgctccacatggaccgtatgaaaaattctgagctctgtgacccagtcttggaagccaacggactcaaggttgcagccaagtcaacctttggcgacatgataattgtagaattgtacaaagcggcttatgtactaggcctttgggatgtcgccgcctacaattgcctcaagacgtgtaaacgcagggggtactcgttcgagtggatccatgacattcaatccagtggaaagagaataacagtcgacgccctcaagtacatgagaaacgtcaaggagctcattgagcaggataagttatccagagtcaactcagaaaagaaacgacgcagaagaaagttgccagataaacgcaaaagggtatgttactaactggtataatagttatatatatatatatgtaaccagtgtgtaaatatatggtgggattaatttgtgttttaggcgtaattggtatatattcaaattaaaggatttaactaaaaattacagatttaactaaattaaaattcaaaaagaagaaaagcaaaattgaaagatttaacctcgagattcaagatttaactaattcatttcagatttaacacatttattcagaattcaacgagtaaattcagaaaatgcgagtataaataaatgatttaacccaaatatacaagaattcgttgtatattgacctagcttgaaattcagtaagccactctgagagtggaagcacaattttctcacagtcccatttacatattatttactataccatgtgtattatttattaaattgggtgatttaattattgtattgatggaattttcaaaataaatgtgttgattgtgatggagaaggagtatgacgagaagaagtatatagagttggatttggataaatttttcagagaaaatgacgaatttaacatgcttaagactctccaagaaatgtatgtgtcctcatacaagttggagcttgaaattaagccgatggtcaccaacgaaatcgattcggttcttctgtgtgttgatacaattctgaaaatgtgcaatctaatcaaagattccaaaaataatattaatctgatagttgatatgctaaataattttaaatatgatgaatcctttaaggaatcattggataaatataacagtttcaatgtaaaggacactaattcatcagaaaataccataaatagtataaataactggatgaatgactatcacagtgatgtaataattgataatttatataattcagatttaaaattggaatctcttaacttgactccagatgcggaattgacaaggttaaattctaatctgaataccgtgatattggatcatttgcaggatttatcaatgaaaaattataaatttttgaatgaaaatgaacttttaaagtcatatgagttactttttgttaaaataccgtttttaacaaaattagtatcacattttgatgatggagaagtaaataatttaaaggatgacttttcaaaatataaagaaataatccaagattccattactttgtgtgaattttataaaaaaaagttaaaatcgcattgtttcaacaatttgagctctaattcagttggaacagtattacaagcagtgagtgtgttattattacttgatggtaaaggattggaaaatgttaactgtataatgaataagaggttggaactgtttaaaatcgcaactaattcgttgagtattgggttggaatcttcattaatctcactcttctcgcacattctgctcaattatatcgtgttccaccagttgaactcatttaataaggatttgagggttgatgacttgagtaaaatgtatgaaattatgttacttgaccattttggaacacacgagttgagtggacttttaaatgttaaaaataaaatttcggatgaaattaataaatttaatgttaattttacgtatttccctaaaaacagttttgaaaatgtgaaaaatacacttttttcacttctagaaggtggatttcagaagagttgtacccagaaaatctccgcaataatatcgtcaataaatggtgcagttgataattatatgaaaatcgagtcagaattgagtaatttttctgaatactttgatgctgagcacttcactaaacacacaacttatgacgaggatagggtgaaggaattgactttattcagtggttcttcttcaaacttgagtaaatttataggagagaaagttgattcaattgttgataagataagagcacaagtagtaaggaaagagtttaaaggtgcagaattagactctttaacaatatactcaatacaggaatataataagaagtttataagttggatggaggagattggtttattaaactcgattctactgttgagtaaactgaataaaactgaaaatatggataaattatataaagaaattgcaaattactatcttaatcctttattctcaggtgttactaagactattaacacactggttgaccaacaatcccaaggtacagcactaactcaagtattgacaaattagttatattacagaataatacattataaaaaataatttaacagataaagagggactgtatatggtattattaatgtttggaatcgcaaatttgaagagttatgtaaacgagaagaataaatatgtagagtgtagatttacaagaatgtttgaggaatccggcctgaatatggcaataaattactatttacaatttaaggagacaaaaagactgccgttggtcctaaaagtatttttgaacttagtatacatccgtttaggccgatgtttcgctcctgtgtatgttgtgtgaagagaagaaaaacaggggaatttttaaggaaatcaagtcatacaacgatattaaattgatggttgaaggtgtggacgaatttgaagaagtgtactcccagtttaggggtctgctgttgtgacaccatacccatagggtaagaggttcagagaatatatgtaaaattcgtcaaattttttaaaaaatttgttcataatatataaataaaaattgtacatttctagtgtaaaatattttaaaaataaaataaatgaaaagcagatgaaataatgagaaatttatgatttcaggtgaagaatgcccaagaaggaaagaaagaggaaaccggaggaatattgccaaatgaagccattgcgggactgcctgaaccagaatgatggcaaaatagagagatgtgtaaaggaggtagagattttcgaaaaaagttgtgactcggggcgaaagtattttcattccagagaggggctggacgacagcaagtcgggacttttttcgggaaaacgccacctgtgacaaagtttaatgtgttttaatgtgtgtacttgttagaggtttccggcctccatagatgcatatgtccctcccaactttaagtatttatgcatatggcgtgattttgtagtgttttccaccccccgtttgtctttggtaatttaattgtatattattgtataaaattattccttttggttttatataataaaattcaatttaaatttgcttaatttgcatatttcttacacattcatcagtgtattcatttgcccgtcaaaccccctactgtatatcgatattttaattgtgtttgaagaatatggctgagaaggtttcagaaagagttgggaatttaaatactactgattacgacgagaagcccgaaggaccaggcagcgccctctcagtgctgcttgggctctttttgggcctggccaacaacttcgcagaacactttgtgtttcttctttgctacatgtcattcaaactcttaaaaggggataacaatgttccgctcaacgttttcttgttcttcttcttcttcgccctcggctcagtcgtcttcctgttcctgagcccgctgctctcctttttcacactggtgtcatacttgttcgaggcattcttcttcttgctcatgctactctcagttaagactttcgaagctgacgcaggtaggaacgtattcacagcctcagtcgctcttctcggtctcacacatggagtcaacaaggcttccacaatgggtctggtggaatgcacaccgttctcgaacccgcgcgtcgtggacctagccaagttcctctcaggcctgttgccactctttttgtatgtggtcttcaagttcggagtggcagaggaagacacattcgcaaaggacgaattggagctcttcttcgttaccgtgacctcattggccttggtcctcacactccttggcgggctgctatctgtgtggtacagctcaactggctcagttaagagatatgttgaaaggaagaaggttgaaaacgattcgaagccgaagttcgttgcgagacacgccggagcactcttcaacaacttgctggttccaggcctggtgttcctcgccctcttcttcatgaagtacaccgtcttccccatgttcttcccactcgatgcctcaaagaaggtcgacgtagggtacaaatacctcttcctgtgccttccaggactcatggacggcctctcgaggctcagcttcctgtacctcttcggaaggctcaacgttgactggggaagcctcacgccttggaagaccctttacatgctcgtgttcgacgtcctgctcgtcgtctacttcgcagttctgcacaacatgcaggaagaagacttcgtgctcttcgaggagaccttctcactacttttcttcatggtattcacgctactacactccgcgaccgccgacctcgtcacacttgagttcctcgccttcagggaagatcgcgagcacgacaagagggacctcgaaacgccctctgcttcaaccgagtctggactctccagggcctcaaagagggtcaccaccttcgtgttcctcaacgtccttgaatccgtcggttccactcttggttcacttttgactctgctattgttcaatttacaaccagacaaataagttatactatttcatttaatttaatacacgaccttaaccatctttcgaacaagtttgtggaaccttttaattttttaatttataattatatgattagttatttttgattcatgtaaacgagtgattctagtggttgggatttcaaaaaaataataaaaattttttcaaattttcattattttattaattttttaaatgtcttgttaatttccggtaaattactaaaatttttaaaaagttgtgttcatttggaagattatgggtgggtgtatgtggtgatactgataatgagtttagtaagtataaaaaatgtaaaatgccgattaggaccacattgcctttgagactctttaaaatcagtccgctagtgagttttaagcctggagccggcgtggtgtatcatccaacagtccatgacgctcatttaaacgaaacactaagatttgaaaaggccgttaaaaaaggtactacaatttcatcttacacaatgtgtataattaatttaaattttgcaattttatcattaaattattttttacaccaataataattaatttatccaacacaattacgtaataaattaatccattgtatataatcaatctatccgtttaattaattaataatatgtaggaataagattaccacaaactaggagtgattgttattataatggcctgaatccagacaaggtggtttcaaatgactggcagagccttgacctgggaaggatgcccatgagaggcgggtacaactacgctggatacagacttcctcaagtgaatgcttttaatgaggacgaacttgttcgttttttcgacttggagaacttcttgcagagatattccctaaaggagatttggaagtcagccaagttcaggctcagattctccaccattatgtacctctcattcatcttccccttcttttttgtgtggtctgagtcagtttggaaacagcgttatgagcctctggagccctcaattcccactgaagactaccataaacacttcgtctggcactcgctcggccacaaacttgaccatcacgcctttgtccagtactctgaggctagaagaactcacaagtggaggaatgaccaaattaaccccgaagactatatcccaccccaatacagatatttacaaaaactacctaaaaatgctcttacacactaatatgttatcgtacatcatatactaatattctatttgtattgtgtatattacattaattacattatgggtatcatactagtcatgcgtacactgtataatgtgtaataaaaatgaaaatgtgcttaatattaaaattaatcttcatccattttatcatcaggctttaattccgagaacatgtaatcatgctgaaagttctaaagaaatacataaatattagttgaagtacaatcaagtatttggtgctacgtttagaatcgagaaataagctaaatgaccttttaatatcatcacaagtaacaggtccacctaattacaattttgtaaaatgtgaaaattgtgtaaaattgtaaagacataaagttacaaaagttgtattaaaaagttacctcctttacgtttccttattaaacttgaggcagtgatgagctgtagtgcgtatctgagtgaaacatcagttgcaactttcactaaaagttccaaagaatcctcctcaacttccacatcttcttcattgcatctctcagttatgatctaagacaattattatattaaaatagtaataataatatagtaaaaatggtatggaatagtaatggcgatgtggttttgttaggtacaagtttagtatcttgaggttgatatgggaatgtaggaataattaaaacccgatcaaggacatcaagcggtattccgtgaggtgatttatagtccgttcctctaattctagttattcctctatttgttgccattatcacaataggacaattgtcagcctccaaggccctaatacataatataacaaaatatatgaatataaactggaatactaatttgtaaatatgaaccttgagagataggaaaaacactctatatccaacatgtgaacttcgtcaatgaataaaacgccctgtattaattcagctctgccgtcatcttgccattcctgcacttttaaatcaatttggtccctaatttcagacttaatctctcccgtatctccagtaaaaagtgataaaaatccctgtgacctataaaaaatttatattcaaaatgtattaataaaatattataaggtcaacaatactgtaaataacactatgaaaatagtaaaactaataaaagtacctagaattaataacatcaacatcatgtaaggtaacagtgtgaacaacttctttccgtttctgaagttctccagagggacatgggataaagttaacgttaggagacattgcatcgtaatcatgagagtaggagtaggctctgccaagcttagtaactcttccagagctcttgtcgatttgaataatgtcaccaactgaaacgttttcgcgctttagagcatctataagtttcccgccgatgtcgtacaaagtctccatatccgtggttttcacagtcattttcccgactttgtccctggctgtcccccaagtagtcggagcggcgttggtgaacttgtcaacctcaatctcagtcacttcgccttcaatgacctcacattcctccctgaccttcagacctatagattttctgaaggcttgagtaagagattcagttttactcatctccatagaatacacttccgaggcatttatgtgagtaaatgggacgtcctaatggaatagattcagttgcaattagctataaaattgtttaaataatattaattagagtaaatagtggataaaatcttaaaaattgggaaaataacttacagagcctaatgctttggaaatcgccattgcaattgctgttttaccacttccaggctggccggccagtagtatagctcttccgccaatctttccttcttttaacatatttactaccactcctataatatggcttaaatgtgtcaaataatccaatttgtttgagaaaaattaagttaaatgtgtaatttgaaagataaaaatatgaaaaatatatttaaagtgaaaaacttgtataaaaagcaacctgcagctcttcttgcttgaatctgtcctacaagaccatctttttggtatttaggagtgagattctcatcaaggcctagcccagtgatgtgagagtggatcccaatccgctctatcttcgttacatcagatacttctatggttttagtcattttaaatacagtattataaataaaaacataataatttaaaagaaatatcaacaaaagaataatttataacactctcaatgataagtagtaaacacaataaaaacaatattaaacaatattttaaaaaaagtaaaaattctaattcgaagcggttaaataaattaaagaatttgaatctgtgttatatttgatcatctttccttcttaacttggtcttggagaatactttctctgaatggagttaagggcgactcgaagctaaataaaattagaacattaaaatggaaaataccctaggagagctttagtgtactgtcttgctagcattgaaaccactgtgtatactgcagttgctgtacagtcagtagtgtcgttccctagtagtttactatgtgtgaacattgataagagtggaaggggcgtgaaggggagttttgcaaccactgaatactcaaacacgctcatgacagcgggcattagtcccataagtaacagtcccgttatgaaggttgaaaatgtcaggttacccttaatatttctacaaaacaggatataattacgttaaacagtactttgatttttccattaaaaccttcgatggcgtttctccactatgtgacattgttttagaccttgctacaataacattataagactatttaggaatattatatatttttgcgtggttatataatatatattcagtatggtattgagatacgtagaactttggcggccgtatatagttcaaaagcgtcacataattcgttgaatgacttcttaaagctatctttgcgatatatgaaaatccatgagattacttcgttcagaactcctgaaattactccaaacagaaggaccagaacagtgtccctcttattaacttctgatacgatgggatcgttatccatggtataacacagaaaattacctaatctgtgaaataattaaaatattggtgaaatcagttgaaattaaaagaattataataatattagggatgcgaagaaaattggcacaataaaatttgaaaaaactgttcacatattatcacatatgataaatatgtaatcttagttgtaacagaagaacaagaaagatttttgttaaggatggattcgggcttgttttacaaatgtgtaaatgaagcccaatacataatatgtttatcactattgtcagcaacttaagcacattttatatatttttaacttttgttgatatatttaactaatttagcaatgcttgagcttaaactgaataacgcagttgtcttgaggcgtattttcgactgtattcgggatctgattaccgatggtaacattgatttcgatgccactggaatgactctccaggctctggatggaaatcatattgctttagtccatttaaaactacatgaaagtatgttttattcctttgttgttattttactttattttagtactatctttgtaattttatttatttttcccctaaaattcccctaaattttcccgaaaacgcctatacaaatagttatacgtatttttcaaaaaattattttccttcaaatacatcaatcattgagattcgttttactaattattaatgtgtaggcggtttcgtgttgtatcgatgtgacaggcctagggctttgggaataaatataaactcagtcaccaaggccttcaaatcgactactaacaacgactctgtgcttattcaaagcgaggaagataaggatctcattaatttcgtatttgaaaataatggtactttttctaaatttgcttttttacatttaatgcgtagttgaggatagagtgtcgagtttttctctgaagttgatgaatatcgagcaagatgccttgagtattcctgagaacactgagggctttgacgctgagattactcttagttccaaggagatgactaacatttgcaagcagatgaacgagttttcagatactataaagatggacatttccgacaactcgataaccttttccactgagggtgatttaggccatggtgaaattgtgctgaggaacagggctccatcatctgaaggcgactgtggcgtcaccattcgggtatttttactttattttattgcaatctttaggtcaaaaatcctattaaacagtcgtatgccaccaaatacctccttatgttcaccaaagtattttttacccatttatatacttatattttataccatatatttagtagtacactgttataccctattaatcacagtataatattgtatagagtggatgtttgagtgatgcagtaacgtttggtttaagtcagaaccggcccatagaggtaaaatatgaagtgagggactcgatggaagactcacgtcacggtcacgttctcggcgaattaaaattttatcttgcaccaaaaatcgatgatgaaatcgaaacagaataatctaatacactcatgatacactaatagttttttatactaaacagtaacagtacaagtttaggaaattagtaaattaagtgagaatattaaaactgagttccggcaattggtaaagcggaagttggagctgcgaattttttaaaatccctaaaaatataaaaaatagcttaaaattaccatttagaatcgagaacaaatggttcttctacgaaaaccccgtccttgttaacgaagccaacttgaaccctaactgaggcttgacagtccctcaagtataaaaccctcatacacttgagagcaagctcctttgcttcagacaaagacatatcatttctatgttcctctctcagtgggccaattgcaaaatatttacccagtcctacaacatattaattgtgatatcattacacgattattgtaattattaaattaatttacaatatctgtataacataataaaattgtgtaaatgatgcgtaaaatacctgttacaacaaagttatcggtatatttagttccatagtagtccgtataaccgagaaatggtttgccgttactgagtcctccaacaactgcagagaccagaactgggtcaagtttagtccttctgtgatataaaagtctggatgtatagtttaagagcatttcagggttaagtagagcttttgacgcgtcattgttgtgttccaagaggtcagtgtgtactgcgtgtttgagtactctggtaagatattggtggtcagctgcatctcctgaagttgcgaaaagagtatttgaagaaacgctttcaagcctaagcacattcatataccgagccatccttccaagactccctaaaccaatatttaaagcataataaattaaatataaattacctaattctatggtatggtaaaaataagaaaaataagtaaaaataaaataaaaaataaaattttattgaaagaatcttaaataaattagattttagggtttctgacttacatttggtatcagtcatcattaaaactccttcattatatttcatggcaattatcgaggctccggtgacgtagcctgccattttataaattaaatactgaactatatatgtaatgtaactctctatacacccaacacgaataacaaccacgatactttgcaataataggtaataataaacgggtatgatacaaagtaaattaattcattaattttaagcacgtttaatcggaatctgaggataaatcttcggaattttcataactgtcaggctcatcgtcatctgcatcctcgtcgtccacaactcccaaataccagtatattgcttcaggtaccagtttatcctgtattcaaatgtacaaacatttaatagatatataactagattaaaatggttggatagataaaattgtgtaaaataattgtgtaaaaataccctaagaacgattccaatatcataatcttcctcgacatacatttccagttccgatatctaaaattgtgattaataagatcggcgagatcaagaggtgtaagttaacaaaacccgatctaacaaaacgggaattaataaaagttacctcaagttttgacattttattcaactcctcggtagttggaacctcctgaccagtaaagaatctaaagaaactaggcttgtcctaaaaacattcattaatgccatattaacataaatatatgtttaaataattgagtgtgtaatatacctcaagatcaactcgagttcgggtttctttagtttttttatggcgttgtattttagtgacagtttgtttagtgacatctttatcaggtaaccagtttatttcagtggctacagttccctgcaggagtgactcgacctctccatcaagcgacttcatgttatactgtttaaccaaggtggtgttagtgaagtaagggttcttgtcaaaggtcatgacgatcttaaaggactcttgcttctttggttctaggaactcggcactgatgtcgctcaagtatgcgagaacaggctcgtcatgaagctcaattatgcgtctcaacgtcttgttattcttcattgcagtaagccaaaactttggaaggctctaaaaatgggttaaaagagtaataaattaccggtgtcccatactcgtctcctgagggctgagttaaagccttaaaacgggattcataaagaggctgataaagcgtatcgtacttagatctcagctcattgagctctttgttaaactcaacctcgaggtcatcacgtgttttctacaaaaaagttgtcaaaattgtgtttacctgcagcttctgaagttgacccaagatagctacttgactatccgtcaatttagaggttacacgatcagctaagaaagattaagtcattaatacagataaattgggtgaatataagtgtacatcataaatataaatataaaggtacttagagaaacactctttagaccctcaaccaaaacggaatcatccgacattttttgtatgataaatttacaactaaaattagataaatttaaagaaaccaaaaatgaaaaaatagtttcctaaagtgtttaaactgtcttgatctgtggggaatgagaaattcgaattattactaaatatccagaatttgcttgatataataatttaaatcaaacacacactaacctattaactgtattccaatacaaaagtttaaaaaaatctcaattgggggacagtaaataataacgacacacatacaaacctttagcggttttagttgtgtacacagaaaaataaattactaaaaagatttggaaatccgaaatttttttatttgtaaatcaaatatagatcaacgtggctcagatctatttgaaaaggttaaaaacatataatcggagacactagatatatgtactgatattaaaattttcgtataattatataaataggttgaaaataaagataatctaaggttttagataaaataaaagtcgtcggtggatttatgttgcttgaaactgttgtgaacataacggctatttttgttatgtactttaggaattaaagcaggaaaaatatttgaaataaaataattaaaaaaatattaagtactgaattggtatataagattaattttcgttgccctacgtatgccccaatttgtactaacagaatactttttctttaatcgagtttaattgtagggatctgattatttctttgggatataaataaatttttttgatcgtcatccaaatccaaaattactatggcattaaagcgtatacacaaggtaatttccttttccaatttaatggcgatatttcatctataggagcttgccgatctgaccaaagatccacctacaaattgcagtgctggccctgtgggagatgatatgtttcattggcaagcaactataatgggcccacataacaggtaaattactacttcccgcattaactaaactttcgctttacaacttaaatatatagtttttagattatttatatatttattttattttataaaatttatattgtttatttaatttgggtttggatttcaattttttgaaatttcccatatttatctttattgttggaatccatcaccactgcatcaattgactttattttttagcctttaccaaaacggcgtctattttttaaacattcatttccctagtgactacccatttaagccaccaaaggtatttttacccattctctataatttacatatttaacactatattacatatactatttgtatattcgttggttaacatatttgataggttgcgtttactactaaggtgtatcacccgaacataaataacaacggtgctatatgccttgacattttaaaggatcagtggagtcctgcccttaccatttcgaaagttttactttcgatatcatcactcctcaccgatcccaacccaggtattttacatacaattttacaaacatttttatatattttgatcgtactattgattatgaatttatatataaatgtatattggggtataaatatttgtagatgatcccctggttcctgaaattgctcagatttataagcagaatcgcaagctttacgagtctacggtcagggaatgggtccagaagtatgcaacatagtaataatactttgtataatctcatgacgttttatctacattgtatacatagagtattaaaattagtaaataattagaaatgatttggtgattaaaacgtcgttgaccagaaacatgggctggagtagtagaaacgatatatgttcatcaatcaaagagtccatgtcgtcatattctataagttgagaaagccgctttgaaaatccagcgtttccagagttacagttcgccaaaaaccaccgaattctaaaattaaagttaggagtttgtcaaagttacttcttcttatttaataataaattgtaatttttgtggttggcagcgcctctgaacaccaaaacattggttgaaaacctgacctgatcagagttaaaaatatggaaatcagagtcaagagtttgtttaaaaagttccttgtggttttctaaatttactgcatttttcattgaaatgtagccgaaagtctccttcccatccaatttgtctctgaaggagtcgtagaacaacttcattaactggtatttgtcatcattaaataaaatcttggataaagggttctgaacctccttgtgggaggttataatagactttaaaacgttgttgttctggttcttctggttctttcgaggaaaatcttgagataatagtacatttttggtggttttaatgacatttgatagagatgtgtttttggattccgaatcaactttgtaatctaaacaatctaaattaaataattgtaaaagagtgaataacgtaaatgagtacaaaccaatcaaatgtctatgaagtagtaacttcctctttttcataaaattaagtaatcaagaagtaggtgtatgtgtaagtgtgatccattaaaatagttgaataaattacattaattaaaatattagttattagataataaattttaaaataataaaatttagaatagaaaataagaagaaattttgtgtataataataaggcgagtgaattctttccggaaaattcccacataatgtagctcaaaatgaaaagcataatgaatttttttgtgtaatataatttatttgaaatgtaaaatataagatgatagggagattgcacaggcaaaatagtttcgggcctcccgaaaagaagagtactctggtcatttccagagctatggaatttaaaatcttagaaggagaatcgtccattccaaacgcctctccggtagttttagaaagtataaataaaagtttggattccttaatagtctcacatagaggaactaaacgcgtggtttacgacttaccaaattttgtcaataatattgttatatcgcattgtgatttatcagacaaggagttaattgataagttcgttttactatatacgatttatttatcatcatttatctcttatttattatattttttaagcatttatttaatttaatacaatatttactcttaattttatatatatttatattttatacaaatatttgatacatttgaataaattataactttaggcgttatggagaatattttgatggatattccctggcgaataacgtccagtacattcccgtggagattgagtgtttaactaacttgagccctgaactcagtaagtctattctggctcttttcgtatcgataatttttgattatataagtgaagataagaacttaaacgagcctgagctgattaaatggggaactacattccttcagagaatgggaaagatactaaacctaactgaagttgaagtttcctcaattataaaacccgtttctcagagtctggagcttaaacagctcggaatgaacttcgatgatttgaaactcgagaaacggatccatgtaaactatatccaggaacacctcagacccatgcaggatagcattaacgatttcttcaaacaggctataggtactgatgacaatgagtctgattttacgaatgagtttgctcaaagtgaaacacacaatcctccagaccagcaagatttattatatgatgatcctgaagatcaggattttttacaatatatcacagataataagcatctgtcacaatatgtacaagataatcaacatgtacttcagcattcccaagacgaaaatccacctcaaaatttgcctcaaaatttatcacaagatatatcagataatgaggatttatttcaggatgatttagaggttgatgatcaggaaaaggaggaagaggagtgttttaagaggaatttcatagaaaattaccgtcccgatgataagtcatcagttgatagtaattcgttgcctgaagttttaaacacttttgatccacttttaccgaaagaacctactgattctgacactataaatcaagaacattttaatttcaatcctgatttaaatttcaataatgatagtgtaaattctgattttgatttgaagactgttgatgtcaataacactgatttaaatagagctgacttaaataatattgatttaaattcgaatacagatgatataaatcccaatcctgaaccggttgatatgaacattaacgttgctttatcgaatttaagttcaagttctggaactgaactggatactgatgaactagaacaagaggctgacgatttacttagagacctggaaaagtcacttgtacacaaatctgggccttcaaatggtaacattagcctacccaccacattgataattatataaatattactcggtatagtataatatataattatataaattatataaattgtgtagtggattatgaaagtttgttgaatgacatgtcgaatttaaacttgcctccaaagaagaataagagtctcccttctaagattttggggaatatttcaaagaagattaacatggtcttttccataaactccgataaaccgggtaaattcacatataaatcctccattgaaagtagtcgttcatatcccaatcaaggtaattttcaactccagtctatttaacaccgttgtgccattattatactattatttagtattattttgtcactattataagattactttaactatattgtgctattgcattatcactccaaccataatatacatattacactattattcaaatgtttgtcagattatctgaataacttgctgcttattgagaagtcgccggacgtggtggccgtcttggtcagaaatttgttgttgaagtatataatatcgggatttaacgactcaagagcccaggtggttttttccaaatttgctaacctgctaggagtgacaacagcaagtgttttgagcatacagaacaacatcgtgtcagatttggcaggtattctggacgttaatgcacacaagacctcgagtaagaaggtgagtaagaggcttaagatcctaagcgcaaccgtgggaggaacagcactgcttgcactaacagcaggagtggcgtcaccagttcttgcagtgggaatagcatttctaggactctcaggcacaggattctcaacgtacctgagctcaaacgaagggtttaactttttgaagaatatcttcggcctgaacgtgtctttgacgcagtttaagccgaagcgggagctgatgacaaatctccagttcatacaaatgaacccaaacacattcagagactctctcaatgatcatgagagctcccattattcatcgggcagggaatcgaccaggaatgagaaggaggaggttaacagtaactatattggcatttgcatttgtgtagggaataatgtgttcctaaacgagattttcttctttgagaatgaaacaattgactttaaatcttcggaaaccattagacactttgattctgagtatattgacatttggagacgtcagttcccagtcccaatcaatgacttgtatctactaaagtgggaatccaaacttctggcctcactgcacagaatgctcctcaaactcacatcgctatcaatataccagaaatccctggaactttacagaactataaacaactcagtttatgtcacacactataatcccaccgattttctagtcaacaacgatttggttgaaactggcagtatggttcaggtggacactgttcgggatagtagtggggggaatcgctacttcagcaatgaaggcagcagcggcaactattactcaagtccaaatcgtaactcgcccaccatttcacccacgaagccccaggatagggactccggttcatccaaatttgacccttacggcaacaagagtatcaataacattaactggccccttggtttaatacagctgtgcagtaatttagacaactgctggcttgtgtgcaggagcagagctgaggtttgtggcagtttgctggcaacagcaatttgtgataaacttctcactggtgaccggcacgtgtccctgattggctactccatgggggctagagccattttatattgtctgcttaagctctttgaacgcaacaagcttaacactgttaaggatgttgttctcatgggtttgcccagcactgcaggctatgctgagtggaacaaatgttcctcagttgtcgctggtcgtctcattaatgtttataacgaaaatgactggattcttgcgtttctttatcggtacacttcaattcacaaggttgccggtctcgctcctgtggttcacgaaaaggttgaaaattttaatgtctgtaaccttttcgacagtcacgccgactattttgagaacatttcaaaaattctttcatttctcaatatccaactctaatgtacactattctacttgtacacactataatattggtaattcataggtataattggtatttatgtggttttatatgtaggtattttatagttatatatatagttatatatttggttgtgtatttaagtatgtatacaggtatttataataccatgtaaactgttatatttagtttttacataggtgagtatttatcctgtgtactattgtatttaggtatgtatattactatatatatagggtgtttgtatagtggtttgaatgtaatagtgtatacatgaaactattaatttaggctaatttaaacacttaattactgtaaaaaacactttattaagttgttaaaacagcatttaaagctaaataatcatattttaaaggtattttaagccctgtaagtagtactgaattttctgtatacccttgataacaaaaacaccacaaaccctcaaagttaaactaacacatttataaggcttaaatatacataaaaggggttacctagcttaatttacacactaattacgctattaaaactatgtaagtaaaataacatgcatacaaattacatgaatagattaataattttatcgttgggagcttgttgaatttggttcatgacggaaacgttgaggttgagctggagtgatttcttattatccgtgggctgttctaaaatgaaggggtccttgttcggattatagtgcgtttcagtatcgattttaccatacttctgctcatactgcttgagggagatgctcttgtgggtctgaagggcgttctgcatgagctgcgggttcttgcgttcctctaacttgaacttgtcgtagatttgtcggtctgtgtactcgggaagaaaggctctgacaagcattaggtctgttccaaatgtctcaatggcgttgtaaaatctctttgtatctgcgtatgaccatttgacagtcttggggttcttgtaagcgtttataaagggttgagtatggttttgaggcatatcctctgtaattcttacaggttctctgattaacaaattcatgtcctcgtcttcaaattcaatctcctttggagcgacatttactgtcttcgtctgatttacattaacgtttgaacctgatttctgatgcttctgaaccatatcccatattgtatcatcgttcacattcaaatcatttttctcattcaaattattattcaaacagttgtttctcattccattcaaattatttttattagttccattcaaattgttattatttccatcaatatttttattaattccgttcaaattattaattccatcgattttattcaaattttcggtagaattcgaattattaattccatcgattttattcaaagaatcgttcaaagaattgttcttaacattcgaatcatcgttcaaaccgttcaaattgtcctcaatattattattaatattcttgatattttccatgtttctatttaaattattaatatttctcatgtttgcatttttattaatattattcacgttattcatgttaatctgggggttaagcctcgtggagcgtcttctagggtcattaaggccatctggaagcggtttagagtgttttgggctcgtaactctgttagttttaagtaccggtgcctccgtttccagtgtgttcagctcgggggttaaaaggtcatcactcgggtatgttccataccctgcctggtccctacacattccaattccactattcattcccaaaatattcgggcttgaaaaatgaaccccattgttcacattactcatattattaacagggttgttgatttggctacgaatatttccgggaacagtgttagaaatttgatttggaagagtattgggaactgtggtcggaatagtgttagaaatggtatttggcggttgattaggaatactacttgaaacactatttgcaacagtattaggaacagtgttaggaattgggttagaagggttagggatagatttgggttgattgagagggtagttgtatcctattgaatactggttaaattggtttggtcttatgtattgatagtttccagatgaaatcattggattgttccgggctgaaatctcatttacttcagaatctagttgcggaaattgattctgtaaataaccatcaaaatagccactaggatcactaaactgagttgattcacgatacctatttggttgactaaattgtgttggttggttgaactgagtgttcaatgatcgataaaaggcattaacgaactgtttgtctgatccagcattcatttgatcttgatacagatagcctgggttagggtatgaattgttgtaattatcaccaaaagaagtcagatttctaacattgcattcattataagtttccaaattactcctgtagccagcattatcatcaactttgttaggtagatctttaccaacaactgccagatctttaaaattatcgaaggtcagatctttaaaatttttaatatcaggtttcttttctaaatttgcattctcaggtgcattaatgttcttgtcattattcacgtagtcatatgtattaacaaggttagacgtattagcagggtctggtgggctggcaggagtcccagttacaaagtgctcattctcattgaggttcacctccctataatcattatccttgttgtaatctgacaactctgattcaggagtagtggtgcaaagttcaatatcattcttcttttcatcttcagccttttccttcaaatcatctttcgagttttcaggctcggtgcttgctgcctggctctttaggcgtctaatcactgctctcttcttactaatttccctcattctcattctcacgagagtgcgtttgtaaggtcctcgggggccgtacctcttcgacggctccttcttttttacagggcccggttctggtgttgggccaagatcccgaataggcggaggcgggttaaagtggaagtcgtgctgtgggtacattaacctcgggataggaacataaccgtcaccctctaatagcggatttggtcttaattgtctaacatagaataggctttcagggcttagcttagatgggggcattgggtttggaaatggaaacccttggtcctgaaaattccacccccaaagcctagatgtcgaatgtgacattgatgcgtccttcgtggctctctgcaaatgcttcctcatagcattaatcttattctcctcctcgttgggcttactgaactcatagtcgtaggccttgtcgtttaaaattagctccacaaactttgtgagcatcgactctaaaaattcctctgaacttaaaattaaaaggttcctcagggctgtgtcactcttgatgatgctaatcaggttacaaatcaaatatgaaatcatctcgttggaacacctccccctttccgtcaaaatcctcttaaatttcctatatagagttatgtactgccactcctcatatcgattatcatcgctcttatacaaatttgaaacctctacaacattcattataacccagaagtcgtaggaatagtgtaaataatagaggtgaacgggagtactagtgtggataataagggggataatagttagtatcaattgttcaaaatagtgacaataataacaaagataacaatcggaataggtggaatactgattaaaataataataaaatatggaataattgtgatttagtggtggaatggattgctaacggtttggaatagggttggaagaagatgtatatcttgagacattgtcgtccatccacatacagtattcatttcttcttatcccatcaataaattcatctaaataatttttaatcgttgttgaattaaaaaagaggtaaaaataagacaaatttagaaacttactcattatgttgttggaaacggggcttgactggaaggttcgataagagccttcaaacattttcacgcctaaaggaattgttaatttttataatttcgagtgtaataattatacttgtttcggagttagggaatccgtaagggtatggatgaggctggccagcgtactcgatatcagctcctagagaaaagttgaatgaatgcgtataaattaccattaggaaatacaagaggatttttttccatattaagattatggatagaatttaaaaaaatattgagaatattaaataaaaatattgttctccccagataaggaatgattcggtatcgccaataaattattcgtaaactttggacaaatcaaccctccgtttttttcctactacatctccaacgtttatgtcgactactcttgttttcactacgctggtgtctaactgtctcttatcaaatgagctctaaaatgtcaaattcatctatttaaccaacttttcatacgatcatctaatatttaactatatatttaagcaatttaactattaatataattattcacactttattcctctagtgaattcactattaatgccaaatatctgtcttaagttaactattggtatgatattctacgtgcatacagtggttttagggataagtgacgctgcgttgctttgacttccctttgcaacttcatctcctgtgtttgaagattcactaattagcttctctaagtcctcgatttgtatcgtaacgtcctctagagtgttttttaagacctccgtatcttccccctcctcttccaacaactcctctaacagttctctactcttactaaaagtttctaaagactccttcagtttcccgttaaacatttggctctgtgccaatgatatatatagtgatgccaggtgttttggtgaaagaccgtgcttctccctcaacttaattgcgttttcatagtcctgaaatagcttatttttggggttagacatactttggacgacatttcgaactggtgatttgtgtaaaaaatatcacctagcctcaccaaacaatatgatgcgtcaagaacatcatcctgttccggaacttcattgttcgtttccaagtgcttgaaataattcatgaaacactcgtacccaaattggaacatttcaaacgctaactaaaataaacattattatacataaaattatgtaaatttttgtctgaaataagataaaataatggtgaattaatcgaattaagtacttaagtatataaataacctataatatgtgtaactgtggattaaattatacttgtgatgtgtaatactataactaggattattaatcatatttattgtatatattagttaccatttcgtcattttggttattttcactggttttagctgcttctaaaacagtttctgccgacggcaatgtactatcagaacctaaaactcttttttcagctaattttgcaaaaataccctcatcaacatttgaagaaaaaatattggagctttgttcttcgtttgttaggagtgaatcggcgtaccagaggtaataattcctcagcgagtagtggagtggatcgtcacctgacctaagtaaattattagttttttctgtacatattggctcactcacttcctttccagtgctcttgaaaaaaattctgtggattccaggtatttcttatccttaaacagagatttccccctctcgaacagttcgtcaactgacattgactcatattctatacacatgttaccaattatatatgttttgttttcaaactaaccagattcctctgaaacttcgggatctgacattactactgtgtatattataaatgtagaatgaagcgtaggtgttgtgggaacatatacaaaggtattatattgaaataaaaattattttcaggtttttcaccttctgtatttgatttttttgaaatcaaaatagaggtgcaggactccgttgtcaaaaaaattcttaaagcctttctgagggtcagtattccattctctgttcattactctaaatgctatatctctgtacggatcacctcctatgaaccttattaggacagtttcattcttatttccatccttttgaagcttccacttgggtactttccccttaagttggggaaagaatatgttaaacttatatccctggattcgtttcggcggtggattatcctggtcgtagtgtgccaagttatacttagtccactcaacccctcttttaatcctgttgtaatacatcggagccttcaaatctgtattttcatctggtaacttcaccaaaccatcgaacacctcttctccctcctcaagctttgtatattgtacaaacttctcataatcttccctatcctttatagagatagattcgttttctttcgctctttctcttgtatttttgtcatcctttcctccatccctgtatctcatgtattaattattttaaaaaaataatataataatacttagagatggttattttaacaggatcttagtccgtacaataacactgatattaaagacgggtggattcctgtatttattgtctaataataaataattaaattattacttattatctttgtggtcgagatcggaggatgaattagtatgggatggatttaggactgattcgacatatttataggcctgagtcaaaattaaaattaataaaacaccttaagatacggaacccttgagagagctgtctcccaaaaattagtatcaagaactccttgttcaagccgggtttgtatttgatcctcgagaacttaaaatgaactataattataaaataccatccaattctggaattgatttttttgaaaaaatttcatcaatcttctcggccaccatttgtgaaactccactcatctcgtaatttttttctttcggatcctaaaaatattactatcagtcattcatgtaatgtgtgtaccttagcaatgactattaaatttttgaagaacgctgaaaacgcgggaatcttatcaagctcaatataagcatttaaaatctgtattgcttcagataagtcatcgtttgtgagatttttgaataaattatgagggttaaatgtctcttcaaatttgtcagtaaattcggggtctaccataagaaccagtttgtccaccagtttaggcctccctaaagtactttacacttttaaaactgtaccttgtttataacgcattagtggtttggccactgtctgctttaaatcaaattcaacaccttttgcctcccattccctgtaagcttcgtcatcgcttttgttattcggagttctagactctttatgcctggatttttcctcttcatattgttgtcgcctctgttttagttgtttcaactcatcctaaacattaataggatagtaaggacataccactttagatttcacaaccttgtcagggcttttagattttaaatcttcttctaacgtttggaacttctcgttcttttcccaaacaaacggttcggtgagttcttcgtccccaaaagggttctggtcgttggtatagccgaaatgtttgtgcagaagttccgttctggtatcttttaatctatcaaaatcctcagttctgggtcttttagaatttaattcacaggaatcttcatcatttgaggaatgagataggtttggattgtatttattctcagattttgggttggaagtatcagccatttgtaaaacgataattatacacaatttttataaaatacaaaaaacaacataaatgccgttcaaattaaaaattaagtgtatgatatatatataataattgtgattccatgttgaaaaatcggtcattgtctgtggggaatgagcaggatgtttttcctctttcctgacaaaccagtgtgaattgattcttcgaaagaaggttcttaaaccccgatgatgaattcagttatcttacatcttatgatgataagttgaaagccaaaaataaccttgttaccaaacttggccctgaggggtaatactgctaaaactgaactaaattaattctaaacaactattttataccaatcaagtaaaaatataacaaaaataattattatattacaaaaaattttaactatattctggaaattgtcctagtataagctctccatgatcttctctttttaggatgagtcgttaggttgttttccgttgaatgtttgattaagctgtaataaacaacaccaaaaacagcccaaaatgtgatgctcatgtaagattccaattcgttcagcctgaatttggtcggaataatgaaaaaggtaaatggacctaaaataacatttaataacttcaaaattaccaagaggatttggagttttccttaaaccagagtaaacctgtgtacagaatccggcagcaggtagtgatgaaacgaagcaaattagttttttcatgattgttctaaagaattatttagtctagggaacatacgctccggaatcaatttcctccaattccattggttctccagcaacataagttggaagtctaatgaaaagagtgcaagtgaggagaattaggcaaaataagtaagtaagcctcaaaaaaatgaaactatttgaccggaaaactgaaaagatattaaaacgtatatcataccatagttgaccaggattccagaaattccagtaaacgaaggactgacgtattcaagtggaacgacagcatgaacgtcgtagaccattttagaaaatacctgagaattaaatttatactaaaacaaaccatgcaaactgaaagaacaccaatttgtctcctctttatattatctagaaaggttagtaggatgaatactataaggtcccctacaaagcttactaaggctgccatccaaagaggaactaggtcatgacaaagtccaataacaattgaacataggacgaaagagcttatagccatggtggtataggtggaaagagggctgaaaatggtaaaatagcccaaaacaatagcatataatgcggaaacaccaaggcttacaaagttccaagtcttgtcgtaaggctaaagagggttgaaaaagaaactaattacctcttttggtatctgattaagtccttcaacatgttctacaacattgaatacaaattggtaacttacccttgtcaacattttcaagtaagttcgtaattggttttgataatttggagacagatttcttggaaattaaatctttgagaaattttccagattcagaattggctaaaataaagattaaaatgtatttgtcttaccaaatttatccatatagctcctaaactgaatatctattgggttttctggctctaagtcgcatctttcctcagatttactctccgtgacctttacagtctctcttttcccagtttcattagactgtaaaatatcctgcgatgaatggttggtgagtttagcaaaagcgcccttgaaaagaagtaaaaaaattaagaacctgactgcttccattgtataatagtagattgataagtaaaaatgtgtaaaaaaatttaaactgccatttaaaaaacataaaataatagtgcaattagtgagaccaattttggtaataaataatgtgtaaccttaatgtgtaaaaaatgtcttgggtgtgcataccaatgtcattatccaatcatcaattcataaaatagattttcatgatttaaaaattaattataattatatttaattttaattattaagatttattcaaagtttatggaatgttcaatttgtggaatgattttatagaatttttatgttttatttaattttttgaggctatggccaaaaattctctggattccgaacaaaacaacacttttaaatcgcatactgacagtattgactattcatattctgattacaggatctatgagattgtttcatcagagtatactagggatgtggagctaatggaactggaagctgcggaaattgatagaaaaaacacaaataaaacacttgaaatcacatcttctatgagaaaaaaatcttcaatttcaagtatggcccatttgagaatgtgtaaaatagtaaatagtgacagaatacttatattattcggagacagaagagatgaagctgaagaagttttcaaagactgtaacatacaggtgtataattaccatagagttaaagtgcccaaatatgctccttataccagggaacaatataataaatggaaaatacactggccactcaagttcataaaaccttccttccaaccattagaaatctcgtaaaccttaaacatattttaaaattttatttattttataaataattcacaggaatgtactgaatgaaaaaatgctcaaaatactttttagagcattgaaaggtaagcgattggaaattttcatatagatcctattaattaagtattttacccaattttaatgattaaaaataatatttgttagaatctaaagaaagaggatccaagtgtgtgtgtattatcactttcaaagataaagtcatatctacagcatttgacgaaagggatgtaaatatactgaaacatgcctcaattctggcagttaataaaatagcagaagctaagaaaaaaagagaaacacaaaaaataaaggactatccggattacttgtgcacaggctgtgaagtttacttgagccatgaaccttgttgtatgtgtggaatggcacttttgcattccagaatctcaaaagtgatatatggaatcaaaaatcataaattagggtgttttggctcagtctggaatcttcataatatgattgaactaaaccaccgtttcagagcatttactgttacacccaatatatcattaaataatcctatttcacttttttgtacattttcaacatatttgtaatttttatatttattaatttatgaatttacacccattttaaacttggttgttagcaaatttcagtgtaatttacttttacacatagtctcaagaaatgagcaggatttttacattcacaccctatcatgcctcgatataacttaatacctaaattgagtatttttggagcactaagacgtatgcatatttcctattcaaaccgaagattaaacacagcagatatcgccaggttttacttcagataaattcacataatatctcgcataatttaatacaaagcagtgactgtttattttaggagacttgtgatttatgctactggaaaggaactcaaattgaaatacccattgttggatgttacatgggagattttggattacgatagtccagccaatttacaagttgaatatctggacgggaccactgaaaggtttgtgatctaaaataagtaatttttaacggatttgtagatttttaatcgagggatacagcaaatctgaacaagaaaagattatcaacaactggcaatttgagtctgatttagttccctatccagagactttagcgcctaaatttgaaaaatcataaaaactttttgtcaaactatttggaattgttcatatcaaatgttaagatatttgtttacataatgttgactcgaattagtatttctgtatttttaaagcgttaaaatatttaataaattcgatgggtgtgttaaatttattttcaaagaaaccgagtttggagcctgaggtcatagaactcgctcctccaagggaggatagtgccttaagtagcattgaagaacagccccgtggagaaagtgtagaagataatgttacagagagtgtacctgaggaccaaaatgaaggtgtgttcgacacacatatcgcagtgttgtacgataagtatttaaattttaaagagaaagtctctaataaaattagagataagataatggatttcatgcagcatgatctccagaacgcagcaaataacgacgatcttgatgaggagggaggtcttacaccaagagaacccgaccctacatatgacggactaatattcattcttaccataatactcggtttcgtaatgaggctgccactaatgtggatattggggtcacttctattcctaatatatggaaatttcaaaaggaaaatactaaaggtaccacgataaaactatgatttatttaactatcaccaaaaaactattctatttaactacacaattattcacctttctagacaattatttaataactaaactttatatttaatgatttaataatgtttcagtggggaataattaatatcgtcttgtccattctgagcatcgcttacgcagtaaaaatgtgggatttcgtcgaccctcagtaagaaaccttgatttacatgataaataatcctataactgatttgtgtttagagtgtttaatgttgttcgagccaggcgatcaattttacttagcaaagtcagacatatcaaaggcgttccaggaatattaaactacgaaggtaaagaagcgttgataattacaattcatggagacccaaattttaactggacaatagtacacaacgattcagaacataagtataatgaatatatttttaaactaattattgctttagcatgaaaaatggttccttttctgatgatttgctagtaaatagcaaattgattcctgatggcactgatatgatcaggtaactttatatttcatttgatatccatagttgttagtttcactagatatatataatttttaacttcaccagatagaaattgtcgtccactaaattcccacccattaaccatacataggttaagtcatgaaattgagttgaaggggttgttgcaaatgtcagttaagttcagtactaacaacccaacaccccatgatcacatcaaaaaacctaattctcatcattatccactgcaccataagcctagaagtaaaccatatgatctctcgtttgagtgtcatccggtggaggaggataaccccaacgttgatgcccatgatagatcgtcaggctatgacgacgaagatagtccagatgaacatgaatattcacttgttaagcgagttgggaaaaaatatctaaaccggaaaagaaagaggaatattcatataaactatgacgacgacgattattccggcgttaatatcgcatacgtaaataaccaagctgggccccaaggaatagctaacaaggatgaaacaaatcaaactcctgttgaacataaggaacacaaacccaaagatcataagagatatataggggtagacgcagtcgataatgacgcccttgttactagaatgttctacgtacccaagctttccaaatgttccctgataaatgttccaaaaaaaggaaccgacgttgtttctgttttcattaaaagactacagtaatctgttgaaactgtgtatattattagcctagtcgagggtaatttctttataattaagagttatttgtttataatttacaactattaattattaatttacatttgtttgtacaaactttatatattatggtataaaatatttaaagggaaagagtgatagtgtataaatatcgtatagataaagtttaaaagattaggaattgactttgtcgaactggatacataaatcagcagaggattgaatgtcgataaaattcttgaaggatttttggagaagaatgtgctccaaagtgaggcagttgtagctgggttgatttaagaattttaaatttttaaaagtccagccctggtttttgaaaattccaacgagtttcatgcaagcctcacgctcctcagaaccgtcaccgattgaaatcaaggaaaatgagtcgccagttttgagttggcgaatgaactgctcctcaatgagatcaataaagatgaagtatttccagtgcttttgagcaagcatggagttaccaaacctatccctagctgaaattatccttattttgtgcttaattaagaattctccaactctaggcagatatctgtcgacgctttgagatacccactcggagctggcatttgtgacgattacgatggttccgatatttaacgcagtgttcagattatccaaaactgcatcgctgagtttctctagaccctgaagcgcctcttcagtaagtcttgtggtgaatctaggtttttgtagtagtgttagagagtacgtgggtagtattgtgtcatcataatcaaaaatgatcaacttcgaacttcgctcactctttaactcatcctcatcttttttaagaagcttagtctcggtgctgtcgtcagatttgttagtccttttataaccttctgaattattcccggaactgtcagggtcagtttgtacctcgtcgtttctgtgcttaatggatacctgagtcatacaactagatatagaatcgttggatccaagtttatttttctcatcttcagccgaataacgctcaactgaacctgaattgctcccagaataaatattattttccagcaagttggttttgtagccttcctggttgattttatccgcatttgctaacaacttgcagattttgcgatccttgaataaactcatgataaacaaactatattacacttaatttgttaaatttcgcttcgagaaacatccattatttactttaatgggctggttctaggtatttacacattaaggtgcaaaagccaaattataatttaaattagagtaaaaccacttgatttaatttttgttttactgatggatgcctttgcggactgaaataaacctgaatttggatattttaaacctctcggatcccgccggcagattaagaggtttaattcgtataatactggattcttcctacggagctgtttttacagagtttttacaaatttttatttactataaaaagatgtaattaaaggcagaatcgtcagaaactatgcacatccatgcatattactgcaacatccgcctcgcctaaagagtggctggcaaaacttaaactaagtcataaaataaatataaatgctgaaaaattaaaaatattatacattaagcaacgtcgtctctcaagacgtttggtacgacttgtccactgagatttacatctccaggcaattcctgagtctggcctcgcgagtttgcctcctggttaccttcaccgtggtacgccgggtggttttgagttccctctgggtgatacaggtggtggtcgagagcgttgtacggctccctttcaaatcttgcaacatctggaaggttgagtgggttgttcctcggattcgccaggttaacgtttagattcgactgaatctctacgagtctgttaggttcgatgtgagactggagcagttgtgacattatgagcatggctgatgacggaactctgcgtgaaagctcgtgaggcgaccctacttcaactttgcactgaccaaccttgaatacaaatcctggagacactgggagtggctcttggaacggctttagcttgagaaaagtgccaagagtgctcatgtctctaagcaaccatctacttcctgaaggcctgcttccatcatagtatatcagacagtgttccctcgatatgtagccgttctgtgtcgttattgacaactttttataggaagactgagtcacaggtccgcgccctagaatcactcctttggggcaaatccacatatctctctcaacttgtaaatctgcaaatatcttaatcttcaagtaactatccaaatcttgcaaatttgaacccatttcctggaaattaggctccatatgacccaaattagggttcaaatgactaaagttaggatccatgtcaacctcgatatctgagttttcacctcctttcgccggcatgtggtctttgttctcgttctgatccccgttctgttgagaactcaaatactcagcgtaattaataacctggtttgtgtttgcgtcccacttgtagtctttgaaaggggttcctatcgagtccttgtaaatgtacacgtcgacttcgtgcttatctccaatgtggatcctgtctccagactgtaacacgtggactccctggatcttaatcatcgttccaattgtgcttccgacatccaaaattccaaaacgtccatcagggcactgggcaaaaataaggtgagagagcgaaactgagctgtgtgggaagtgcaaaagtgatttaacgtgtctccctgcatcccagggtagtttgtaaggtatatccaaggcgctgaatactgttccttcgatcttgtggttcatgtcgtggtacaccttcagggttagtgggtagatgttgtcacttctgaaacaaagttgggggtttgatatcaggtaatcctcgacccagtggtgtagccttacgttgttcgagtcgttgattgcagaaacgtccactggtgttgtctcagtctgttcgctcgtggggctgacaagctgtaggcctattaaattccttattagtctgaagtcctctattgtgaaaacccacttcgacttgtaccatttgtttcctgtgttgaagtaatcgatcagacaggagcataaatcgtcgaaaaacactggtgcctgggtcattccgccgaacatgatgcgtatgaaaagcggcactgacacgaatggtttcaggcagtgttcatcccaccaaatcttctccgcagcttgggatatatctggcaccgttgaaagagttgtgcggcctcttttcctgagcttcaggctcttaaccagatttgacaatattgtgtttatgttcaaactccttcccactggttgtcggcacagtggacacatcttcccggtcaactttgagtgtcctatgcaatatctgcagaaagtgtgtccgcacgccaccgtgactgggaagtagaaatattccaggcaaattgggcatatgaggtctcgcaatatgctactcatgaccccttcgtcgaattttttctcagaattctcaatcaggacattgatgctgttgtttctcaccaaatcgttctttgcgtcgttgctcaagtcatctattatgaccatgtcctccatgttgttgtgtgggaaattactcacggtgtgcgtgttcgacaactgatcttgtgattgcgtgaggttgtccaaattattaatgaacacgttatttgagtcgtaattatttgtttccaggttcgtgttttcgtgtgtgtagttagaatccatgacgtaatctattccgttattgagcatgtaatctacgttgtcgacgtatctcatgtctccgtcgtaatctatatactcatctccgttctgctcctcgacactcggtgtgtattggtataaatatggactgctgtactggtcaactccatttacgtttacgtcttctcctaaattgttctctgtgttgataaaatttgctgagtttgacaggagttggcttgcggtgtttgtgtcgtagtgcatattttgcaaaagatcgtagggctgcgatgagtttgtgttttggcctcctaaatcctggtcgtttgttgtgttcagatccatttcattcacgacgtctagagctataaaaatgttagttagttaaatagctaaatatggtaaaaacgaacatgtattggtgtatatttgtgaatagttgattccttccaattctgggattccagaatctgacgagtcgcgatcatttatcgttgtgtctccgtttgagttggaattgttcgatatattatttgcacgtgccgagccatcattaagctcgtctgcttgaaatgatgataaaggtgatagacgatccattacatccatactatcctctttcttttcagctgatccataaaactcggttttcgtgggagtgtaaccgaccgatttgttgtttgattctaccaagattggggagacgaaaacttctcgtgacaatgatttaagtttgctaggtttgcgagttgtgattttgttttggctcttgttggactttctaatggttttgtttgaaatttgtttctttttggaaggtctcaaactggagtttaaatcagaattcaaagaagtacgacaatcacctttgaatgatgaagtactgtatttatataaatcaggcggtgtattgttggaaatattgttttctttggcatcaaggttgaataaattagtctccatttgaagccaaaaaagctataacataatacgaatataaaaaatcaacggccatattaataaacataaagaaacatccgatatcacagatggtatcaaaaaatttaataatgtcgtgtgtttaaaatattaaaaaaataaaaatatggccatttacagataaatttataaaatatgcacttgaaccaaggtaaaggtccccaacaatatattatgtgcagaacaaaagtaagtacaaaacaattttatcgtttaaaatcatttaaaatcttgataaatcttttttatattaatgttagattatttatgcacccttttttattttggttatgcttatgattacaaataattaaacaacggccatctgtaccccttctatattcttttgttccccttattcattttgacaatccacatcctactcatattgttgatatatttaatattattttctgacatgctatcacttgtgtgctttgcgctctttaattattgagtctatctagtgagacaatgttacacccatcagatatttagattcatgactactatcgccacctttaagatataaaattaatcatggaaaatttctaagtaaaataagatttttaaatcaagagatggtgaatatatataagtttgtaaataggttgcgtgtaataaaataaaagttgagtattttggtttcaaaaacaatggctaaaattggtctttccattatttagatttgtagatctcacttcattgtaatatttatgtcttaatcagaaatctcaggtattgtgtgatctgataaacaccattataatgggttatgaaaaatgtatattttagataacttgaactaaattatgtttaatatcgtttgtgtgtattttatagcataactagggaatgtgtgtgattatgtgcaaattaacttctgcctaaatctgatatctccatgtgttgtattctactccatctcattgtatcgataccatacattttgagtctaagttcatataattcgattttggagaattgagaaatgattcctttcaaatatgtaataaattataaaaaactgcagttacaacatacactcaaggattccctatactcagattgtacaataattcaaacacagatattatatattacactaactataaaataacaaatattattagtgtgtaattattattattatattcttagtcggaacaactgatattgtggtgtgttcaaattatcaagtgtagatttgttccttactataaatttattcgtatttatgtctccaacaatcatcaccctgtgttttctaaaaggttcctgtggtatgttaccaaattgaaaacttgttgtttgataaactcgcccaaacacatatttattcaatatggattctccgaaatcattagtttcattgattgaaaaatgatatattgtcaattctttgtttgatatttccttcttctcaaataaagatggttgttcttcatctactgtaacatctagttttatcggaagccattcttctatatttttaaatatttttttgtaaccacttgtatttaagtttttgtatttttcttttccactttttttattcaataattttgtttctttgattatcatattttctaattttacatcataacgattacacacatatatttcttcattattcacgtacacctctaaattataattaatatatttctttctttgaatataaatgtttcttctttcgattgtgggatcaataaccattcggattttataatgattttggtactcattcttcaacctatataatatataagtccaattattagccatcgatcctgttattttttctattccaaaaatttcaggactagaaatccctgatatgtctaatgtaatcaagggcattcctttatcatgagtatatgatttgtataactttattgcattcaaatttagttcatttgatatcatttcatccgtataatattttaaaaaccagtgttttttacctaatataggccttaattcatacctttgttcatttacatcgtgtagaataatcgtggtatatttataaaatagttgaaataaacagttaaatctaaaatttttggaaatttctatcatcacacacttttcaatcaaatatggacgttttgtataacctacaacaacaggatgatccaaatcataaacatatccaaatttatatcgtgggcttgattttccatcaaatttaaaagcatggtatttattaacaatgtagtactttttcacacaagatttatcatgttcagaaataaacctggttataaatggatgtttgggtcttggtcctatatcaattgatactaaaattggtttatcgatattgaacataaattcttcattacttatataactgtatgtatcggaatataattttatgacttttctttttacttctttcaataatcctttatgaaatgtgtggacataaaatgataccagcttaatgttattttttatgaacatttcaacaaataggttataattatttgaacctgtatcatttggaaatatcaattcatttccgaatcttaattgagtaattggttccaaatcaccaacaaacataaaatatttgtcatctgtgccaaatctcccatgaaacacattaactccacgagatatattataattcttgacatcgacataattaattccgaagacacattcaatcaatcctattatcagaattgtaatataaatcagtctataaaacattttttaacatttatataacaataaaaataacaaaataaaatatcaaaaatgtaaaatataaaacattaactataatgttaaatcaaatattatactaaatattatattataaaatagtaaaataagaattataataaatttaatatatgggaacacacaaattaggtcagatatcgtaatatattaattaataatccatcgcattatcgattttatagtagaaagtaagtaaaatatcaaacgtatgtagatccgagtagtagttcaaaaaatgatattggaacaaataatctacattagaaaggtgtgatgaagtatcacagactttgaatcagggaatgatagcctggtgacaatggtgacaaaatgtaaaggatattgggaatggagaaaagcgaaatggtaggaatgttgtggaagatggaatgggcatatttttgaaatgtagaaataacatttttatgtgttgtaaaattaatggtagaattgtagaataatccaaacagtgttgtgaagatttaaattttcaaaattaaaatgataaaatggtaaaaattaagaaatattgagatatagaagatttcgtggtaatatcacaaatattaagaattttccattattcaaatattatcattgtatattacactaactataaaataacaaatattattagtgtgtaattattattattatattcttagtcggaacaactgatattgtggtgtgttcaaattatcaagtgtagatttgttccttactataaatttattcgtatttatgtctccaacaatcatcaccctgtgttttctaaaaggttcctgtggtatgttacctatttgaaaattttctgtttgataaactcgcccaaacatatatttattcaatatggattctccgaaatcattagtttcattgattgaaaaatgatgtattgtcaattctttgtttgatatttccttcttctcaaataaagatggttgttcttcatctattgtaacatctagttttatcggatggcattcttctatatttttaaatatttgtttatattcattcctttttacttttttgtacttttcttcatttgttttgttgaatattttccattcttttatcatcgaattatttatttctccaccatcatattccactatcattgttgtttcttcattatttttgtatacttcaatattaaaaattttgtattcatttctttgaatataaatggttctatggtaaatttctgaatcgataatcagtttgattctgtaatcactttcacattttcttacatgagtatacaatgtgtacttccagctattggtcgatcctgtaacattttctatcccaaagatctcataactaacaagctccgatatatctaatgtaatcaatggaattccttttttatgttttttatatattctgtaaaattttattggatcagcatacactggatctgataagatttcaaccgtatggtttgttaaaaaccaatattctttacctaatataggcctcaattcatatttttgtacattatcaacgtatagttcaatcatggaaggtttattcctaaattgcgatatgttattgtgactaaaatacctatctctaatcccaatattataacattcgtgaaatatatatggaagttttgtataacctacaacaacaggatgtcccgaatcataaacatatccaaatttatatcgtgggcttgatattccatcaaatctaaaagcatggtattcatatataaatttgtatttaaaatctgccatattgtaaatagaaaaataatttttgtttacaaatggatgttttggttttggtcctatatcaactgatactagaattggtttattgatcttgtacataaattcttcattacttatataactgtatgtgtcataagatatgctgatgacttttctttttacttccttcaataatccattatgaaatgtgtggacataaaatgataccagctttaagttaaattgtaaaaacatttcaacaaataggttataattatttgaacctgtatcatttggaaatatcaattcatttccgaatcttaattgagtaatgggttccaaatcaccaacaaacataaaatatttaccaaatttattaaatctcccatgaaacacattaactccacgagatatattataattcttgacatcgacataattaattccgaagacacattcaatcaatcctattatcagaattgtaatataaatcagtctataaaacattttttaacatttatataacatattgataaaaataacaaaataaaatatcaataattttaagataaattacggtacatctgataatgagaagaatagattattatatagttatataattaatattcataataataaaacaatgaaaattataataaatttaataaatgggaaaacgacttatgtcagatattgtaagatattaattggtaatacattggagatatgcttgatagttgaaagtcagtaaaatgacaaacatttgatatagatccgacttaaatatatgtgtttcaaaaacaatggctaaaattggtctttccattatttagatttgtagatctcacttcattgtaatatttatgtcttaatcagaaatctcaggtattgtgtgatctgataaacaccattataatgggttatgaaaaatgtatattttagataacttgaactaaattatgtttaatatcgtttgtgtgtattttatagcataactagggaatgtgtgtgattatgtgcaaattaacttctgcctaaatctgatatctccatgtgttgtattctactccatctcattgtatcgataccatacattttgagtctaagttcatataattcgattttggaaaattgagaaatgattccattgcaaaatatgtaataaattataaaaaactgcagttacaacatacactcaaggattccctatactaacatgttagaataatttaattttttattttttccttccatatttttttgttaatttatgcattcgtatatttcataacgctctctacgaatatcttctatttcatacttttttattatgatctctttgttatttgcattttccattattatgctctttttttccctgtatggttcacactcaatgtttccaatttcatatttgtataatccataaatattccccaatgtatatttttgcgaattgtcttctccgaactcgttcgtctctttgattgaaaagtagttaaaggtctcttcctcatccgacaattctctcttttcgtacaacgacgttggctcttcttcaactgtaacatctatttttattggatatatttgcttaaattcatttattgctatttctgattcttgttcgcttagttttgtatattcttgatcaccacttgatttttggaatacttcccattctaatttcaagctaatattctccttcacgtatgaaaatataaataacattgttttctgattatttttcaacacttcgacgtaaacatgttcaacattttcttttggtgtgtaaatcttttgaacactcactgatgtttcaaaaactgatttgatagtttgaaatccttgatatttttttttaactttatataatgtgtaactccattcgcccgcccatcctttgaccttttctattccatataggtcaggatcgacattttctgatatgtccaatactatcggcaaaactccaggagcgttgtggatcacgtcataagcataaatagctgactgaattcgtatatcatgaacaggatctgtggattttttagtcaaaaaccagtacttagcttctaaaaatttgcttatgctaaactcgagcctgagtccactatcgagttgaacgattttttgccagttcctgtaatatatttatttaaacaacataattacctgttaaaaattgcaatttttacacacgatggcgcaaatactcctattttggaataacatattgcagctggaatttttgaatcgtataccgatcctatggcatatttaggtgcttcaatcccattaaatttaacattataaaaactgtcacttatagaataaagctttatttcgttcccatttagcatttgtgtagtaacttttaagaaggggtggcaattatttgctgaaacatcgaatgataaaaaaatatccgtctgaatatgagaaagtaattggccaattgttatagaactgtatgttagtggattaatcctaaatataaatctttggtatgtgaatgaggaatctgaattagaagtgaatatatgaattataacaaatcttttgttgtcttctaaaaacaactcgattgccaatttatggtattctacatttttttcgaactcggcaatatcaaaatgagggaaaagaaaatcagatccgaatttgacaacttttataccattaggttcatgaataatcattttataaatcccagatgcgttgaatctcccatgaaatacgtgagaacctggtggaattttaaaattaaaaatgtcaacactggtgtaaccaaacgcacattcaatcaatgatagtatgagaattgtaattattgatgtcatgatgatagaactaatctatctgggtgataaatgtattttgatcctttaatatacaattaatacactagtcacatcagatcatcatataaacggattattagtaaatcaatctaaatccacaatgttaatataaaattattaaatgatgaaatctgataaatctgtagtgagaatgttataggtaacaaaataacatatcaataatttaaaataaattacataacatctgataatatatgaagtaatagattataatatagttatataacgaatgataataaatagtgacaagataaataaatagaaaggaacgtagaatatgggaacacacaaattaggtcagatatcgtaatatattaattaataatccatcgcattatcgattttatagtagaaagtaagtaaaatatcaaacgtatgtagatccgagtagtagttcaaaaaatgatattggaacaaataatctacattagaaaggtgtgatgaagtatcacagactttgaatcagggaatgatagcctggtgacaatggtgacaaaatgtaaaggatattgggaatggagaaaagcgaaatggtaggaatgttgtggaagatggaatgggcatatttttgaaatgtagaaataacatttttatgtgttgtaaagttaatggtagaattgtggaataatccaaacagtgttgtgaagatttaaattttcaaaatcaaaatgataaaatggtaaaaattaagaaatattgagatatagaagatttcgtggtaatatcacaaatattaagaattttccattattcaaatattatcattgtatattacactaactataaaataacaaatattattagtgtgtaattattattattatattcttagtcggaacaactgatattgtggtgtgttcaaattatcaagtgtagatttgttccttactataaatttattcgtatttatgtctccaacaatcatcaccctgtgttttctaaaaggttcctgtggtatgttacctaattcaaaactagtcgttctaaaaactcgcccaaacacatatttattcaatatggattctccgaaatcattagtttcattgattgaaaaatgatgtattgtcaattctttgtttgatatttccttcttcttgaataaagatggttgttcttcatctactgtaacatctagttttatcggatggcactttttcatcattttaactgtatttttatgttctttattttttatttttttgaatttgttctgcttatcttttttggtgtatattttcaatttttttatcattgaatcctccgtcttcggtctataataatcaaatatgtatttttgttcattattttcgtatacttcaatatcataactagtattaccatgtctttgaaaaaaaactaccctgtttctattatcaattcttgaatcaataaccattcttattatacaatcactttcgtattctttcttcaacttgtataatttataagtccaattattagccatcgatcctgtaactttttctaatccaaatattttaggagtaacaagctcagatatgtccaatgtaacaagtggaattccagcatgatttacatatattttgtaaaattttattgaattcctataagcttgatttaataatagttcgtcattgtattgttttaaaaaccaatatttgatacctaatattgatcttaattcatatttatatttattgcttattctaaactcagtcatgaaaggttcagaaattaattgagttggatggttataagtaaaaattcgttttcgaagataaaatgtttcacattcgtcaattatgtacggatactttgtataacctacaacaacaggatgtcccgaatcataaacatatccaaaactatatcttggacctgatttaccatctaatgtaaaatctttgtaataaccataaatatagtatgtttcgacacaagaattatcatgttcagaaatcatcctgtttataaatggatgttttggtcttggtcctatatcaattgatactaaaattggtttatcgatattgaacataaattcttcattacctatataactgtatgtgtcacaagatatgctgatgacctttctttttacttctttcaataatcctttatgaaatgtgtggacataaaatgataccagcttaatgttattttttatgaacatttcaacaaataggttataattatttgaacctgtatcatttggaaatatcaattcatttccgaatcttaattgagtaatgggttccaaatcaccaacaaacataaaatatttgcaatctttgtcaaatctcccatgaaacacattaactccaagagatatattataattcttgacatcaacataattaattccaaacacacattcaatcaattctattatcagaattgtaattattgatgtcatgatgatagaactgatctatctgggtgataaatgtctttaatgattctctaatattcaattataacacagttacatcatatcatcatattaatgaatcattatgaatccattaacatacgatcaatgaagaagcctataaaacattttttaacatttatgtaataatttaataaattaaacaaaataaaatatttaaaatattaaaaataaaatacagtaaatataataatatgagatgactagattatatatagttatataattaatattcataataataaaacaatgaaaattataataaatttaataaatgggaacacacgaattatgtcagatattgtaagatattaattggtaatacattggagatatgcttgatagttgaaagtcagtaaaatgacaaacatttgatatagatccgacttaaatatatgtgtttcaaaaacaatggctaaaattggtctttccattatttagatttgtagatctcacttcattgtaatatttatgtcttaatcagaaatctcaggtattgtgtgatctgataaacaccattataatgggttatgaaaaatgtatattttagataacttgaactaaattatgtttaatatcgtttgtgtgtattttatagcataactagggaatgtgtgtgattatgtgcaaattaacttctgcctaaatctgatatctccatgtgttgtattctactccatctcattgtatcgataccatacattttgagtctaagttcatataattcgattttggaaaattgagaaatgattccattgcaaaatatgtaataaattataaaaaactgcagttacaacatacactcaaggattccctatactcagattgtacaacaaatcaaacacagatattatatattacactaactataaaataacaaatatgatgagtgtgtaattatgattattatattcttagtcggaacaactgatattgtggtgtgctcaaattatcaagtgtagatttgttccttactataaatttattcgtatttatgtctccaacaatcatcaccctgtgttttctaaaaggttcctgtggtatgttacctaattcaaaactagtcgttctaaaaactcgcccaaacacatatttattcaatatggattctccgaaatcattagtttcattgattgaaaaatgatgtattgtcaattctttgtttgatatttccttcttctcaaataaagatggttgttcttcatctactgtaacatctagttttatcggataccactttttcatcattttaactgtttttggataatcattaatatgtatttcatcgtatttttcttcatttgtttttttgaatattttcaaatctttagaaactatttcttcataatattcattaaaactattatacacatatgttttttcactatttctatacacttctacattgtatttataatatttctttttttgaataaaaatgtttcttattttgattgtgggatcaatgaccgttcttattttacaatatttttcaaattctttcttcaacttgtataatttataagtccaattattagccatcgatcctgtaactttttcaattccaaatatttcgggactagcaagctctgatatgtccaatgttaccaatggtattccaccatgcttcgaatattttttgtatagatttattgcactacaaattactgcatctgattttatttcatcactgtaatttcttaaaaaccaatattctttacctaatataggcctcaattcatatttttgttgatttttatcatatagttgaacccaagaactctcataatttggattagatcgattttcataattaaagtacgttttataaattttgatgacagaacattcttcaattaaatatggatacattgtgtaacctacaagagcaggatgatccgaatcgtaaacatatccaaacctatatcttggacctgatttaccatctaatgtaaaacctttgtaaacacaagtaaatccgaatatttgtacgaaagaggtaggatattcagaaatcaacctgtttataaatggatgttttggttttggtcctatatcaactgaaactaaaattggtttatcgatattgtacataaattcttcattacctatataactgtatgtgtcataagatatgctgatgacctttctttttacttctttcaataatcctttatgaaatgtgtggacataaaatgataccagcttaatgttattttttatgaacatttcaacaaataggttataattttttgaacctgtatcacttggaaatatcaattcatttccgaatcttaattgagtaatgggttccaaatcaccaacaaacataaaatatttgcaatctttgtcaaatctcccatgaaacacattaactccaagagatatattataattcttgacatcaacataattaactccgaacacacattcaatcaattctattatcagaattgtaattattgatgtcatgatgatagaactaatctatctgggtgataaatgtcttcaatgattctctaatattcaattataacacagttacatcatatcatcatattaatgaatcattatgaatccattaacatacgatcaatgaagaagcctataaaacattttttaacatttgtataacatattgataaaagtaacaaaataaaatatcaataattttaaaatatataacattaactataattataaataaagtattatagtgaatattaaactaatattcataataataaaacaatgaaaattataataaatttaataaatgggaacacacgaattatgtcagatattgtaagatattaattggtaatacattggagatatgcttgatagttgaaagtcagtaaaatgacaaacatttgatatagatccgacttaaatatatgtgtttcaaaaacaatggctaaaattggtctttccattatttagatttgtagatctcacttcattgtaatatttatgtcttaatcagaaatctcaggtattgtgtgatctgataaacaccattataatgggttatgaaaaatgtatattttagataacttgaactaaattatgtttaatatcgtttgtgtgtattttatagcataactagggaatgtgtgtgattatgtgcaaattaacttctgcctaaatctgatatctccatgtgttgtattctactccatctcattgtatcgataccatacattttgagtctaagttcatataattcgatttttggaaaattgagaaatgattccattgcaaaatatgtaataaattataaaaaactgcagttacaacatacacccaacgattcctttttatttgttacgtttaataattcaaaaaattttaattctcatagaataataacttatatttttagtaataaacatatattgaacaaagaacgatatatcacgtattttttctactattcaccattttttagctctacatctccactgggattttcccctagttgtccaatttctgattcaaatcaatctaacaggacggatgaaatcattcagaaattgaaggaagaagtacctaatgctactatatttgatatatgggatcacttttcgtattccggtgggtttaaatgtagtaaaatgtttacaggtcacatacggaagggggttttgagtggaaaacagtatccttccaagaatattaagagaccgaattatttcaagaccggaaaaccaacctatgtagactacccgtactgcaatagagagtaattaccatattatttcttattttttacagcgccaaagatattcgaggtacaattaaaaatgatgaagatatagctggaattaaaaatgcatgtagaatagctagagaaatactggattacgtatcatccatagttgttgagggcattttcacagacgatatcgatcgttttgtacacaaactttgcgcaattaagaaagttttcccggcgacactcaattaccacggtttcccaaaatcagtatgcacatctatcaacgaagtagcatgtcatgggatacccgacaacaacctgttgtgtgcgggggatcttttgaaggtggacctaactgtatattcagatggatactttggggacgtgtgtgagacttacatggttatgcccatgactaaagaatataacaagaaattgttgaaacgtaattatatgggtcggtctgagagaaataagttaatttataatactgttagacacaataatctacaagggtgtgaaaagtctataattaaccagacttccttcatcaaaagttttagcaatgcaattaagaagtacgattttgacattaatagttttaagctcttatatttaatctttaagggtgacgacaaaaggttcaacctttctcaggacgaaaacatgtccgaacttgctaaaaaattacatgaagagttcaaaattgtttatgaaaaccctgaaaagacttataatggtcgtgtttttggtattacagcttcagaattaccaacttatacacctcatcctaaattcggtaaagccttcaccactgttgaaaatccccaaatcgttgtggatcttctcgatcaaaatgacgaactcagatttaaaaagccttacaccttttcttactctttcgatagggatctcgagcttatgaaaatttgtcacgaggctctcatgaaggccatatccatttgcaaacccggaactaagtaaatcatttatacagaattatgttgattggaatccagataacacgttttatactaaacaatgcttattaaattattttgtaggatcaaaatgataggtaaaacaattgaaaaatacctaaagagtaacgaatgtatttctttatccaatctgtgtggtcacgggataggtagaaactttcatgaaaatccaattgtaagaaattaaaatttttaaaaatttcaggtttcacatgaagaaaacgatagtgatgtaattatggagcctgggatggttttcactattgaaccaatcgtaactaggtccgatcttaactctttcatgatgtggcctgacggatggactataaccactttggacggttcaaagtattattagctaaaattcgtatacatgttcatattcacaaacagttatacggaattaataaatcataaatgtaggacagcccaattcgagcatacaatattgatcactcgggatggccatgaagttttgacaagaaagatcccctcatcaccttcttttttgtgggaaagggaattggaagtactatactgataaatttggtcgaataaaaaaagaagattataaatgaattcgcaattaatggtaatgtaaaataggataagagtaatgtgttaattttaattaatagtaaaaaaatacactaactataaaataacaaatattattagtgtgtaattattattattatattcttagtcggaacaactgatattgtggtgtgctcaaatcatcaagtgtagatttgttccttactataaatttattcgtatttatgtctccaacaatcatcaccctatgttttctaaaaggttcctgtggtatgttacctaattcaaaactagtcgttctaaaaactcgcccaaacacatatttattcaatatggattctccgaaatcattagtttcattgattgaaaaatgatgtattgtcatttctttgtttgatatttccttcttctcaaataaagatggttgttcttcatctattgtaacatctagttttatcggatgcaagtcgtctatcatttttaatatttgtttatatgcattttgaattactgaaacatattgttcttcatatgttccttttttgtatattattaattctttcataattatatctccaatttttatactataacgattaaacacgtatgtttcctcaatatttctatacacctctacattgtatttaatatatttctttttttgaataaaaatgtttcttcttctgattgtgggatcaataaccattctgattttacagttattttcaaattcttccttcaatttaaacattttatatgtgtaaatacccgttaatcctgtaactttttcaattccaaatatttcgggactagcaagctctgatatgtccaatgtaatgaatggcattactttgttatttgaataaaatttgtataatttgattgcattcaaaattgcttcatttgatatcatttcatttgtatattctattaaaaaccaacattcttcacctaaaataggcctcatttcatatttttgtacattattatcagatgtctcaattacggagatctcataaaatcttttagataatatgttaaaattaaaatgcgatgtaagagttgtaatcgaaaaacattcatcaatcaaatatggatacattgtataacccacaacagcaggatgatttgaatcatatacatatccaaaaatatatcttggacttgatattccgtcaaatataaagcctttgtagtcatttataaatttgcatgttttcaaatatgaattagaatattcagaaatcaacctggttacaaatggatgttttggttttggtcctatatcaattgatactaaaattggtttatcgatattgtacataaattcttcattacctatataactgtatgtatcggaatataatcttatgacttttctttttacttctttcaataatcctttatgaaatgtgtggacataaaatgataccagcttaatgttattttttatgaacatttcaacaaataggttataattatttgaacctgtatcatttggaaatatcaattcatttccgaatcttaattgagtaatgggttccaaatcaccaacaaacataaaatatttaccaaatttattaaatctcccataaaacacattaactccacgagatatattataattcttgacatcgacataattaactccaaacacacattcaatcaattctattatcagaattgtgatataaatcagtctataaaacattttttaacatttatgtaaattaatggatgtaacaaaataaaatatcaataattttaaaatatataacattaaatataataataagagatgactagattgttaagtaattaaataattaataataataattggatggatgaatagacaaagagaacgtaagatatatgggaaaacgacttatgtcagatattgttaaaatgttctttggtaatacattggagatatgcttgatagttgaaagtcagtaaaatgacaaacatttgatatagatccgacttaaatatatgtgtttcaaaaacaatggctaaaattggtctttccattatttagatttgtagatctcacttcattgtaatatttatgtcttaatcagaaatctcaggtattgtgtgatctgataaacaccattataatgggttatgaaaaatgtatattttagataacttgaactaaattatgtttaatatcgtttgtgtgtattttatagcataactagggaatgtgtgtgattatgtgcaaattaacttctgcctaaatctgatatctccatgtgttgtattctactccatctcattgtatcgataccatacattttgagtctaagttcatataattcgattttggagaattgagaaatgattcctttcaaatatgtaataaattataaaaaactgcagttacaacatacactcaaggattccctatactcagattgtacaacaaatcaaacacagatattatatattacactaactataaaataacaaatatgatgagtgtgtaattattattattatattcttagtcggaacaactgatattgtggtgtgctcaaattatcaagtgtcgatttgttccttactataaatttattcgtatttatgtctccaacaatcatcaccctgtgttttctaaaaggttcctgtggtatgttaccaaattgaaaacttgttgtttgataaactcgcccaaacacatatttattcaatatggattctccgaaatcattagtttccttgattgaaaaatgatatattgtcaattctttgtttgatatttccttcttctcaaataaagatggttgttcttcatctattgtaacatctagttttatcggatgcaagtcgtctatcattttaactattattccatcatcaatatatacgtaactgtatttttgttcatttgtttttttcatatacattctcaattctttcacaatcacattttctaatattagattatagcgattacacacatatgtctcttcactatttatgtaaacctctatattgtatttaatatagtggtttctttgacaataaatgttttttcttttgatttttgaatcaagtaccattttgattttataatcattttcatactttttcttcaatttatacaatttatatgtccaattattcaccgttcccgtaactttttcaattccaaatatttcgggactagcaagctctgatatgtcaagtgtaaccacaggaattcctctattatttatataacatccgtagaatttgattgcattcaaatttagttcatttgatatcatttcatccgtataatattttaaaaaccagtgttttttacctaatataggccttaattcatacctttgttcatttacatcgtgtagaataatcgtggtatatttataaaatagttgaaataaacagttaaatctaaaatttttggaaatttctatcatcacacacttttcaatcaaatatggacgttttgtataacctacaacaacaggatgatccaaatcataaacatatccaaatttatatcgtgggcttgattttccatcaaatttaaaagcatggtatttattaacaatgtagtactttttcacacaagatttatcatgttcagaaataaacctggttataaatggatgtttgggtcttggtcctatatcaattgatactaaaattggtttatcgatattgaacataaattcttcattacttatataactgtatgtatcggaatataattttatgacttttctttttacttctttcaataatcctttatgaaatgtgtggacataaaatgataccagcttaatgttattttttatgaacatttcaacaaataggttataattatttgaacctgtatcatttggaaatatcaattcatttccgaatcttaattgagtaattggttccaaatcaccaacaaacataaaatatttgtcatctgtgccaaatctcccatgaaacacattaactccacgagatatattataattcttgacatcgacataattaattccgaagacacattcaatcaatcctattatcagaattgtaatataaatcagtctataaaacattttttaacatttatataacaataaaaataacaaaataaaatatcaaaaatgtaaaatataaaacattaactataatgttaaatcaaatattatactaaatattatattataaaatagtaaaataagaattataataaatttaatatatgggaacacacaaattaggtcagatatcgtaatatattaattaataatccatcgcagtatcgatttgatagtagaaagtcgaaagtcagtaaaatatcaaacgtatgtagatccgagtagtagttcaaaaaatgatattggaacaaataatctacattagaaaggtgtgatgaagtatcacagactttgaatcagggaatgatagcctggtgacaatggtgacaaaatgtaaaggatattgggaatggagaaaagcgaaatggtaggaatgttgtggaagatggaatgggcatatttttgaaatgtagaaataacatttttatgtgttgtaaagttaatggtagaattgtggaataatccaaacagtgttgtgaagatttaaattttcaaaatcaaaatgataaaatggtaaaaattaagaaatattgagatatagaagatttcgtggtaatatcacaaatattaagaattttccattattcaaatattatcattgtatattacactaactataaaataacaaatattaagaattttccattattcaaatattatcattgtatattatattaatcaaaaaataacaaatattattagtgtgtaattattattattatattcttagtcggaacaactgatattgtggtgtgctcaaattatcaagtgtcgatttgttccttactataaatttattcgtatttatgtctccaacaatcatcaccctgtgttttctaaaaggttcctgtggtatgttaccaaattgaaaacttgttgtttgataaactcgcccaaacacatatttattcaatatggattctccgaaatcattagtttcattgattgaaaaatgatatattgtcaattctttgtttgatatttccttcttctcaaataaagatggttgttctttatctattgtaatatctagttttatcggataccattttgttatcattttcattgttaatccatgattaacagtatattcttttttgaatttttctcttccaatttttttgatgtatatttttgattcttttattatataatatgctttttcgatattaaaacttattatcacatatgtgtctccgttatccttatacacctctaagttgtaattaatatatgttgtcctttgaacatcaatggttctgtgataaatttgagaatcaataagtactttgattctgtaatcactttcacattttctttcatgagtatacaatgtgtatgagcaatattttgctaatccagttacttttttcatcccaaagatctcataactaacaagctctgatatgtctaatggaagcaatggtattccagattgatgattcatgtacgatctatacaatttgattgcatatttattcgttggatttgaaaaaaactcttcagtatattctactaaaaaccaataatttttgcctaatataggtcttaattcaaatgagtgttcatgttttactttaaactcaataacgaaaggtacagtgataaattcgggtatattattataactataatgtgagttaaaaattttaatcacaacagattcgtcagtcagatatggacgttttgtataacctacaacaacaggatgatccaaatcataaacatatccaaacatatattgtggacctgttattccatcaaatttaaatccttggtattctttaatcatttcatattcaaacataatatgaaattcgtatcctgatcgaaacctggttataaatggatgttttggttttggtcctatatcaactgaaactagaattggtttatcgatattgaacataaattcttcattacttatataactgtatgtgtcacaagatatgctgatgacctttctttttacttctttcaataatcctttatgaaatgtgtggacataaaatgataccagcttaatgttattttttatgaacatttcaacaaataggttataattatttgaacctgtatcatttggaaatatcaattcatttccgaatcttaattgagtaatgggttccaaatcaccaacaaacataaaatatttaccaaatttattaaatctcccataaaacacattaactccacgagatatattataattcttgacatcgacataattaactccaaacacacattcaatcaattctattatcagaattgtgatataaatcagtctataaaacattttttaacatttgtataacatattgttaaaaataacaaaataaaatatcaataattttaaaatatataacattaactacaaagttaaatcaagtagtatattgaatattcaattaatattcatgataatagaactataacagttataataaaattcatatatgggaacacacaacttatgtcagatattgttaaaatgttttttattattcagttacatatcgattcgatagttgtatagttataaatttgtaaaatgagttattataatatatgttggtcatacttcaccgatatttgacttatttttaatttgacaagatatcattagtatcatacaacataaataagaaatgacttttttcaacaattcttttttacgtcaaacgtttcttgtactttttatggtatatagtaattttaggacctgataattcctataatgagagtttatttgtattgacaaattgggattaaaatatttgtaaaagtgatctcatcactgatttgattaagtctaaattgatgtaatttaaaaaatgaacatcaattattaactcagaaatagtagatcagaattcatgtcaatacaaatagggggttgaattgttaataaatagatttttagcgtcaactttataatatattttacatcaagattggtctaaagaatattctcgttggatacatgctagataatatgaatttaatgatgaaacttgaaacatcaaaaagcaaaataattaatttggatgaggtttagaattatagtggtatcgcttagttaaattacacaaaatatttaccttaatatatccattttcagccattcaagttaagttctcaaaataatatataattttaagacattcccctgatgtgttttttttaatagtaaaaattaattagagttttactagttatttggtataatttaaaacaacctaatgggtataatgaatgtgaagaattaaaatataaatgtgtaatgtataaggttaagaactgcaattactgtgcgtcgtctcgaatttcaaggaatcaaattgaataggcgccattttcactgcattcggtactactatattttgtttattgataagtctggcaattaccaaaccctcattccaatacttctccatgggaatattacctacttcgtaaattctttttgaagatatgtttccaaacacatacttttcagaatgatctatggcgtgtccgtcgggttcattgatgtaaaagtgcttgtgaatcccgtttgaatcaaccctgatttcagatctgtacaaagaagtgggagcattgtctattgagatgtttagtgctattggtcccataagctccaaggaagttatgagctcatttttttcattcccaaaaacttccttgtatataactttccctgactccgtgcatctatcaaacatatgaacttctctaattgctcctaaggacgagtagtacgtgaagcccaccgcaactatggttctatctgccgtttgatatacttcaacagtggtgtcctgagcgctgtcatttattacccaaattacaacatcgtcagacgtcaagtccatcacacttcttattttgaacaactccttgttgttttcgttcagctggtataaagtgtacctccaagaacccaacactccgagagttttttccactccaaataactcggaggaaattaattctgagatgtcgatgattatgggctcgaacttaattcctcttctatccatgaagctcagcgtttcgtgcgccacgaatttgttaaaatcatcatagtctatgctatttgctacatttgctgaccaaatctttctacagtagtatttagttttgtggtagcttatggtcttcgatcccagtctaaactctaatctatttaatactagcctaaagttcaggttaaaacgattcattatcaaaattatatctatttatttaaactactaatgtttacttgtaagtatattttactgaatcgaaactgtctacaaaactcttgaaaatcttgaatccaaccacgatgtctatgagtggatcatacgctattccgaacttgtactgtatgtcattttgttggtttattgagaggtttttaaactgtttggctattgtgtattccacatatttatgattgccctgtaattttgattttttctgaacgaacgggtgtctaaatccaggattaatattaaagtagagaagcacacagccgcctgtttcctcaacaacgactttgctttcaacctcaacaaacacatcgtcaacccatttgtagtaaattctctccgaaatggaaggctctgttgatactttttcaaaaattgaaactattaagtacttggattcacctttttcaaaaagctctaccaggcactctttgttagatacatcgtaaataacttgtgggtagatgatctgctctccgtatctaactaggattatttgttcttggtagcccatgaacattttatacgttccatttggcatgaactgcccatgataaaccttgactgattgagttattgtataggacttcaggtccaccgatgagcagttcgaaaagagattaaaccctgctatggccaaaataaacggtagaagaaacatcttattctacactgaaagatgtgtcttgaaaagaatcttgaattcttgattatgtgaatgttttaaggttaaaaccggcgtgcttgatcagaagtggaactaaatagagaagaaaatatgtaaaaatgtgaaatagataaattctataaattataataaattggaataaaagaagacgggaagatgatgcttttagaaaggatcatcaagactttcccagctagccaattcgtttcataataaattaagtttaaattctccattttggctttattaaagtttaaaaataattttttgtctgtttttatctttcatttacttaaaaaattgaaaataattgataaaaacggataatttgtgtggatgatgtcgtttccccaaaagtgtaaaaaatcgctctgaataataattttatccatgaggattgttttttaaattaataaaaaaattttttctaaatataggcataactagctttatttttgagcctaattattacatttcttccttttgaataatcctcttacacgggataatttcttcaaatgtgtaatgcgtttacactcattaaatattggatattttattttaatttatatcgcagtttcagagctttcaagtttgtggtttctagtactaatcatcaaaacctttaggctcaacattgaatagaggaataaatcgaacccccctcgacacatttcaaaaatcctcggattatttaataattcacaatggaagaagagtatttttactaaatttgtaaaattcttacttcagttttgcgaaaaggggactattctggacgctaacgatcgggtatttttcaaactttaacagaatttgttagataaaagttgatgacgcacctctcaagtgtgacactgtggataagtgctcatttttctgccaaactggcgagaaggattacaacgtcagtggcagtcgtaaggtggggaggactattgagcgtgttttatctaaaactggtgacataattccaaaatcttccgtgaattggctctgttctggagataaatggaactctttgtttgtgaagaagggctggattactggcgtaaagggtgattcaattcgtaaaatgaaccctctgttcaagttctttatgaacactcacgccgtgagttataagactttgttgtattttttctaatatttgattaggaatgtgaaagcggtgatttactcgactctgcaaagaatttatctgtcaaatcctcttctgaaatgttagttttttctccaactaatgactttaggtgcaagaccatgaagaattgtgacttctttactcacgtattcactattctattttatttgtttagacttttatcattgatgagaagtttatgtcgttttctacattaactaacttttgcaaaggtgtgctttatttcattaacacttctcaggccagcctttgaatttgactgctaaagacggcaatttacttggaattttagctgaggtgagcaaagaaatcgctgataagggagaaaacatttccaaggctactgctaaacctatgtactactacggtggtcctattaccagtgatcactactacgatgatctcagacgcggttccattgtacccgccactaatttgtaaatttaatacatcctatttatataccattaggttaaattcattaaattcatgaagaaatgcacagattacgtttattaaatcagtctatgcaataaatgtatgcatataataaatacatattaataaatttattgagaggataaaattatgatttttaaaatcagtaaacggcaaagtttggtagttgagtggttgagacttgttcgtcagagtacacaattgcaatgaattgcctgctgtagagtttaacatttataattttcaagggttgttggggtggttgcggcttctctcgtgagaatttttgtgagataaactctccaatgctcgagacaaatgaagttgagctgactacgctgcggggctgtttcactattgaaacggtgtcaaatatgagtttaggtttcgagtataaactcgtgagtttgtacaccttgatcttactgtcctcagtcacggtgactatgttcccgtttaggagcatgaatgtggcgattatcgctgtgttttccagtgcgtgggtgaagacaatgtccatgtcagttacgctgaaaaccctcaaaacgcccattgagtcaaacaacaacaggtcatactcgagttgaacctcctttgagccgtttgtcaccgtgtcgtttttaatcggtaaaacgctggtcacttttggtgtttcctccttatccttaggttccctcgcgtctgggtgtataaatgacaagactattttaatctttgggatgttgttgttgctgtattccacaaggttccaaatgcatatacacggcacgctgttctctgaaaaggtcttcaaactcttgccactaatcacatctcttcccaccgatttcaactcggaattacttgaactttcagggttggaatttgcattattaggattttcaacactggaattcccaaaattggaatttccattattaggatccccaaaattggaattttcagtggtgggattggtgtttgacacggcgaaatcgccatttgtatcaacagaatttggctgatcagcttgtggttcttgtgaatttaactccttcttaagttctctaccattaaccagtgtgagattaatgaaaatgatgtcccgttctatggattcctctaggattccattacccattgtcagtacgtagtattctcccagccaagacatgtaatttgatgtcaagtgtgtcttgaagcaaatcgtcgggacactatttgccacctggtccttctcactctttccattctttgaaggaactgtattagtcaggtataccaggttcttcatgtaataaatcattgcccagccaaacttgtcgtataaacacagtgaatcaccggaccaagatatactcagcaaatctccaaacaaattgcctaacccattattaacagaatttatgaagttgtatatttaatatgatgaataactgtgtaaacaataaattacataataaattatcatgtctaatgaatgatagatatggatacttgagtgaaaggtggtgagttgtaacgttgagacgttgtagatgttaatgaggttattgagtagaatttcatttttggtgaacatgaactcgttggagagtgtggacgtgtgctgaagtgagactgagtatgatggctgagctttatcattacttgagccgtgggcgattgcgtaaattgggaaaattgggtgaggctcaataccgcctgaattattactatccttaatctttaggagcatttggagcttctcagataaagtaaagtggtcctgtctaatattaaacgcttcttcgacatgagactttgagtaggtgttcaggtacctaagaagccttaagagaatgacccagttgttgtccgcgtcattattatccaatttcccctgtttgtgtaaattattataccgaattaacagattaagcacgtttgtagttatgttcttgttcagctggtacgggcacaaatttgtattaagctcagtcagtaggtacaaatcactcttgactggttccagaagcagctggagtgacaaatggttcaaatgctcattcatggtaatgtttgacatggagtagaaggtgcttagagttctcccctttgcgttatggagtgagatgaacctgatcttcctaagattatccacgatcctcttgagcaccatgtcactctcgtccctattagcggtttccaccaagttgtttaaataaatctggtgacttgagtagtagtataacttgaagaaaatgagcttcaggggtagaatcatgggtattaacaggttatcgtagttgattatctggtaatcgtccagcaggttgaacaagtggttataatcgtcagtttcgtcaaagtatgcgttatccgactcacctgtgttatctgcttcagacacgttattaatactcggcgaggcgttgttgtagtaggggtttatgttacagttgttagagtaaagtgagtatagcttatagttacagttcagatatgaccacagcttatagaacgagttattgaagttactcagcacataattatttacaatgtccatgtggtcactgtacttgttagtgtccttgtaatttgagccttcggcatcctcagggttatggtaattgtaattcagtctgtacagtgtctttgacgacttcagggataactttatcagctggtctttgtagttgaacaggtacttcgacatactcacactcagacgatccagccaaaagtaatgataatctacacatgaatatggtaatttaacttacaattggtctgtttatatatataattcctcattaatcccaatatcgtctccaccatcgataatgttattattataccaataaatctataaaatagttggtactgtatagttttactaatattatggctatagtattattctatagttttactaatattatagttgtagtattactgtatagtcttaggtatagctatagtattatagatataatagtatatctaaataatattgatatagttttactcttggagttgtaattcatcttgatgttgtgtttttgtgtttttattggaggttgagagtatgttaaatttctcagcgtcaaatgtgtcatttgcgaatagcgagggttctatagtgtttatgactgattctagaaactgtttaagccactcattatttcccttcatctggttaagtagtgtgagttgtgtgtagagtccattgtacacctgaggtaaaatatcaaccttgtacaacactagcatgaaaacacatgttaaggacactacaaagcacacgcaaacgatctcttcattcaccaaactaagatcactgtcatataatccaacgtctaatctgtcctttacttcaatgtcaggttgacgttctgattctagagttcctggttcattttcctttgagttatccaaattactactgtggattgccaaaagtgctagtttattaatcagattgagctggagtgatgggatattgaactcctgtacacttaaatttgagtctaaaaatccaatgaaagtgttaaccagcctggtgtaaatactctcaatatcaatgtcatattttctgatggaaattattgagttgattttgtaataatttagagtcagttccatctttagggttgattttatctttaaaagtacctctaccacactcaaagtattaacatttacaaccaaatcactctcctcgttcatcacgaaaatctcgtctcctgtcctcacaaaatcgccttgatcatccagtgaacttcctgaatgctgacctgactgaggacttgaaaaactaaacaacgagtgctgagaaccctttgagggtttctgtaaatgttttgtggagatgatcgaggacaacttcttcagtattggacactttaaatgtgactgcttaaatgtgtagttattaaactctaccaatacattcccgtccaaatacttgtagtcatcaacataataattactattacaataactatcattcagtcctacaacatcattaattgtgttgaccacagttgtactatcactagagtaacgtatggccatgtaccatttactaggtaatacataactatatactattagaatgaatacataactatatactattagaatgaatacataactatatactattagaatgaatacataactatatactattagatattaatacataagtatgtaataatattaacagtgtgtgtagtaccttgatttgtgtaatcgagataatcatatttttggttgaagttgttgaatttttgaaagtgtagaaagttggaggcgtaaatgagaatcttatcccagctggtgtaattaactacaaaggaatggagtagcgctgaaatcattggcattttatctaaatagtagcgtgaactatttcttatcatctgctccacttggaacaggtctaacttcttcaatacaattccaatgctcacgtttaaaatcaactcatccactgtacccgataacaaatctaaaatgccctcctccaaaatcctcgaatcatgtccgatcgtcttatatcctctaatctcctcagtcaaactcccattgccatacatattttcgtatgtatgtttaaggtatagacaattgttataattttgtttaccgtatattcccgtgctgtgcacagcgttgaaagagtgtttaaggtgcatgggattataggtggtactatatggattagaatctgagtcatcatcgttgtggcacaagagttcaacttgtttacttagtggatcttctacatgtaaattcttattcattagttctttcgagtttttggtattcagtgagcctgaatcttggtctttgggattactactaccagtcagtgtgctgatatcacttgaatactctggcgataaatcaatagaatgtgtatgcagtagaatgtacttgattttcctattctggaccttgttaaaagtgtggtggagactaaagttaaagagtttggagatcagaattgagagtgacaggttgttcagatactgatgcacaacgtctacagcgtcttggatcctgtttgcaagtattaacattgctgatgagagtaaataacgtctctgcgaaattagtgcaaatgcatttttaacacttgcatccttccaacgctcctgagtaaaatcgttggtcagaaagtttgaaaatttttcaaaccctttggactttaaaaggagactaaaaatcttaaccttgccctggagaattaaataaaacccaaactggtcaaagtcttcaatattcctatacgtcttcaccttgagtctaaagtacttttcgacattctcaaacatgaatttgaaacttgtcttgtttttaacccagtatcccacatttatcatgtccatatactccgtatatgatactacactgtcaccagtttgaaccgtagaattataatagtggtccagctcaatcagtaaattatgatcattctttaccaataacaaccaaatcaggaaattctcttcaccttcctcatccctactcaaggtaacagcttcatccttgaatatgtgctgattaactttaaacttgtcatccaggtggtctttatattttgtgaagaacacgttgtccaaatccgtcaagttcttgttctgtgggaatgtgctgaaaaatgaaggcgaaagtgacgtcatgtatgaaatcaggtattttaatatgttatggtctggcgtcaccaactgagaattctgttccattccaatcctcaggagaatatttgaattctggcacagtttacacaggtcatcatcttcgtcgtcttgttctcttgctgattctattgatccaattacattttccaagtctctgttactattaaatagtaacaagtcgtcactggttgacagatattttgtcagaatattaatgagttgatactgttcataccatgaaagcccaatcagccttagcacttgcaaatacacaatcaactcattcattaaaagctcgttttcttttctaaaactacaatattccttaaaatattgattatactcgtcatctactacgtaatcgttaagtatggttttcttaggctcctcggcgtcgtggttgtcttcgaagttctgcgctccgtgggtcatattactcatgtaaatagttttaattatgtaatcgtagaagaatctgttaaatctgcaaaataactttagtgccaaagtcttaaatatgatacagttgcaaccgccagaaacatcctcagccacatcagcacgctgttcctccgaatacggattcgagtttgtacaatatatattatccttcaactgcgacaaaatccttcgaaacagaaatactagcatattaaccagcttagatactaaggtgttaagacccagctttagcattgccagtacacactcgggatggtacactgggtacattttattcttaaaattacatcctgtaaataaaggcaattctccaaccacatcctcagaatatgaactggttgaattttccatatcaccgaaatctgtgtcatttttatactctgacgcagttggacaaacgtctctcaagggcctgctcttgatcagaatcttaagatcatcaatcacatactcatttctaccacttgtatttgctaaataatacctgtcctgggttaacaagtcatagtaatatctactgcttatttcaagccatttgattattttatgactcttgatcatgtataggtataccactcctgaatcagagttatctgctgaatccaattcatttggcgatattaacttaaatttcgataatagacagaaataattcgagtcgtaccattttttaaactgtattatcgcgtcatccaggtgatcatcaggcgaaccattgggtaatccatttggtgactcataatgattagattggtgaggacactgaaataaccagctgccttttagattaagtttataattttcccatttataaaatccgcacacatacagtgagccgtcattttgtacaaaatcgtcgcccgggtcatttttacccatttccttaaaaaacggcgttaacagcactgattcattgtggtatggtgttaagagtacagattcattgtcatacggcgttagtagtaccgactccctatcgtacggagtgaagataatgaagtacagttgatgatgatattcaataacttgaaaagttaccacgtggcttaaattatgaatttggtggtgtgtgatgtcatttgggtcgtgtttcttgcttgtgattgcgctcagtgcgccacttttcgaatgaattatgtaaagcgtttcatcctttccgctgaacacttttacgtttttcaccttcttcgagccttttattttatttataaagtaattttcaatgtatactagctcgttatttacattaatgtacagtggcgtacttgggtggaacatgtacctaatcaccaagccgacaatgttgtctacagactcccttatgtgctcgtctttcaaaaacaggtcatacggggacaatagcaagttcatactaatgtcgttttcatttaataaacttagtttcaccggtggcaagatcttattcaagcctttacttatctgcattccaatcaactcatccaaactctcattatcctttccacaagtcacattattgttaacattattgttgttagatttgtgactggaactattgacattgtgatgattggatttgtaaaaattggataaatttgtggatttgagggtgatccatttactgactacgatgggtgactttgtggtaattttattaggtcttagggagtcacttgtgtataaagttactaggccagtttcaaatgtgtgatcacagatgcaaactgactctattgacttgattttcactggcattgttagctcactgctgcccaggagatactcactggtaactgctagtctatgattaaaaaggccgtcaacggcgtaaatctcaaaatgctgcacataatcttcatacttgtggaataagatattatcatattcctcaccagtgtcatcataaagttcttctgcctcatcttgtgatccaacactataagcgtcggtattaagattcggtaagtaaatgtcagactctcctgatttcaactcgtatgagtaatcagagtctaaatcctcagttgaaatgctgtaacacctggtgtttgtggtgttgtaaaagatcaaaaacgctcttttactgaagttgtagtctgaaactacgctctcaatgttcatccacaggcagtgaaaattgagtgtgtaattatcattttggagtggaatttgaatacaaatttcaaatgagtcttgaagctcgttaaagcgccaaatgtaagccatgtaataccttgtcagagttaccaggaataacttatttatagccgttggaaacccgtaattcttcttccaacttgagcaaatcactgaattctcgtgatacaacgaccacagctcattcttcaaaatggttttcgaagtgcgatctgaattttgggcatacacaaagcctaaattctccaactgagctgtcttactcagtaacaaatcctttattaaagattcataactttctagccagaatacgaacaacgtattatctattttcttctccgtttggttttttttaggtctcttcttcaaaatcgctgatactattgtcaacttctccctctcctctgaggatgaacttgtgttcttgtcatgtaacgagacttcagtgtggtcaaacacttctattgtacacttttctctatttgaagagtcgatccccttcacaaccctccttatatgagatatctgcttcaatctcattttattttacatcaaatttgataaaatttacgaaaatttctcaatttttaccagttatttattaattatttggtgttgtaacattgtcccgaatttcagctcgaaaattaaaattattggtagaaaaatgaaattaaaatattgacaatttttttggccatgttttagtacattatttggcctttaaaatcagtttattctcattttatactttttattctcagattctactccacaccaccaactttatacacattctttactccatttccaacacattataacactcttttacgcataaaactgtttttatcatcacttttagcgcaaattgtatgctaaatattgaacactaaatatatgattgtgtgtaaaatactaattatatataatattatatgtgttaaattttggagtttgtgaatttgcagttaccgatgagtgtaagtgtgagttggtcggtggtgatgagtttgaggtaatgtgctcgttcgggatcatttttaataaagtgttggagtgactgtgttgcgatggtaccttttttggcatttcccggcacaagtttcagggcgtttttataatgtttaatcgcagaaaagggggcgcacatcggaattacattaataacatcgtcgtcttccttcaattctttagttaaacatgaaagctgcttcatgtaatattcaagctccttgtcacttatcgtctctatctccttaaacttctcactctgcccagtactcacagagttgccataacttatcttacccacctgattcggagtaaattgtgatttctgatttgaagattgtgatttttgatttgaagattgtgatttctgattggtggattgtgatttctgattggtggattgtgatttttgagttttggcttggattttctttgaacctgtgagtagtcttctgagttcctgtgtctcctcatcgtcctgggcgtactttttctttatcttactcactttctggtttataaatcgcatcatcctactcgaacctctactctttacttgcgtcatctccagcttaacattaacattagtattctcaaaaggtttcagtttagtattctcaggtttcagtttagtattctcagaaggtttcagtttagtattctcagaaggtttcagtttggtatcggaattagttgtggatttgacatcactactggttcgagagttactggagtctccagagttgagtggtatgaaatcgttgaatttggggaactttgggttaacggctgtgagttttctgcttctaattttacgtacagcttcctcactatgctccaacttctcaggctccaatattcgcaccgattttctctccacattatcacacgactcgggacttgcactatttgaatctagttcaacttttgaaactgattcaactttggtaacaggtttcacattggtaacaggtttcacattggtaacatgttcactttgttgagtgggttggggttgcatatctttggacgatttggtggagatttgagttgaggatgatttgctggatttgctagttttggttaaatttaacttttgtagttgatgttttaactttaggagcttagattttagtggatgtgctgttggtaatcttcccctcgttctcttttgtatattggcctcatactcctccaacatctccgcgtgaccaattctcacactcttatcttccacatcctccacatcttctacatcctctacagtgtttccttcagtatcttcatcttctacatcttctacagtgttttcttcagattcaggatcttcagctgagtcagaaacatcttcgtcgtcttcttccagagaatcttcagagttttcattttcctcctcttctactgaagtttcctcatcctcatcatccccaagatcctcggaatcatcttggtcatcttccggagtaatctcttcatcaacgatagtatcatcactgccttccacagtaacctcatcgccatcatcctccaccgtgtcttcatcgtcggagtcatcttcatctacctcatcatcttccacgtctacctcatcatcttccacatcttcctcatcttcatcatctaccacatcttcctcatctacgacattatctacagtaccctcaccgtcaagggtatcttggaaattggttggttcgagagagtggaatggatgtacttggaaaaggtatgtgatgcccatttcgagtttttggggtggtagataattctttttacctcgaattacaaaagagccctggggtacatattcacctgtgggtggcgtttttgacacctggtgccagtacacccaccaactctgaactgaaaacttctcattccatgccgtgctcaaacataccgcaaaattcccagcctcgtcaattgactctttcacactcttaatcatgtcatacggaggactagtattggtagtctcggtgttgtctgacgtagtaccagtggtaaggttaaaactggaggagttagaattagtcttgagaataacggaagctgcgccgtgaatatctgcgtgaaagtataaatcgccgttggttaagtattttttaactaggagttcattttgaagcgcgtctctgccggcaagaactaagtacccctgacttgtgataaaccagtagaacttctcaaaccagaaccgtttcctaacactgctgatcctgacgtctcttttattcttgtcagttttcttagtttcttgtttttttaaggatttggtcacctttttcagggcgtattccttccctatcttcgttcgctccaatttattctccagccgtttccgctcattatataactttttcaagttctggtgactattcaaacgataatccagtgatacagatgctgtcaaatctttactaagcttactctgggtgccagatttaccaggtttacccgattgacccccttgactcagttggtcagaaccactaattgggttgtgaaagatgagagtttgagttgggatgttaatttctttaatgtagtgtacgagtgggtgattttgtttccgttgaatttggagttgttcgtaaatatcattccaggaagcaccagaggcaataagtgccttagtgaggtttaagcagttttcagcgatatcaacattctcctccaataacttaatctccaaatcaagtttcctaatgtcctccactaacttttgctcacgtttgtcctggtcaattttaattttattgagcttggttggtttcttgtcttgggttttcttttcctgttttgccagctcgtgtttggtaaaaaaagcgtcaaccgcgtcgttaaagtcttcaaaatactcagaattctcctgctcaaacaggccaaagtcctccatctctcccttctgattcttatataaataacctccaatcttgtcctttccacttaacaattcggataaataagttcgtatgcattcgacatagtgataaacagtgtccaaatcttccaaattgtatactctgtccaggtccttaggatcaacaccgtcacccttggtattttttaattttaattttaacactgagaaaataaacgaatggtgaattgacgggaataaatttttaataatgtccgttaacttgttaccaacaatcaactcctccaccaacggcctcctcaacttctcaaaccatgaattatattccatatcatacacatactacaatacacattagtattatactgtaaatattactgtaacagcgtaaattatggccaattataggctaaattatagctaaaatacgataaataagtggtaaaatctgtgtatttccatacgttggatccgactttgaagaatttatcaccggtgttttggggtctgagtactgtgagaactttatattcgtgatccgtgaggtaaatatttccgggtaaaaacaactgtactatcagatgatgcgcatattcctctgaactaaaggtaaaatctattactctatcctgtgatatctgacttatatcccgcaatctacgattcctcaagtgcttcctcaactaatacaccatcacaattgtgtcaccataactaagtaattaactgtataattgaataagtaaagtgagtgaatggtactttggcgttaaaatttgagggcaggtggtctacggatctgaggaattgagtggcgtgaattctgcatccgatttcaatgaggatgtaaattttattctcatttttcgagaatttgaggataaaaattcggttagtaatgtcataaatgtttaccaacgtcagatttgagatcagtttcttcaaattcgatactaccaccgccacatccacagcattcaaacgctccttcgccattctcaaattatctcacaatatctcacaaattatctcaaaaatatattacaaattatctcaaaaatatattacaaattatctcaaaaatatattacaaattacttacaaattgtcatgtgattatttaaaaaataatattataaaattattcagataaaattaaaatgattgaataaattaaattaattgaaggaaaataaataatttatggattaaaatttgatggaaataaaaatgtgtatgtgaatttgggataattaccctctatgccacatcgagtagtaaaaaggttataaaatgaaaactaaactaaataagaagaatggaatagttaaaaggcaattaattgagtataataatttactgaagattcgagtttatttacagaaaattaactcctgtattcaacggtggccgcatccccttttatccaatttaatagctgaaaatttacaatctcacgagatccagcaactaaatcaaattaaagctaatttactccaaatacttaaaattttcttctcaaaactctccaaaccaagtaattcctccactaatactatttaccatgtttaccctaatactatttttaaccgacatttcataggtttaataaggtttaagcctgacgtgtttggtgattttgactatttattgaggcggagaacttatttattggagcgtttggattacctaaacgacatttcaaactttaacgttaaccgttccttcaacgttattgacaataacatctcatcgcacattaagtttttccaccaaaaccctgagaaatttatcaataaatcacacatcctcaatttacctcaaaacgtatctccacactactgagtctattgagtaaatattgagttaatattgagtaaatattgttaatattattgtagttggttggatttgaatttctgagtacaaagtgcggatttgaagagtctaagcggttacacattgctcagatttacaacgaccaagtaagttacgttgttaatctgtggctcaggtgttttatgtgaagttgttgaattatttaatacaaaatgacgaaaattctgagatagacttaaaaaacgaagaatccctcattaaaaataaccagcatagtaattgcccagtgatgtaataatttttagataaactgagattatcactgaataaaacggcaaaggataagaaaataagatacacgctcatcgaaaaattacagaattttgttgtatcaaaccataatattctcatttgtcttaggagaggactaataacaaaagctttaattcgccagaattcacaaacttattaatcaactcactcttcaaccaactcaattaactgtacaactaattcaactcacttttcaactgataatttagtaactaaattacgaactaaatggtctgtggtatgagtaaaagggtggagattggtgatgagaagtatgatttacaagagtacataaatctgttcaacgtaacgatttacacggtaatattgttgataggacggcctggaggagttggtgatagtctgctcagttcgtaattccccccgtggtatctcgctgtgcgagcgaattaagcgctcagtaaaggtcaattctaccatagaaatgtcaaatttcctcgtaacccaaagataaattttatgttatttcaggccacaggaaccgatcgcagaaactcttgcaaactcataattaaactgagtaaatccaattaatctgatgtaatatcatgtataatagataaaattgcgtgtaaatagtgtgaatagtatgaaaatgtggaaagggagttgatgagattatttgttgtaggcggctttttctttttcgtatctggccctgtcggcttcagcgagtttttcatagggtgccttttcactttcatcgagtgagttccaggcggcaccgacaagtttgccgactgcggcaacatctctggcaaggtcggggttttcgcggacgagttcggcgcgtttctccttggcaaagaacatataagaagatagtgcgcgtttaggcgcgttcgggtccttcttggcacgcttggacttcttaccagctgatttcgataccttcgctgccattttaaacgttagcgctgtagtggtgaaggtgctaaaactcctgtgacggaacagatttgtaaatctaaatttataagctattataatttagactgagcaattaagcttctacgaaaccaagttaatttattcaaaaatactaacgtatttcaagagtatagggctccttgataattgggatactgtggtatctgatcaatggggaatttttcgagacttcactaatcttctccaactacacataatttcaactactctatcaaattatttaaaatcttgtctatttcaatgctttaccgacaattcgcgcttttttccatttcctcacctattcaaccgaatttcatgtccctcataattaaagccgacactttaccccgaaatccactctaccttcctttaactttctcataaccaattacacaattttggaacttttatctactttaaaattcccgaactgatccaccacaattcactttatgtgtctaacgcactggagaattttccactttcacactttttccactcactctccacaaccttccattctcacacctgaaaattatttcccatcatttatttttttattctccttagctaattttattattcagtcactcgagagtttactgttgtcttgtctcaaaatgtgttacgcagtcctcagacttattcctgacacattccaactaaattttactactcctcagtaatctcaattttacaccaattaatacatgttattcctatttttacacgtgattccacaatattttggagtcttccgtttgtcgtgattagttcattttaaattattatttttcgtacattttgaagattttttattctggctaattttagcttaattttgtgaattcgttagtttttcagaatttttaactttttaccatttttcacttccaccaaatttcaactttgttgtatgattttattatcttcaagatttcaatttttcattaaaaattttattctccgcaatttttcaaattttttcacaaatatttcaaattttttcacaaatatttcaaattttttcacaaatatttcaaattaatttgattaatttacaaaaaaataatattttaattttttcctcaaattcctccaaatttcactaaaattcctctaatttagatttgtgaaccatgcaattactgcgtagtagtggaagaactaagcgtacttacgtggacgactcggtggtttcaccgatccctgagcacatcaagggtataaaaagaactaaaactaaatctgacgaagcttattcgtatgtgagagacccttacggtgaagtgattgccaatattaatggcaaaaagttctatagatctgccctcatccacgatgaaatcatttccatttacgactccgttgatgttctgaggacaaacaataagtcgaaaaatgtcagagaatctaatctgggtacgtaacggagcttgctagcgctcacacagattactcatttagttccctagttaactatttttccataccctcactagttccttagttaactatttttccataccctcactagttccttagttaactatttttccataccctcactagttccttagttaactatttttccataccctcactagttccttagttaactatttttccataccctcactagttccctagttaactatttttccataccctcactagttccctagttaactatttttccataccctcactagttccctagttaactatttttccaaaccctcactagttccctagttaactatttttccaaaccctcactagttccttggttacttactacttagtcatttacatagttgattctgtgattagcaaagatatcggcgatttatgtggacacgaatggtaaattaatggctgaggtggcgttttatttcgactctggagaggaaattccaacctctgacaacgccacagaacccctaacccacccgctagacaataaatggaaaggattcacacacgttaacgaagttgttgcatacaataaagtactttttactcccttttactacttagttattttttgccattcttttcctctactatacttaattatatacttaagttaattatatacttaagttaattatatacttaagttaattatatagttaagttaattatatagttaagttaattatatagttaagaatacaattactgtgttaattactataataatgtggtaattactataataatgtgttaattaatataataatgtgagtagtttgaggatgtggagatagagacgtttgatgagaaggtgaatgtgcatggaagtaaggaggagtatttgaatgagataaactctggcggcgatgaggaaattaacgtcttctgcaactacatctgctatcatgaaaattactccgtactacccttcaatatacataccgattgggaaaacgtatcaccatactattactatactactcttaactataccttaactatatacctatactacatacccctagagggagctaattagatatatagagaagagggagctacttaagtatatacataagatgtgtataggtgatggtagagagtagtaaatatcatagtatatattatccgaagatgatatataaggagacaccgtgtgttgtggaacctctcagccccgaacttaaactacaattaaacagcactgaacgcatcctaggccgcgaagatgaagccgataaaatacgcactttcatggaaaccaatatcaaacaaggtaactcacaactatttaactcacaactaattttccacactaattaactcataactaattttccatactaattaacgcataactaattttccatactaattaacgctaactaattttccacactaattaacgcataactaattttccatactaattaacgcataatattatactttaacgattaatagtataaagtgataatgtgttagggggaacgggtcaggtattgtacatcagtggtgtgcctggaacgggtaagactgagacggtgaagatggtgtctaaggagttaattggtaagaaattaaagggtcaaataccttggttcgacttggtggaaatcaacgccgtgcatctctcaagacctaatgaactctacagagtgttttataataaattattcgctaaacccgctcctgcctcacatatttgttatgaagaacttgataaatattttactaacaatatgacgccatggtattacgttacggtggttgctaccgcttagttatttcctactcagttccacagttatttaacccttttggcgcacctttctccgtaacggagattgtacaactaacttcttcagttatttactcctgaagtagtaaattctgtattattaattatatattaatattttagtgtattgatagtggatgaggctgactacatagtaacaaagacgcagaaggtattgtttaatttgtttgacttgccgtgtaaaaagagctccaagttcatcctcattatcatctccaacaccatggacctcaactataaaatgaaatcctccatacaatccagactaggcatatattacacagtttactcacattcatcgtagtatacagttgtagtaaattgtattaatatttgcgtaggatttgggagtttggtgtttaagccgtatagatatcagcaaatagtacaagtcattgaaagtaaactcggaaaatactccatcatcgatccgtaataataactcagtcattcattcacacttttacacatttacacactattttactattttacacactattttacacactaactagtgaatgttcggatagagtggcactgcagttgtgtgctaggagggttacgaattacagtggtgacatgaggaaggctttacaaatttgtaaacttgccattaaagaatcaaacggaaagaaaattactgtacgttacggtgcttggtccggcgtgtattagttatttctcactcagctctcctctatacactatttactccctccatagcttatttcctcagttactcgctactacacagttactcagttatttactccctctagagcttatttcctcagttactcactactacacagttactcagttatttactccctgctggtcactatttccctagatatgtacagtagttaatgtgtaaccccttaaacaggtgagtgagatgagtaggataagtaatatggtattgaattcgtcgatatcagatgcgttgcaatatgtttcggtgggaatgaaatgtctcctggtctcaataatcttagtgttaaaggaggtccagttatcgatagcgcctgcagttcaggtttataacacgttccgtggcatgatcacagtactgaagccggaacttgagaattgtctctgtaaagactcgtttaagcatttgttactgtcaagcttaaataacggcgtgatttcactagagcccacagtcttctccagcttctcactcacagataaaaagaaaatacacaaagtctttgaagatattaatgaagacttaggtaaaaattattcatcctaatttaaacattaattatttagtttattattttaatgaatatttgtgctaatttaaacagactaattatttggtttattattttaatgaatatttgtgcttttaaacggattaattatttagtttaatgaatatttatgagtttggagattgatgagtaggagatgtagggataacgtttcaaattgatattggacatttggttacagcattggcaaaggatccttactggcaatccaaactggaatctatcacataatccaactaatagtattaataataataataatagtattagtattagtatgagtattagtatgagtatgtttagatgggtggagtaactggagtactagggttagagtgattaggataaatagtatttagactattgagactatgcatagagtatctagagtggatatatgtatgtgataggtactctaggcgtataattagcccacccaggagggtgttactcgtgccttgtaaagcataactttagggcctagttacccagtttacacagttaattatttttatttaataattttctgatgcttaacaatgttaaatctgttggtttatgttgaaattttggatttttaaaattttcgaattttttcgattttggccaggacccaaaagtgacaattaagttccgaaaaaaataaaaatttttcgactattgagaaaattaaattaattaatcccaaatcatcttaaacatcgttttagacataaaactacttaaaattagttctaaaagttgttaattagtgtagaaaatttggtttcaatgtgtatcctcgggtacacttgacaggatattagacagttttatctctctagtagagataaattttctaattattaccctaaaataacactaatttaactttaaaatagataaattatcctaaattgagttaaataaattagatttctgggctaacaaatcctagaaactccccttaaattaacaaaataaatataaaattccctaattatatactaataatactcttaaaacttttatctaaatatctacaattcgatatttaaatatattatacctataatgatgcttatctaggcctggatcccatatatttgggagataatctagtgtataaaattcgcactgactgaaaatattcaatttataacattagccatcagagttttaagttgaggaatgtgtagattcgagttcgtttctgaggagatacacacttttgcaatagttattggaatactttagtatttgaaatttttaccgcaatattttaatatcttcatcggatcctagtactttcttctccataatttctaaaatcgtatagtatattttatcctcgacattgaaattttctttttgagtgattaaattattgaaaaactcaaactctttcccaaccttaaattcattcataaattctcttgaaaagcccaaaatgcgttcacttaaatagttaattgttatatcgtcaatatgagccttaattttaagtaacaacttctcaatttccgctctataaagctgtggttcggattttaaaaggcattcagcataattctttattattaaatccttctcctcctggtcaattagatgctcgggagtatttttaagctcgtctacatatcttttcttatcctcggcgtttaaaaggtttttggtaatgttatgtactacccaaattgcgctacattcagtatattcttcgtcatcttctagtattaactttggaactaaatctcgaatatcacacaaaaaatcatccaaataagctgagaaaaggaaggggttttttattaatgcttgattgtaaaacttcgtaaacactaggtgatacacagactctagttgtgcacttaattcttgttcctcgggactgtagtcaatgggagtaacaggagtatttatcaccgagtgagtagtttgtggctttttagaagttggaattttagacgtaatacgattgtgcatagattgaccatcggtattattttcttgttccaagtcaactgagtacatttcattcagcctatttttaatatgttcgtgaatgtcagcatatttaacgccactgaaatgtttttcatatttgtcctcaatataagttctaaaattcttcactatagtcacctcaatcaatacatatatttttttctgtatctccaaatgttcttcttcacttatcaatctcccaaaaaacacaaactcctcatcctcaatatcattatccttaagattattatccttaagattattatccttaagattattatccttaagattattatccttaggattattgtccttaggattattgtccttaagattattacgttttgaaacggttattagtttttcatttaagtagtgaacgataaaatgataaatatgttttcttaagacgtcggatgattcctcaaattctattgaactcattggattgttgatgagcttgattaacaaatccttccccctttcacaaattagatgctcaggagcccttttcacctgatgtgttaataacagtttgtcttcaaaactcagagttctttctttccccttatctatcataagttcgactctttttctaataatgcattcgtacaaatataataaatttccggtaattgaggggttttgagtgccgtatatgggatcattaacagggtgaaaactagggtcaccaggtagaaacggtttattataattatttttaagaaggtgtagataaaaagagttaagttgtgttttcaactccctttcgtcaacacgagtgaagataacagtagtaacaggagcgtttgttacctgttgatcagtttgtgactcctcagagattgaaagttttgattcaatagaattggagatagaagtagaatcatcagacgctacactttcgtggtctgattcacaagattcaactttctcggtatttgagaaaactgtgagaattgaatcctgtgtaccgagatccgaattaaagttgacatcaggaatagtagccattcttaaaaatattgagaaatttgtaattgataaaaattctgaataaataaagtgaattaagaatatcgagatctaaataagggaaatgcgatatgtagatttgagtgctaggatctgagttactattgtaatattttgaaagttaaaaataacaatacaggattaatatataacataaatatgattaactttgcctggatagttcaatcagattattgcccgtatagttagaatttgggggaacggatctaggccaactcaatcatcattataggtataatatatttaaaaaatcgaattgtagatacttagataatagttttaagagtattctagcattataattaagggtttttatatttattttcataatccaagggaactttctaacttatagcctagaaatataattaatttagcttaatttagaataatttagggtaaattccccttttctagagatacaatagtggtaaatactattagaattgtagttaacggtataaaattatagttatagtacattaggtacggtaccaagttacacaattaaaacaatttttctatactcaaaattaactttttaaaagaattttaggcattttgatgtctaaaacatcaataggaatgtgttaaaattgtttaatttaattttctgaatagtcgaaaaattttaatttttccggaaccaaatgccacttttgggtccgggccatttggacaaaattcgaataaattcaaaaatcttaaaacctcaaaatttccacgtaattcactcaataaatcattgttaagaatcggaaaattattataaagtgaaaattaactgtgtacgctgagtaactggacctctaattatatgcctagtgctactgtggtacctactactgttattactattactactgttattggtattggtattgtttgttgaatatcaagtctaatcttgtcacatcatcttttaactcttttttctcattagttttatcatttttagtaataattttctttttctttgggttaggtttgggtttttggaatttgctcagcagtttcaattccgccgaggacaatttagttttcttatatccaacgccatgcctaaaacattttaacagtgtaaaatgtactttttattcgaattaacactggcgaacgtgttagatgcgtcaatagttgaaccagttgatgtgtcaatagttgaatgagttgttgtgtcaaaagttgaaccagttgtgtcaacagtttctggaatatttaaggaatttttgagtttatttaaaatttcaagttccgtctcattgctatacatttttcctaattattctccgttattccccatcctcgtataatttattataatttacaatttataatgtagtataattgttaattatggttttactggattgtgaggagtttttagtggaattaacgaaaatgatccaagaagattccaccaacaccagcaagtcactctggatcacatacaaacgatgtaattcacactagttacccccttttactcctaatttgataattatttttacataaatttacgtaattatactttattttacataaatttattcttaattttgcatatatttaccctttttacataaatttgggtaattgatattaaattgttgtgttgtagatatcccgaatacgagaacttggaggcataagaaggaggtagagatagaccctgacgaggaccctgtgtgccttatcagagccaaaatcggtagaaaaaagatctccacatacgtaacaacttggttaaatgagattttaatgtgtgttgtaggtcccgagcacgatctgtgagaattttagcgccgcaattaatcatatttcagagtccatgatcagccaataaccgcaattttcaccaaatcgcacttttcacacaaattttaacacctaatcacagcttaaatgatattttaacactaaaatacgtaaataatactaattaaggaataaattaatactaattaaggaataaattaatactaattaagattaattaagggtaattaaggggtaaattaatactaattaaggggtaaattaagccaaaatagagtaagaataattctaaaacaatgataaaatagcttaaataaccactaaatagctctaaaataagaccaaataagaccaaaatagagctaaataggagctaaataaccactaaatagctctaaaatagtacaaaatcaagcctaaaatagtacaaaattaagcctaaaatactaccaaattaaccctaaaatactacttacaacccctaaataagctctaaaataagagctaaataaccactaaatagctctaaaatagcttaaataaccactaaatagctctaaaatagtcttaaataacctctaattaacctttaaataacgtttaattaacctttaaataacgtttaaataacgtttaattaacctttaaataacacttaaataacatgtaaataacacttaaataacatgtaaataacacttaaataacatgtaaataacgtttaattaacctctaaataacacttaaataacatgtaaataacacttaaataacatgtaaataacacttaaataacatgtaaataacacttaaataagcttaaaatccttataaaattggctaaataacgcctaaaataaccctaaaattagcctaaaaatagcttgaaaatgactaaaattaagctaaaatatgactaaaatgcgcctaaaataaggctaaaataacacttaaatatgcctaaaataacacttaaatatgcctaaaatatgtttaaaatatgcctaaaatatgtttaaaatgcgtaaagtataatacattagtagagtaggaatttaatggcgtttttgacgtggtggaggtgaatgactttcccggcactcgcctttaaaacgcggtcgtaaaccgccgaaaataactcctcacgctccaccccaaagttaatcgctattatcctcctaacccgcgatctcactcccgaatacacactcactcctgggtttacacttgtagactgaggactaacaccagactgtacaccaacaccagaatgagcacttgtacactgtagacctttggactcagctctgtgtagagctgagtatagtttattggcgactacggcgtgctcggtgcccagtgggaggtacagacagaacaggtgcgagtacttcctaaagtaattcccaatgtcaatgaggataatatttgaacaattaacttcctcatagtcaaagtttaaattatacgttaaatcgcccgtgactgtactgtttttactcgtgcccttgaggtgctccgcacggtcactcaccggcgtctcaattatctcaatcaaatacgtaggaaccacaggggcgtaatgcctcatcagctgacctggcatattcaacactttttccatacatgacttggtattaattagtatagcactagtgctatgggttagaatgggactgggggtgatcctgggactactgcctgagctggaactgtcgggaacaatttccacattttgcaccgtagtactgtccaaaatttgtatattaggaaacttagcgagtgccacggtgagatcccgtagagtaattgagcctttacgcagtaactcaattttggccgtgcagttggtaaaattcccaaagtaattctcatacggactcacacggtacccaggacctaactgatcatccacatacccacactctatcaaccccaacatcatctcaaacacgtccacaacactattagtcccggggttaacactacacaagttaacattactcagttctgtgtgccccggatgataatagtaatgattatcatcggagtagactttgataatagtggactcgatgcctatggaacaattcccgtcgtctaggatgtgtaaattctcgttgggaaactcgtttttcacgtgttccgggcatgtcggggatatgtgcccaaacttattcgcactgggtgcggccaacgggatttcactgaattccagcaatttgagggtaatttgattatttggacatcttacggctatgaagtctgagccgttggttaacagcgcggagaccgcctgactacgtctggcaactatagtcaaaggccccggagcaaatttccgtgccaaatacaatactatgaaagattcgacaatgttagtgttgtacaaattccttaatgcatagaggaacgagtgtacgtgtacgattaagggatcgtcaagtggacgttccttaatcttaaaaatgcgtaaaatcgactcgtccaagtgaatattacccgcgagaccatagactgtttccgtaggtattgcaattaaaccacctggctcccttaaaattgtcgcgcaaatttcatatatttcttccggagatccggtgatcacgtccgaatcggggtagaggtgggaatcgggatcggattgctttccattcagcctaaatgactctatggattttggagaagagtgtcgtgattgagaatgtgtagtgtgtgtggtgtgtgagagacagtgttgtggtttgagatcgctccggatctcaggtgacttaactctcagaattgtcatttttacactgtttaagtacagttacaactgtggcagcagagacgagatccagcctttggagtttaaatcatgtgaaaacacaaacaacaacagttttatatgaaggaattcaggctcatccaactgatactccgcactgtcacccgtcacactgttgaaactgtccacactgtcagtgtgtgtgtagagaatcctggaagtgacgacgggattattgtgtgtgaggatgaaagtgtctggatccttggaggctttgatgatgctaatgacttcactgttacaacacaatttgagggttaaacgggggtcaaactggaccttctcgatagtgtcaatcacgtcactaaagcggtaaaaaatgtcaattccgtcaactatcaacgagactttgctcttgtcatacaatattccgtcctccaatacgcccagttccgtaccacacttatcacaaccaaatgaacactcagtagtctcagtgttcccagtagtctcagtgttcccagtagtctcagtattcccagtagtagtaatattcccagtagcaggagtgttcccagtgttgtactgtaggatgagtgacgtatcggagatgaaggctctaaaaaagtgttaatataactaagggagttacaatttgcggtgtgtgggtttgggcgtgtggttgtgggtgagttgtggctgacactcttcgcagtaaattgagccgatggagttcaaatacaaatctgaaggtagtaaaatgagcctaacttttgttaactcacgtaggagattatcacagcgtttacaccggaccacgcagtccacggggttaacagagttaccacggtgcccagggtgaatatcagtttgagcccttgacagtaacgtgatgaaagataatttaggatcaaattcgattaaaatgcggaactgcaacaggtgaaattcgccaaccgaacgcacgctaacaccctgcaaaacgtcgcccaaaatcacaaaatccacacaattcaccagataatcacaattcaccagataatcagaattcacaaaatctacacaattcaccagataatcagatttacagagggaattgacagaattattagtgtaattgtgactgaggagtggtttgagaatattgtgggctttattgtttatgtatattaagtttgtgagtatgtcttgagaatcttggggtaaattattattttccggattctcccttagatgattaagttcctgtggtaaagcgagggatatattaaatttatagcaattccctttatagattttctgttgttctaggaggctataggagtattcagggcaaacactgaaggaatctccagtcctaacactagtgaagaggattaacttcttttgtctgttgaaggagatttgaaagtcttttaactttatgacaagttgtaagtgtacgattccgcggttacttccgggcgtcagctcgcaaaaatgcatttaaacaaattaatatatacatacaaactgacattaactaaaataataaattatcacactgttttatatataaaaagtaattttaatctttacccacactttttttccaccaaaattttaatttaactaatttaactaattaatttgattaattaattaatttaatttgattaataaaaataatgttgattaataaaaataatgttgagtaataatttattgaataattccggaggtatttttcaaatttacgccgttacacatgagttaactgcgtaattcctgtagatgtggaggattttctgtatgaatttgaggacgagtgtaaaattgagtttattgaccctcagtacctgtcacaagtgacgttggacaacgaaaactcagccctagaatgtgagttcctatgaccaaattaagcttcagacttttacctaagtcccttttaccttaaacatcgcaataaagccttaaatgaactcataagatcaggacttcccgttgacgagtatttcttacactattaatatttgactgaattactagatggtgaattagttatcaggtgggcttgatattcaaggtgacgtataataatttgcctgatttatacgaggagtcactcaagtttggcgctaactcagccaataaatcacagttttacatcatgtcatccgttttccatatcacactctactccagagatctcggacacaactccatcgaaaacacacccatcaacgtagtaacatagttatatagttaagtttatatagttaagtttatatagttaagtttatatagttaagtttatatagttaagtttatatagttaagtttatatagttaagtttatatagttaagtttatatagttaagtttatatagttaagtttatatagttaagtttatatagttaagtttatatagttaagtttatatagttaagtttatatagttaagtttatatagttaagtttatatagttaagtttatatagttaaaagtggttaatatggttaagagtgtgatggtgcagcaatgtaatgagtgtgtaggtgtattatataatacaaggctcaatatttatgtgtccgccgtttggcaccttaatacgcaccaaactacatcagtacatcgctcagttcggtatctcactttcaacactattaatataaatacaaatataagtaatattactgtgtattgtagagcgtttttatgacaggataaatgggataatgaagtggtctgtgacgaacgggtatgactggaatccgaagccgagggttgtgaatcctgaaattgaacatttgtcagagcaatacaacttcaccaccaaacacagaaaagaccacaccaccgacggtaacaaattatctcatgatttgttcaggaaatgttaacctattctaccccaaaccagaggataaaattgcactcagaatcctacaagatcaatataacaacctatcacaataatatactataccatatatattatatatactatactatgtattatgtattatatactatatataatatgtataatgtgtatagtagtaggagtataagggtatggtattaggtgtctgggtttaaggattaaagtatagtacagtactaatatactatagtattatgtagttaaggattatagtacagtattatagctatattggtatagttattaggtgtttaggtttaatctattagacataatacactactatatatactatactatacatactatactatacataggtatataatgtatagtattaggagtacaagggtatatataataagtataatagtgagttactatagtattataataccacttaataccattattataaggttaaataatgtatttaaagctcatgatttaagtttttaagcactaatagtattaagattctggatactccgaactccgccactaacaccccttaacacttcttaacactcttaatacttgtttacactgtttattactgttaataaacagttaattagagtttataaagtgttattgaggtgaattaacatgtgaaccaccaactcaattagcatgtgtaagaatgtgctagccctaccaatcctaacttaataccaataattaacaataaaattagtaataattatggtgcgaaaggagtatgagcataaggctaagttggtgaatggattaccggtgttatattgtaaatttggtaagaataaaccctgggttaacattacttccacaaggcccagtattacactttttacctttaccgactctgacaatattacacactcaatttcagagtgtgacataacacttaacgagttggtgataaaaatagtgttcaaatttgacgtaactcaaatatcatttgcaaatcagataatttggcgtttttgtgagtgtttctggtctgggtacccgaggtttatcctgtttgaccttgtgaaaaacaagtttaaactagtgtttgaccacggaattgagcgtagactggagacgaagttcacagttgtaggtcgcgagtgtggcggtgttgtggacattgccaagtatgagactagagctgggtcagacttcttaatatttacgattaaggataaactgagccttgttagacaaggcgatgaagtcatttgggaacggctaccacacgagcctcacccttacaaaatgctaatagacgtggaaactgaggaaaggatcctactctgcgatgacagattcttcgtctgtagaagagaaaacggagtcataacacgcgattcacacacattcacaccgttactcaaggaaatgctcagtaactttgaacgccacctaaataaaaattaataccaacaatacatatataacattgtatactatagtattatacttatagtatagtatatctaaggtagctccctctaggggtatatagttatataataagatagctccctctaggggtatatagttaagtatatagttaaagtagctccctctaggggtatatagttatatagttaatttagctctctcttggggtatatacattaactatctccctcttggggtatatagttaggtatagtaaattagctccctcttggggtatatagttaggtatagttaattagctccctctcggggtatacagtaagatagctccctctaggggtatacagtaagatagctccctctaggggtatagttaaggtatagtattgggtgtctgggtttagtactactctgaatataagtataaagttaagctatagtataatagtactaggtattttaaagcctagtacactgtgtatcctatgtaatttacaatttaaagtcagaaaccctagcatattaaacccctaaactagcactttttaacactcaaaatagccgtaaaatgggttactcacctttataccataactatacccataatatccttagtacccatagtattatactaaatactaagtaatatacaattgtatgtgataaatatggtaataaattgatgtattgtttattgtgtgatgatgttaagttgttgtttgatttgttgttgtagttgataaagttgttccatttcttctagttgattagacgcagtattctcgtttgtactgtgcaatatcgaacttatcgccaaatcagctgctatggaacataaactccgacacgagtgcatctaaaccaaattaaccaagttaacaaaattaacaaaataaataaataaaaggttacaaatgagtcattgtgtagtttgacttggaaattatcgatttgtgttcttagaatggaatcctgagtggtatcgatctgaatccagaaatgaactgatgaataattacttggcacgactctaaaattgagtaatacgccgtgattaatcttttacagtagatatttatactcttgtggattcctaccctctcctcctccaactgctccattaatacttaataaactcggaatatgtttacaccattttttcggtattttcagaaaaaatcacaaatatcacacgaattttagaattaactttattttttcaaattttcacagaattttagaaatttttcaatttcttcctttttcacaatatatagccaaaaacaacacgccaaataattaataaaattaataataaatataatataaataataataataaattgatataatagaataaatatgatatattacaggtcaccaccaatcgtcttcaaactcttgaaatgttccggcggagttgaatttgttcttgattccgtcagtgtccctgacgtctctggtcattccgtatctcctgttaacagtgtttccagtgttactcatgtttccagtgttacccatgtttccggtgttacccatgttacccgtgatacccctccggctcccaattgtattcacgagtttcttaaaccagggcgggatttcctgattactctcctgtagcaacagtaacaaatcttttaaaattggcctattggattcgttaacgagtgatgtggcaattccgatgtttcccgctctcccagtccttccaatcctgtgcacatagtcgtcgatgttcgtgggtaagtcacagttaataacgtgggtaatgttactaatgtccagacccctggccgccacgtcagttgcgaccataatcggcctaaccccggccttaaataagcttaacgctttttccctatcctcctgactccggtcaccgtggatattcacagccttaaagttttcactcaacaggtagccctctatgagatccgcgcgtttcttagtttccacaaatatcagcactaggcctccgaggttggtattgtccctcagtagtttgatgaggtacttgatcttttgatcctggtctgcgtagagaagccgttgtttgatgaactcgttggtgcttccaacgcgcccaacggctaagtatatgtaatcactcaggaattcacgggccaactgctgtatctccttaggaaatgtggcactaaacattacagtctgccgtaacggtgcttggtccgcctctcctccacccctcacatctctcacattatctttactatctctactatctctaatatctttactatctctattatccctattatccctgtgatctctagagttaataatatctttaaaatctctatgagagtctttgtgggtactcgtcctagtacccctgtggttggtgggcatagtgggatgtgctagaatggctttaatttgtggtgaaaatcccatatctaacatcctatcagcttcatccagtactaaatacttaatacacgtgaaaattatcttcctgcgttcgacgagatctgtgaggcggcctggtgtggccacacaaatgtcacatcctctttctagttcaattagctgtctcctgacttctgacccaccgtacaacactacagtgcgtattccagtgccgaaattgaactttctggactctgaaaaaatttgtacggccagttccctggtgggcgacagtactaggcacacgggtaacgcaactctggcgccgtacagaggactcagtgtgggttgttttggcggtcctgtcctcagcattgaggttacaattggtaataaaaatgctgcagtttttcctgaacccgtttgagcacaggccattaagtccctgcccgccaggatcacagggattgaatgcttctgtatgggcgtaggctttgtgtagttaactttacgaatgttagggattaacttgggatgtactgaggagtcaaattcctctatgggcttgatggaagagtcgccagtcatctggacgggaatgttatcataactgctaaagttaatccccgtactcatacggttcaaaggctcaaatacctcagactccttctcctcatagtaacgacggtcacccctaatcgcccacaacgtaggagcctttccaacatatctgtacctacttcccatcggacggtctccaatactacgttctgaggtattggagattgtacggtctcccacagtacgatctgaagtgttactaattgtacgatcagtaatggtacgttcggaggtacgttcggaagtagtagtgatggtacgttctgagatacgatctgagatacgatcagaagtgtgttctgaggtaagattagaagtgtgttgtgtggaaattctgaggttccgatcgatgcttgaggagaaagagttgatatcgtcgggagtgagtgggatattccgctcgacgatagggccagtgctagactcagtacgatacttggaacttttagacaaatcaccgccattaaactgacgagacctcactaaatcattgtcaacacatttaaccaatagtaactaatcagtagttaggcagtaattagggagtagttagacggtagttagggagtggttaggcagtaattatggagtagttagggagtagttaggaggtaaaataaggtaaaaaatggctattttaagggttaaatagaggtattttaagggttaaatagaggtattttaagggttaaatagaggtattttaagggttaaatagaggtattttaagggttaaatagaggtattttaagggtaaattagaggtattttaggggtaaattagaggtattttaggggtaaattagaggtattttaggggtaattttaagctaaattagggctaaaaatagccattttagtccttaaataggggtaaaataacggttaaaatgactaaattagctctaaaataactataaaataactaattaatagctttaaaatgactaaaatgagccaaaataatgctaaaatatgactaaaattgggtaaataacactaaaataacactaaaatatgactaaaataactctaaaatgactaaataaggctaaaataagtgtaaaataaggctaaaataacactaaaataacacataaaaacacctaaataaccctaaattatgtaaaattactactaaaattacgcccaaatgagcataaattaatgctaaataactctaaattaaggataaataaaggctaaattaagcttgattaagcttgattaagattgattaagcttgattagtaggtggttgagggataattaggaggaaattacgtgtttggtttgttgttttgtttgaattgaaggactcgggtggcggattccttcggtttggcggtaggtaaacttttttcgcgggcttcgcctgggcctcggttaacttcacttcattctccattttctctattatttacacttgtccacgtaacttacgcagtaatacttacgatttcagatacaattcacaatttcagatacaatttacaatttcagatacaattcacaatttcagatacaattcacaatttcagatacaattcacaatttcagaaatacgatagataaaatgataaaaaattgttcaataattgataaaaattgttcaataattgataaaaattggataaaataatgattgaataataattgaataataattgaatgattgttggataaaaaatgtggaaaggaggtaaaagtacaggggaaaaatttatacttaagttttaattaatttttacaggcagagtacccaaccaaataccccggatggggcttcaaaagtcatttttatcactcaattccgccaaactcaactcaatattcaccttaattcaccttaattaattatacaaattttaactacactaaaaatttttaattccaaactcaacaaatttttactcctccccccttttatcctaatgacccagatttcacaagattaacaagccaatttactataaattttaatataatatttaattaattaattaattaatatttgatgggttgaaattgatgttaatttggctggaatttaataatttcaggttttaggccaagtttatgattttagcgtatttaatttacgttacaatatttacatatttaacattgattagttaatggttttagaggtgtaaaactgagacttgcgtgaaaatgttgcaaatgagtcaatcagtactttaaacacttcataatttaatttctacacaattttttcaattcattaataattcatcataatttttactttttccaataatttatcagattttaaccgaaatttttcatttttaactgaaatttttattttaacggaagtttttatttttttgtgtataaaatttgaatccagttgattttttaattttgtttaattttgtaaaatatttccaaatttcaatctcaaaccaatgccagtaaataactcaacaactgtaaactaatcccaaataacataaataaatgtgaaataacgtaaataaatgtaaattaatgtgagattattgtaaattaatgtgagattattgtaaattaatgtgagataatgagaaacttgttggaaaagttgataatgtggaaataaatgtgaatatgtgaagatggtgtttggtcgcatatatgaatatgtgtataacaaatacttcaaaaaaccgtaacctctactacttaacatcccatcacacaattacacattctcttacacatttacacattctcttactaatttacacattattatcacgagattacacattatgaactatgtttaacttattagctatgtataattggtataatatgataatatagtgacgaggagttgcgtgtgataaagttgaatatacgtcaggtgtttgtgtgttcgaacagggtaaagacgacaaagtacacgccgtataattttatcttcaagaatttgtacgaacagctgtgcataccctcgaatctctacttcgttttcatcgcagtcctacagtccacaccccaagtaatttttcatccaatattgttatttccataccctaaccatacccccaaagggagctatcttattatatacctaattatataccccgagagggagctactttactatacctaattatatacccctagagggagctaatttatatacccctagagggagctactttactatactttactatatacccctagagggagctactttactatactttactatatacccctaaagggagctaatttagtatatacctagaataccctgaattgtataccccgagagggagctaattaactatatagctagaacataactacatatgccttagatacttaaaaccgtaaatcccctttggggactaacctaaacccttaaaaactagaatagctagacctaaaaccccgaaggataatcccctccggggacttacctaaaccctaataccttaatacaatactaatactttactttacaatactaatactatactttacaatactaacccctaatgccctagaataaaatacctaaaccctaataccttaatacaatactaacactatgtgtataggtttcatcaacgcagggctatccggtggtattattaccgttgataattgtgttgttgttttctgctttaaaggacggttacgaggactaccagcgctacttgtccgacaaccaactcaacaacaacatcgttcaaattgttaacctcccctacgtcacagaccagtccaaacttatcaacaaagctgatactcataagggtaaggtagacaatgtagacactggggacactgtagacactgtagacacaggggacaatgttgacaatggggacaagggggaaatgaattctgagggtgagaggtacgggtttgtgaagggtgcgttgaggaataaagtgttggtgaacaagtattggaaggatttaaaggttggagaatacgtttttttacagaataaagacattgcaccggcggatttagttttactagccacctcggaggagaacggatttgcctttgtcgacgcttcctcactcgatggagaaaccaacatcaagaaaaaagaatcaatttatggtgcgttactgctttacggtgtgaggtccgctcacacagttatttatcagttagtacaccccaatgggactctttttgtccccctgttactactaactcagttactcatttacgcatccccattatttactaatttgcaacctttttggtattttatttattatttacaattgttttttaccaaatgtgttgttgaagcagcagaaattgaggaaaatttcctcggtatttcccagcccgatcaacttttgacattatttccaaaatcccattttttacaattattttttcccaaaactaacattactatagataataatagataatattgtaaactctgtaacaatggtgtagatgtgtacaatgagttgggaagtgactttgagcatgtgataactgaggtgcagcgtttactgggccacttcaagtgtgagggcccgaataaaaacctcattagcttcgacggtcatctcaagtatcatttctcccagaaaatcactcccgtcccactcaacaccgaaatgaaaaaacttctcacttcctacaaatccaaactacacacccacacatccaacctcaatcccacactaactgatactcaccccgtcaatactacagagaatactacagataatgtagacactgtggagaacactatagagaacactgtagacattgtggagaatactctgtcctccgaatctgctcgtgttagaaatgagagtataaatgactttgagagtaacagtggtgagataagggacgcccaggtgagtttgaacaatttgctgttacgcgggtgtaagcttgtgaacacgcagtgggtgatcgggttcgtagtttacacaggccacgacactaagatatataagaacattagtaaggctccgtataaggtaagtaacttgcagcggaagatgatgagaacaacatttctaatttgtgtgatccagtttgtcctgtgtctgattgccacattttacaatctctacatgcacacgcataaggtttacgagaagtatccgtacctgtcactccagacccgggcatccgggctctacattgtctttgtgtattacttctcctggatggcactgaccgccaatttcgtaccaatcagcgccattgtgacactgaacgcagtgaagttgattcaggggtttttcattcaactggacgattcaatgtattgcgaggaattgaagatgaacgctaaggctagaaataccatgctcaatgaagaattaggacaagtcaaacatctgttttccgataagactggtatccgttacggtgcttgcatccgctcacacagttatttatttacggagttagccacccagatgggactctctttgtcccctggaaacccagttatctattacttagttatacagttttacccatccccactacttacagtttttgcaacctttttggtatttatttattatttacaattattttttggtaaatgtgttgttactgcagcaatgtggaggaaattttcctcggtatttccaacccgatcaacttttgcatttatttccaaaatccataaatttggaattatttttcaccaattttgatcaatctaaattactagataatcacctactaacctttactaccctttattaacattacctaacccctacataccattacctaacccctacataccattacctaacccctacataccattacctaacctcgtaaataaccccttacctttccccgtaactgtgttataggaacgttaacgtgtaataagatggagttccgtaagtttagtataatgggtcacagttacggcaagggttacactgacgtcatccgctttgtctatgctaaaaagggaatttacctcgagtctgaagcgtccaatcccaactacgacaaggagtcccatgtaaacctagttgacgacacgttgttccaggaacttaatgatcccagccatcccagacatgagtatttggttgactttttcttccacttggcgctgaataactgggcgatccccgacagctccgatgacaggatttacatgtgcccaagcccagacgaactctgcttcgtcaacgccgctgccttttgcgggttcagattattacagaggaactccaactttgccactgtatctgtgttcaacaagatttacaaggttaaaattattgctcaagccgatttcgactatagaaggaagtgctccacaaccatcgtggcctttcacaactgtagtaatagtaatactattggtagtagtaatagtaatagtaatactattggtagtggtagtagtagtgtggataaaactgctgctggaggacctgaccccgtaacgcactgccgccagagtgtgagtgacgagttgctgaacgaggacatgagcaagtaccggataatcctatactgcaagggcggcgacaacgtcatggtcagtaaactcaaagagatctccgaagtggactccgtaaccctccggaacatgaagaattactccgttggcggactaagaaccctagttttcgccaaacgcgaactcagtcacacagagttccgctcatggctaacggagtataacaaattaaaattgtgtatagagggacgtgacgaaaagttggcggaatgtgttgggaggttggagtgtggcttggagttgcagggtgtgacggggattgaggataagttacaggacggcgtctcagagtgcatagaaaagctcctaatggccgggatcagaatttggatgctcaccggcgataacctcgacacctcaatcaacatcggaatcgccaccaacctcgtcaacatgctctccgaccgcatcatgctggattctaacaccctgagatattgtgacttagccacggtgatacagagcaacgtgcgccgtatcgatgaggaaaataacatctccaggcaccgctgcatcatcatcgactccatcaccatagaacttcttttcaagggtatcactagtgaacacaatctaaccaatgatcatacagagctcagtgtgttatttctagaattagtgcgccgagtgcattctgtgatatgttgtcgtatgactccgtatttaaaaggtgccgtggtatcatttgtgaagtcgaggctgggtgggataacgctggcggtgggtgacggcgccaatgactgtaacatgatccagacagcacacgtgggcgttgggatcaagggccgggaaggttcccaggccttcaacgcgtcagattttggcatcggacagttccggttcctctcaccgctcatactacaccacggccggtgctgctacaggaatacctccaagtgcatctcgtacatgttttacaagaacgtaatcctcattattcccctctttttctatgcgtatataagtttattttctgggcaaaaaatctactattcgctgtttgtggcgatttacaatgtggtgttcacgtcggtgccggtggggatttttgggattgtggaccaggactataacaaaagcttatcggcaaagtacccgcacgtgtaccagctgggacagcggaactactactacaacgtcgtcaagttctcaggctggatacttaacgcggtgatacagtcggcaataatattcttcatgatgacgctgggactgggcgatgagttttccatacccttttccaagggactaattgcagacgctccgacactgggaattatgctgctgtccgccgtgttcataattgtgagctgtaagctagtgttggagacgtggtactttacgaagattacgctgctgtctcatttgattagtatttttttctttattgtcacggtgtgctcgttttcagcttcgccagtttattcaggtgcggtgcgccgttacggtgcttgcttcggcgtgtattagttatttctacggagttagccaccccgatggctctctctttgaccccctggaaactcagttatctccttagttatcccttggttacttatccctacggggttttagtttacacattttcactcactttttagttatttaaccttttagttgaaccttgctccgtaacggagtcttaactgcatctattaatattgtagcgaattcggtgggatctgcgtttgtgttgtttacgagttaccggttttggatcgtgctgctggggacgctgatgctgtcaatgtacagggactacttttacaaggtgttcaagtactcgttctgcccgcactactaccaccacgtacaacgagtcgagtacctcaaaatcgaagatcccatacccttttaaccttaatctgttcactatagtatttgtgttattactgtgttttactgtagtttactgtattatagtgtgttttacctagtaatatatacctatagtagtatactatacatactataatatagtatgtatatagtatagtattaggagtatcttagggtatagtatatactttagtatacagtaagataacacttgttacagtactattaaacacttactactccttaacactgttattataagcttaaataatgtataataaagtcattttcactatgttatatacacctactactataatatactatatattatatactatgtataatatactatatataatatactatggtatatattgtatatatatagtagtaggattatgttagggtatatatactaggtactactaactacttcttaacacttgctaatactgttaatacagttattaaacactctaaatagtatgttataaccctttaaatgatattataacatactttatattcaatcaatttaccagccgaaaccataaacccagacacttacaccatacacatactatataacatactatataatatactacactatatgatatatactattatatactatatatgtatattggagtatactagagtacattctattacattacttaacacttctaaatactcttaatactgtttaatacagttataaaacactgtaaacaccatattagaaccgtttaaatagtattataaactgctttatatacacccaatttaccagccaaaatcaccaaacccagacaccaaacccttactataccactataccatgtacaatactatgtataaaatatgatatgatattattaccaattattgaggtgaagtggtttcttgtgggtgatgaatctctgggagtgtattatcagtgggattattaaatccatattaacatcgtttagccacagcatttccagcacttctgggaggtccagcaggtgaaaattaaccaccagtgccacgagcaagtggttcatctcgcccctgagcagcaggttactcacggtgtcgtggacgagctggactgactttgaatacctcgcgcagtctatggcctttatgtaattattattcttcatgtagattaccgaggccttggagtagtggttgtgtctcaggtatatttttgctgctacgtcgcgcatccgtgagagcgggtgttcctccaacagcgcacacaacttcacatagtcaaagttgatatactttgttacatcgtgctccaactgctcaaagtcacactcttccaccaggagttcgtagagtgtgtcgttaactaattgggaatttctatcggaatattgttgaaaatactccttggccaactgtatgcagttgttatttttaagtattttaatgacacgcccggtgtcaagtttgctccggacacagagtaagagtttgggcacgagtgtcgggtactgctgaatacaaaagtacaaagccttgtaaatgacttccgtattgctaacattgttcagtgtgcggaagaagaggtcctgttcaaaacactctggatgcaacgtcatggagaggattgccttgtctgagtcatctatggtgtagaggaacacagcctctttccagagccataggttactgcattctctggcagttttggagatgttaagtgagttagattcaaaggccacgttccttaaatgctccattaggagctctgggtgatatttggcgatgcaaattgccaactctgtagaggtggctacggtcttggtggtgttcctcagtaactcaattaagtcgtcaaagaagcccatgctctcgtaactactcacgatactcactaagaactcgggataattcaacaactcactgcccaacctgttcaacatctgacgggcagtcaaatcaacagattccgtactatcagtttctaaggaattattaacataattatactatagtatagatatagtataaatattatataggtatgataatggtatagatgtgagttgggtgattttgttatcaagagtatacactttttggaaattaactatatgatttgttgttacgagttaacacacggctaatcccacttcacaaaaatcacataaaatcgccaaaataacaattatcacaaataaccaatagtaataattatcaataatctcaaatatctaatagtatagtttgtacgtgtgagatgtgagagaagtgtatcgaaagtttgtttgagtattttggggtttttggacttgagtgcggcttcggacgcttcggtgtatttactcagctgtacgtagcaaactgccagcttgttataattattcattttcgagtagatttcaaccgcttccgcatagagattcagtttaatcagttctgtgcccacgagatttagatcagtgttggtgttgtttagagtctctgtaaattccttagcacggcccaacttggccaactgtattaacaaatcattcacaagttctggtaactgttttatctttgtgctttccgtcagccagtggagcagtaaatcatcctctgaagcctgagttagcttctgtttaatctcctggtggtgttggaagttgttgctcctgaggtaacacttgatactttcctgtaatttgtcatggtccaagtatatttttcccagcttaaaccatagcaactccttgtccacccttagaacgtaagaatacatctcctctaacacattgtccactgtgtcaacactatttacactgtcaccagtgtgtacattatttacactatcacctagagtattcagtagtaactgtagttcgttgaaggcttcggtgtgtttgttaactttgttgtagagttcgtatgcgcagtggtgtagatgtagctcattggctaatttagccagtgagttcacttcataattgttcaatttactcaagtaatcagagagtttagagggattagtcttaattgtagtggcgaggaggagattttgcaagttactattgttggagaattctgtctgattcagtagtaaaccctccaaaagtgtgatgagataattattcaagttttctgataagaggaatttgatcagcacgctgatctcgttactgttacaattctcaatacacatcgaaatcagatcctcaaacactaaaattattattaatagaatatgagttgggatagtctagtgagtaatacacattccgggtgaaaaccaaagtcaagtgggaattggcccggatagtagtgaggcgggggacctacccactaactatctaactataatattattgtactacagtttagtacaatattaatactatagtaagtcagaatagtctagtggtatagtaatatctactatgaactccaatgtcaagcgtgaattggcccggatagtagtgaggcgggggactgccaaggagagctaattaactacataactaattaactacataactagctatataattaagtagtaaataactaatactattgtaaataactgtccggagggacaaaaagagtcccatcggggtggctaactctgtagctaaataactagtgtgagcggacctcacaccgtaacgcaccatttgaatgttgtaggaagaattgatagagtttgagatttgacttttttagcagaaattggttaagttgtttgtgtaactgatgtcttaggcagagatcaatcatctgctcatccaacccaccaaccgtatacacaagaatactcaactgcacatcaatctcctcacaatactgggctattacaaccttattataataattattgtcagtgagatgttgttcggggttttgtgatgtggtgatgtaaatcttcatgagtgcggtgtggagctcttcttccttatatccttccctcactcttgactctagaaatgacttcagcatcatcagctggtgtctctcttcactaatgttaataatagatttgattaggagcggatctctgactgtggctaacactttgttgatcagttgttctgaggcggacagatccaacagtgtggcgataacttcagaaacagctgcggggttaatactattcacaaacacgtcaatgtattcacgtaactcgttgttatagaggtgttccaccagttctctcaccaagcccattcggttacaaatgatcatcaagggtttgggatttgccagacgtgatgacttaattaattctttagcttgggagaggttgaagttgttgttctgtaagaggagacgttccaactccgtaatctcatccttagaaatacataaacttatgtaacgcaataccaactcgttactgtccttgtcaactacaaatattattagggtttagagctatttttaggcttattttagaggtattttagaggtattttagaggtattttagaggtattttagaggtattttagaggtattttagaggtattttagaggtattttagaggtattttagaggtattttagaggtattttagaggtattttagaggtattttagaggtattttagaggtattttagaggtattttagaggtattttagaggtattttagaggtattttagaggtattttagaggtattttagaggtattttagaggtattttagaggtattttagaggtattttagaggtattttagaggtattttagaggtattttagaggtattttaggctatttagtagtattttaagcttatttttgaggtattttaggcttaattatacttattttagagctatttttacatattttagaggttattttagtactatttctaggctagtattttagtgctaatttatagataattttacatattttataactatttagacctatctagaggtatctatgtgtctaaagaaacagtgttgagaactacataaatattatctatttacctgtattggaatgtattattggcagtgacttgagaaactggtaagcaatgggattatcctgcagtagctggtacaacttcatggcatcgattttcccgtacaaggccagacaactactcaccaccagctccgactgcacattctccaacatcgccctcagcaattccaacacatcctcctctcccatggctaacaaagttttattcagtgtcgtcctactcaacacatttattcccttgagtaccacacgcttaatatcttgtagcttagtatagaacttgagagaatattcgtagagttcaaactgttcgcaaagattggagatgtggtctttattgaactgtgtgagaatgtcaagttgtagtatagtctcagcaattcggacgtcgttcttcaagttaacctctaataatctcgtctgcagttccccgtgctccttcttattactcttcaaatagtccaacaatatttcattcaactccttaagtttattgagtctgatgagcaactctgtgatttctgtgacatcacagagcgggccaggcttgtgtgatattaaagagttgacaaaggagactagagaattcggttgttttgtggctacagattccacaatgtgattgatattcaaattattcaatacaattttgtcaccctttaggtcatccctgagatcacccctgaactcacccttgaactcattgttaacagaaataatcttggttatgtatggaataatgttatgtatttgattggtttggattaaggagttgatggctttgtggtgtaggttaagtttggtgtacaattgaaacgctagtgagggatcagtttgtgcgagtaagtcagcaagcggttcggattccgttaatttatcattttcaagccatttttttaacagctccttacggttctggagaatcacaggctttaccagctctatactctcaatctcattcagcctaccagactccaacaacacactaaaatagtgactcaacgcattacctacagaattattagggaatatacagataatagtagttaactaaaattggtcaaaattggtgaaaaataattacaaaaaatggaaatttggaaataaatgcaaaagttgatcgggttagaaaataccgaggaaattttcctcaatttctgctgcagtaacaacacatttaccaaaaaataattaacaaaaataaataaatgtcaaaaaggttgcaaaaactgtaagtagtggggatgggtaaataagtaagtaagttagtaggaccccgtagggaaaagagagtcccatcggggtaactaactctgtagctaaataactgtgtgagcggaagcaagctccgtaactcacccgtttctgtggttttatttttaaatctttgaatggtgtctagagtcctgagttggttggacttgagggtagcaacaatttgtgcagcttgtctgtactgttcattattgaaaaaactttcaaacgactctaatagcaaatcgtcagaacctttaagaccataacaagttgcaatcccaactgaaacttcctttaaattggccagccccaaattgctgagtgatgacagtaagttatcctcgtcaacaattatactaatgacctcaccagccctgttcacagccaatgcaccaatactcctaccatccaacctcttattacaactcacaaacaatggcattgaactaattctggaactacggaattgttaatagtgtggacactagtgtaaaatgtgtggctagtacacagatttaccaactaattatctaactataattataactataattataccttaaatagctaaataactaacggtataactatagtaaagttaattactacttagtgtgtaaaatactaaattaagtgtgtaagaatgtgtaaaaaaagacacgttagtatataaataagacacgttagtgtgtaagtgtgtaaaatgtgtaagaatgtgtagagatgtgatacgtgaagagaagtgtgagagtggtggagtagtaaaagtgtgcgaaaccgtttttggtgaggattaggattaacccgttggagtccagcacatgaattgatatcgggaaatcattcggatactcctcattccgctccatcaaactgtttatcttcaatatctccacagtgttaccactcacaggattacctgtgttaccactacctgaattgtttgtgtttgaaagagtgccaatgtccattaggtgtagtttgatgttgtgtgtgttttttttatgttcgcagaagatgagtaggtttgtttttttgagtgtctggttggaggttcggagttgtccgaaagtgccggcgtagccttcaaataactgctgctgtctcttgtctacagagtataattgtattatcccgtcaatactgacaccttggtcattggaatatatgccaaataccaggcaccacttaccagtggaatcggtagagtacccaacaatcttagtactggtgtccagtaatttcccggtaagttcgaagataagtttgggagttgagcctacgggccagtggtacacgtgggtctcagtaataattacaagttcagaggtggatagccatttccagtaaatgattttttggtcaaactggtgatagcccaatttctccttgttctccaagttgaacacctataatagggtttaggagttggtaaggtagttaaatatttattggtcaaaattggtgaaaaataattgtaaaaaatgggattttggaaataaatgcaaaagttgatcgggctacgatttaccgaggaaattttcctcaatttctgctgcagtaactgcacatttggtaaaaaacaattgcaaattgtaaaataaaatacaaaaaggttgcaaattagtaaataatggggatgggtaaaactgtataactaagtaatagataactgagtttccagggggacaaagagagtcccattggggtggctaactccgtaaataaataactgagtaataaataactaagtgagtacaagcaccgtaacggagaacatacttgtacagagtaggaattatcgagtttggctctgagagcgataatgggttgtgtgggattcatgatggcggcttcagctttcatgggtttccgagtgacggtgttgttattatacatgtcaatgatggcgacggttaagttatcgccgtcctgctcctttatacttacgtaacggtcaccctcaagtgataaaacatcaaacttaaaattaccctcaacaaatcccaactcacgcaactaataaattatcactaatatataataaacatatttatttaatatttatataataatttaatatttatataacaatttgagagggtaattatatatataaataagaaaaaagttacgttgagaattgtttgggttatgattggatttttactcattctataaaataattattaattatttaacatattttacaaatcaacaaattaacaatttaaaattatttaaaatatttaaaaattctaaactggtttgaggatggaagatggtaccccgggatggggaaaattttaacaaaatatccacaataaacataataatataataataatatgataatatgataataatgaataatgtgactggatagtgttaatgtgtggaagtgtgaataagtatgtgttggaggagttgttaacggagtatgagcagaatacggagataaacaataatactgaagatgaagcttatcaacaatacgcctgggaattaggtaactctccattaccattaccatacctaagattcctacaacattacgtatatagttaatattcttaactatataatgtaatatatcaataaataatacgatccctagcagtatagttagtagtacggtggattagtattatttactggtacctggaggtaccgggttcgaaaccccgggaaataactatagagttaacttgttatccagttgaattgacaggaataatactcttaggggagtaagaaaactcctaaaccctgataaaaatagctaaataacctaaacagtcaggataatcccctaaggggacttacctaaaccctaaaatactaataccctaaccctaaataactcaataccctaaaatacctatggctaaatatgtatatctaaaatatgtatggttaaaatatagttggatatataaaagcttaagaatttgactatagtagatgcctctagttctagatagtacaatcccggggattacctaacctcttaattacctaacaactcctaactaaataaataatacgtagaataataattgtagatgtggataaatcatgggagcaactggtggagaaggatggtgtgttacagtttataaagcctcagacgaggctatatcaggagtttgatctggagtatcagaataacttaaaacaacataatcttaacctcatatacaaacgggggattattaggtccgttacggagcttgctaccgctcacacttatttacacatcttttatagtattttacacattcttacacatttttacacatttttacacattttacacatttttatttagtttacacatttttacacattttacacatttttatttagtttacacatttttacacattttacacatttttatttagtttacacatttttacacattttacacatttttatttagtttacacatttttacacattttacacatttttatttagtttacacatttttacacactatttacactcttacacactatttacagtattttacacattactgtgtcttatttcgacactaacgtgtcttatttacacattttacacagttacttagtactctatacttagtgttaaaagagttgtaggagtataatgatattatttgatatgagcgagcagatgcatgagatggactttaaacccgaccgactctactgcgctttcaactcactcaaagtaccttccacacagtttactcagattacacaatttacccagattacaatagttacacagattcaactaactaattacactactattgacttaatgtgacaggagtttttgggggaattgtattcgagtggtccgataactcaggttggtatagtggtgatgaggaataagatttgtaatgtgataacacaatttggtactaaccctaacgagcaaatggaactactctccagcgtactcaaagacggacccgaagggtcctcatcacttcaaaacggcctagaagtattctctactcatgtttacagttgttatgagttaacaaagttgttactattattgttattaatgtgtattacagatgtgtatgaagataatgtgtgatttaccgtattatagtacgagggagattttggtcatatttggttcgaacaggacacttgaccctgggaacattttactcactctcgatcaactcaaacagaattttatcaccgttaattccatctcactctctccagaactttatattctcaaggtagccttactgcgttacggtgtgaggtccaacgggaccagttatttattagtcattttaccacagagttatccaccccagtgggactctctttggcccctttggttactagttcctcatatctatactagttacgtatccccattatttctcaatttgcaacctttttggtatttattttactttttacaattaaaatttggtaaataagtggttgaagcagcagaattgatagaaaatttcctcggtaaatcgtagcccgatcaacttttgacattatttccaaaatcccattttttacaattaaattttgttaaatttgacattaataaattgtgtaatgtttagaacatatgtaaggagactggcggtaattactcagtggcacgtgacgtcaaccacctaaaactacttttcaataatctcacaattcctcctccgtggtattatttacactattaacttattcaactattaactgtaatattactgtataagtttattaggaagagctggatggagccgatactgataaaggtgtcatttccaccgatgaagcggggtacatcagtatccctatgctgctgtcataacaaagttgttaatactgtttacatttgtcctcaatgtcattccaactcttgctatatccccaccaaatgtcaggttagttactccgttacggtgcttgcaaacgctcacaatctttacttagtcacacaattctctacttagttatcccagtgtacttatttatctatgtgtccttggttatgagttaatcatacgctgtgttattactatagagtgtatagggatgtggtatatttatggtatcaccgcctgacatatcaagagcatttcatcatctcatacctccaaaaccctttcatcacgtatttttcactttataacttagtcaactcgtaatttgggaactaatatgaataataggttgaaggtgggatggactgtgtgggatgtaatttgagagttgagagtggttacgagtgtcaggactgtggcgggttattctgccaacactgcgataaatacatacaccaagacctacatcagtgtcccaagtgcctctttcaacattaatctcactaattacttttactttatatagtaaataatactatactatactattatactcttaactatacccccagagggagctatcttactatacccctaaagggagctacagaactataaagggagagggagctacataactatcatagggagagggagctactttactgtatacctttaatactagataaatactgtactgtactcttaaacccagacacgtaatactatactatatatactatatactatactgtgtataatatactacatattattagtatatgtatagtggtaggtgtataataagtgtattagtaatactgtagtatataattaatatagtgcagtaatagtatagtaatcatatttacaagttatttacagtagaattaactcctaaattactaaatttgtatgtattggtaagaatagactaacctacaaacctcttactaacccctccgaaacactcaaaataatactaatattgttaaatatggctgcggaattacagtataaagctgagaccaagaatgggaaacctgttctatacaatagaattacacctgaatctgagtgggacgacataacacacactagacacaaccttgacaatttggaattctacgacttgaatatcaagttaaccaaagtctcccagtgttcaacagagttatccggtctaattttcaggatatttctgaacttcctctgctaccacttggagaacggtgacaaattgttatggaattaccgtgcagatccttttcacagaatacctttccaattattcaatctcaagagaaacactatgagattagtgtttaaagagaacacaatggagaatttgagtatggtgggatatgtgaatgactgggttaagcctggaaaaatacttcaaaaaacaatcaatgggaataagacaattgcgattggagaccaaagaacaattaacaatctcaatcattggttactcacctgttttcccgtctctaaaccctcacaactgattccagatgtcaagagtactcagttaccttcacataatacactgatgctaattactatacttaatatactactgctaattactatacataatacactgatgctaattactatacataatatactataggtaatatactactgctaaatactatacgtaatgtactatatataatataatatgtaggaatttgggtgtaaattagtattgtgaacatcacaaattacgatttcaaactgacacccgcgtaatccaattggagtacaaattttcacgattcaaaagttccaaataatctaaattcatcaccgttcatcattaaacttaattcctgttcattaatgtctataggcttctaatagcttttgagtaaattcgtgtgctggtaatctattttttaacacttgaactacttcaggtttagcatattttctagtaagttctactagctcatccatagtatccagttgtaccaccttcaactcatctttatccttaaaattaaggtaaaaccttttgtacaagccttcctgaggagtccacagtgttaatactgaagagcaccagtcttttttatccgaaaatccagcatactcagtcattacttcaccatcctcgaccctcaaattagcctcagtattcgggaaaaaatctgacttgaaggtggaaaacctcgttccaagcctgggtaggagtagtaaaaaactggcgagggggtaaggaccgggcgattccgggttcggttcctcgacatgataaaccgttacaaaccgttccttatccgcttttaaaacattatcgtcaaagacaagcggacgtacttgctccagcatttttactcccaataataaaattcttattaatccaatttgttaaaatcaaaaataccaactggtatagaaaagattaaaatgccaaatagaccaaattccggaagaattattggtaataaatttgaaccagaataattctatgggggatttaaaccaaattcatccatttggcaaatattaatttaaaattaataaacttaatcatttggataatattcagagattactccattcacatacaattttatttttcttacacattttcatactgtataccataggtaccacttatttactctatactatatagtgaataacattgagtaagaaattacatgggataaatagcggagtagatgggtcctttatgtgttggaaattttttaggctcagatttgagtgtttatcatctgatatctttaatgtccagatctttcctctcaccagttaaatccattatgtataatttattatttacaaggtccaggaaaatgccccggatgaaccctagccactggtcacacacgtggttatatattaacctgtcacccagctttatcgaaaaacatttaacccccaatctaaatcaatgtataaactattttaaattgaaatataaagtaaaatttgactaaaatatgcttaaaatgtgtaaaattagcctaaaataacacttaaatatgactaaaataacacttaaatatgactaaaataacacttaaatatgcctaaaataacacttaaatatgactaaaataacacttaaatatgactaaaataacacttaaatacgccaaaatgtgtaatcaaccagaaattaacattaattatcccaaaatgactattttatgactaaaatatactaaaattatgtataaactaagagtaaaaagagccttgagtaggtctaaaatatgactaaaatagtacaaaattaagctaaattagccctaaaatacctctaaaatacagctaaaataactaaaaataaccctaaataactactaaaatgtctaaaatatgggtaaattatgactaaaataaaggtaaaataaccctaaaatgcctaaattaaccctaaaataaccctaaaatagagctaaaaatagtaaattgagagaatattatatgagtagtaatttccgtttgtggtatttgagtttgtgtaattcactgttgattagtacaatttcattattgacacttgttaatcttttccgttcctcgtcacttaaccttctcctcctcgataactcctccaatttcagcctcaacttcatatttctcgccaactcagactccaactcctccacctcctcatcctcccagtgggatttgttatactttagaatttcattggacatttcccttgcaggctctgttaccacagaattgccaatctcccaactcacattcttcatatcccaacccacatcctccattctctaataataattaagctgggtaaaaattacgtcggagttgatctgtgtgagtttgtgtgttagctccgattcaaaattgttatttgattgtaatctttgctcaagtaccaacgactcaactaaacgcccaaactcgtccaacgtgcagccacactgcattttgtcctcctacaaattaactcagtgaaaaggtaaatagttgactaaacagagtaaaagatacgtgggaatcggctttcgcgtttttgatgaacttttgtactgttttattcttgtcatcaatgccaacttgtgacagcaattccacagcgtcagatcttctaaatccagtctctacaccattattatactaattacattattatactctttacattattatactctttacattattattacgtggtgaatagtaagagtacctttactgtgttctatgtggaagaaataagtaacaagtcccgtgtttaaatcgggggacagcgaattgctgtaacgtgagttgagaaaggctttgtgtttctgggatagtttgttaccgtagaacaacgagtcccaattcacactcaacttcatcctcgtacgctccacgtccatttctacaccaattattattaactatgggtaaaataagctaaaataagggtaaaataagggtaattaaggctaaaatacagctaaaataagcctaaattactactaaaataaccctaaaatactactaaaataaccctaaaaatggcaaaataaccctaaaatactctaaatatgccctaaaatactctaaatatgccctaaaatactctaaatatgcctaaattactactaaaatagcctaaatggtactaaaatagcctaaatggtactaaaatatgcctaaattactactaaaatagcctaaattactactaaaatagcctaaattactactaaaatagcctaaataagcctaattaagtctaaattactactaaaataagcttaaaatatgccctaacaatgccctaaaatagctaaaattaagctaaaataaccctaaaataagagtaaaataagagtaaaataagagtaatttagagtaaaataggagtaaaataggagtaaaataagagtaaaataggagtaaaaaagtggtaaatagtgtagttgatacggttggagaagaaggtgtaggagaggtaggaggagccgaggacgaaggttacgattgaaatcaccttcagctgccataaaaaggttctcttatccgtacccggggtgtcagatgtaccagtggtgtcagtagcatcagtagtgtcaggggtagagttgttggcgactccggaaccgctgctggctgtggatttactgtggaatctgcggtttctcaagaaaaaagagttaaaatttttagagttgatgacggaagttaaaatccgtttatttaccctcagcaaatacatattctacacatttttacacataatttattatattttacattaatttacggaatttagagaatttacggaatttacaaattttacggaatttgccaaatattgtcagaagttatgaagtgactcccccttgaaaattaataatttatttatttcaattataatttaaaattaatattttaaaatttattaacaatttattaattattaattggttgattggttgaaaattggtctgatgttatgtgtgagtggcgatgagtgttttgggctttgacgacacgaattacaccatgagtgatcactactctcacaccgaagactccacacttaacttcttcgaaattccacactcccaaatcgcaaactctctcttcaacgtatttttcctattcctcccctttaatctattttaatttagttaatttatttatttagttaattatttaattggttagttaattagttgattgattggttggatgatgattggtggattagatgtcgaattatgctgagttggaggtacggaatttacacccaaatgacatcaagctaatgcgtaaagcctttaaatcctttaccttacaatattacgtatctaatcactaattaactatgttaactatgtaaataagataactatgtaaataagataactatgtaaataagataactatgtaaataagataactatgtaaataagataactatgtaaataagataactatgtaaataagttgactatgtaaataagttgactatgtaaatatgttgacaatgtggatggtgtaggatttggtgagggaatcgataatggagacgttgtcgttgatgttgagcaggaaacattacaatcagttggtctacaaatcctttctcatcgctcacaagtattctacaactctactctgtcacttattactactgttgcttaacttctactatagttaaatattactactgtcacttattactactgttacttattactactgtcaactattactactgtcacttatatggttacttattactactgttaaatactgtaatactactatagttacttaactactactatagataaatgctattatagataaatgctattatagttaaatgctactatagttaaatgctactatactattactgtagttaattattactgtagttaattattactgtagttaattattactgtagttaattattactatactattactatggttaattattactgtagttaattattactatggttaattattactatggttaattattactacagttaattattactatggttaattattactacagttacttattactacagttacttatatggttaattattactatggttaattattactactgttaattaactactatggtcaactattactactgttaattaactactatggtcaactattactatggttaaatattactacagttacttatacagttaactatatggttacttattactatagttgaatattagtacagttaactatatggttaaatattactatggtaaataatatggtaaattgtgtgagaatatggttaggaggattaggttgagtgagatgatggatgaggctgagatatttgggatgcgggagttgttgtatcagtggcgtttacacacactaaaccggactaccatgcgggagaatgaagttaaggccaagctgttccaccagaccctgatcaactcaaagtatttcaagctcttccaacaacttctaacactcaggaccaacaagattctcaaagtaattttcaacccctttaattatttatactgtaataatattgtgataagtagtgtaattatggtgtaataagtagtgtgataatagtgtgatgatgtttgtagttgatgcgtgtggtgtgtttgatggagaagaatgtggtgaataacgtgttgaggccgtggagtagcctgagtaaaaagtataaaagattacaactctgcaaagaagatatcaacaacaattataacaagtaaccacacagttatatagtttgcccagttagtagtagatataataccttaactatacccctagagggagataattaattatataccccaagagggagctatcttactatacccctagagggagctgtttaactatatacccctagagggagctacttaattatgtacccctagagggagctacttaactactatacctagaatacctagaattatgtacccctagagggagctacttaactactatacctagaatacctagaattatgtacccctagagggagctacttaactactatacctagaatacctagaattatgtacccctagagggagctacttaactactatacctagaatacctagaattatgtacccctagagggagctacttaactactatacctagaatacctagaattatgtacccctagagggagctgcttaactatataccccaagagggagctatttaactatatgcctagaattatatacatggtactgatgattgttgtaggtatttgaagtgtatggtgttgaatggtatgtgtaaggtgtataatagaagaattggtgtttacttactcgacgttttcatcgtcaaacgctccaaatccaatttcctacactctctcacacacttctatcattactcccttaaagtaacttcttacacattcttacacattcttagttagtttacacatttttagttagtttacacattttacacattcttacacattcttacacattcttagttagtttacacatttttagttagtttacacattcttacacattcttacacatttttagttagtttacacattttacacacattttacacactttacacatttacacactttgtgtcttatttaaatattacggtgtcttatttaattattactgtatgaatgtgtagttggaggacaagctgtgtaagagtatgaggcgtatgaggatggagaagatatttgacatttggcgattcgcctcattatacaaactctccactcaattctaccactacaaactcaaatccaaatccctacaccattggtatcaccaatctatttacttatctcctgtaatctacacattgtataatgttgtaggcggaggtacggtgtggataagaagttactgaggaagaaatttgagttattgaaacgtgaagttgatactaagcttttacaactttactaccacaaacttacacactcctacaccagcataaagttgagaaaaaagttacttcacaacttagtcaccaccgtagacattacctccaagaaaataacattacaattgttatacaataattataagagtaaactgagagaggatatgaacaagagaaagtgtgagaggtattgtaagagtgtgttgtaccgtagagtaatgtcgatactatcgtcaaacgccattagaagatgtgagaaaagggataaactgaccctggctacgataagttataaaagatatttactgtcaaatgcttttaacgagttggtaaaattatactctgagaggctccggaggtatgaaaatttactcataaagtttaataacttaagggatttaacactcaaaaaatccctattcaaggtcttaaaacaggctattcaaaagtcacaacatcttaatcatatacaacgtatgtcctacagttaaatattcctagggtatagttaggtaattttaagctatagttaggtattctaagagtatatagttaattagctccctctaggggtatagttaactagctctctctcccctaagaatagtagctccctctcggggtatataattctaggtattctagggatatacagttaatttagctccctcttggggtatatctaagagtatatacttaagatagctccctctcggggtatatctaagagtatatacttaagatagctccctctcggggtatatagttaagtattcttggggtataattaagtattcttgtgggttagatatgccctgtacagtacaagctccgtaacgcatttatagaaacattgtgtctgagctatgagaaatacctgaagaagaccatcttcaagagaatggaacacataataacaaccaattctaaccgtaaaaacgcgctagtcagtgaactgaccaatttactcctacgctcctctgaccaaagtatgacggggcttaggctatttgtgacccctttgaagagtgagttactagtgttcacactgtatttattaacgttaaatacaagatttcactatacctacgatttgtactatgaactatccgacgacgacctcatcaactcacttctcaacactattaacacggatcagctgacagagttcagaaagaacaataaagccttactataccagttaactctttcatttatctcaacaaatgtaaccactggtatgagtgatataccactcccagtgtcagagctactgcagcaactcttcatgcagcaactatccatgcagcagctaagtaacaatagtattactgaaatattacgtaaactacccgtgtggaaactaataaacctaagatttttattattgaggaagccgaaaatattaaaatcctggcggtatttgactgcgcagatgattaccaggcgtgtgtgcgactcggagtttctggacaatttcagccaaatcaacgcaatgctcaggaagtccaacgtcttcagccactggttacaactttctacagagtttaaacatgagaaattacgtgttaaggagcaactctacacacggttctacgaccacataaacagtgtggtgactgctagaaaatcagttccctacacattattatattataattatgtgattagtgagggtacgggagtggaattggttgaaaaggtgagaaattggtactggtcgtttctaaggcggaacccccaggcatcagccccgatcctcagaatcctgtggttacggaggatatttacacactggcacgcgtacgtcatggacgacctcagcatcaaaagagttgcaagcgagttttgcagaatcagcatcctctttaaatcctttaaaatttggttcaacgcaacagcattgaggaataccaaacacgaacaaatgtgtcaaaatattagacacaccgttgatattctgttgaaagagtgggtcctggtgggatggtatagaattagtaaactaaacacagtcctaaccgccaagaaatatcaactcacacacaaactcttcagccagtggcataattatacaagttataaatcattgttaaactgtcaccacaacactattaacaaaaggtatttaatatttactaaaataacttagttaatagtgacaaatatgttacaggacgagtaggggattgttaatgaagtattacaacgtgtggtatgaggcgtacgagtgcaggatgagagaatattacaactccgagcagtcgtcacagtataataatctgagaataaagaggagacactatgcgtattggtctgggtactgtaggaaaaaagtgcacttactacagtgccaacgggagattagagataattacgccctaaatctcaagaattattatcttacacttttgggcacaatttgcaaactcaagcagttacacaatcaaagcgttttgaacagaagtttaaccacgtttaaactacttttattcaccaaaaaaatgggaactctggtgcaaaccactcttgagaatagtgtaaaggagggtgccaaacggttcctcagtacgctataccacacggtggaaactcagagaaagctggacaatactatgagaaatgagaagatgtatttgctgttgtataaattgagtaatgtgaagtttgatcggacactccgggggatccggatactaaacgccaacgcctattataacatacggtacaaaattgtacaaaggagacattatcgcacggttttagcaaattgctacgcacactggaagctaatcaccaccaaacacgccttctggcacacgaaactttgtcttctatcacatactaatcatattactggtgtgtcagatgatactactggagatactgaggatactgaggatactggagatactgaggatactgatgtgacagtggaaatgtgtgaaattaggataaaatatgtgattcgatggtgtaggaggatgattgtgtggtggaggagtgagtgtggagtgttgcgtgtggacggctcgagtttgggtgagatttacgtttttgctaggactaatcgggtggtagaggcgctgagagcgttacaggaaaactgcttagccctggatttactacgagtttgcagagtcagagtcagggactttgtagacgccagggacttgaagctcaagtctaaagtgttcaaatatctaaaggcagaactcctagagaatgagctctcacaaatcctaactctacaagatgctaatcaataatattcacactatatatagtagtagtattgtagtatagtattatgtatatatattatatggtattaggtgtctgggtttaaggctagtaaattagctgtatacaaagaggtgtaatactgtttacagggtttaattatgctataaataacagtattaaatagtgttaagtgtttaatagtactgaaatgagtgttattttagtgtatagtaaagtatataatatcccctagtatactcctaatactatacaatatatatatatagtatatagtatatatattatatacagtgtatataacagtagtagagtagtatagttaaacagctccctctcggggtatataattaactatagtaaagtagctccctctgggggtatataataagatagctccctctcggggtatatagttaagagtatatagtaaagtagctccctctccctctacccttatattattagctccctctcggggtatatagtatatagtatattaagtagtaataggaatggtaatagtagtaatagtagatagtatggtatattgtatatatattatatactgtatgacatagtagagtagtattttggactagattaagggtttaggcttgagtatacctaagtattattactaccattttactatactataaatactatagtatagtaattagattaagagttaagagtccattgatcttcttgaagttgatactgtattgaaggtttatagtggaacttgacggtaattttcttaaatctttgatagcggtagatgaatgaaaagggtttgtggtctccatcagtgtggctccagactactctgttattatgtctaacttcagtgcaaatgacgtcattgttacgcgtgtatctcaatccagatttataaaatgtctgtactctgtactctagaggactgagttgtacagtttcgccctgttcatttctcttgtgtaaggttagctcaggaggaattttgatggtttgtacaatagagttgggattttttgaattggcaaatagaattttgtcctcgaaaataacttcaattcttccagtttcttgactataaacaatgtagagtggtttctcgccgggattacggttccaaattactctatcagcatatttaacaagggtacacactccattcttgagagtataaacaaatctaggacgtttaaatggacaaaattgcatactataatcttcagaacttagtgtgacaacgttacccagatcttcagtgagtagtctgattggtggaattggatagtgttcctcagtcagtctattcccttgtagtttatattctataaatttaccatcaaatccaaagataaacttgaagaaagaactgtgaccataaagtcttaagctctttggcaggggttttcctaaattacgcctccaaacaatgttctcacggtacttgataaggtcaaagttcacattttgatactcaagtaagtatttgtgtctattagtttcttgaatcagactgtccatgtaaattggaattaacccacccaagtcctcagcgtaatgctttaaataaaacggaatttgatgtttgttaacccatttattattcacctttgtacacttgattaagatgttagtctccaccaatataccgccatctgtaaggttgtacaccaaagtcttgataaagtataggtctttattattattcttccatacgagacgatttcctagctttaccctgacacatttcataccctcgtttactctatataccaagagaattgtatctcctgccatacttaactcaatagtatactggtcactggacaatgtagcagatcttctggaatttccccttccgcgcagttttatctgaggaatctcatactctttcttggtccactcattgttttctagtttgtacagattaaacttggtgagagttcccaagactataatcttctgttccttgtagaagtcaattgattcaataagttctctgacacaattccttctaaatctcttgctcaggaactttttatcaagcttgtaacgataaatgttattattagtagtagaattatacccgttacataagataattttgtgccagttttcctgaaacagccttagtatctccctgtcattcttgcccagcacatcaattctaaccccttcactgggtaaataacaactttctaatgtcatttcttgaggtattgaacaattttcagattgctgctctataggctcaatcctgggtggttcagtttgcctgggcatattgaggcttgtggagccaccgtcaacctcccctataccgggctctataacagttttagccatttttgacttccttttacacactcttttagcctctttaactattctattgtcacattgaactgttctctttagagacacgggacgctcaattacaccagcatcgacctgaggattctccaaatctaacctctccatcctcaatttggagaacataagatacatttgattatatcttaggtgaaacgctaaatattttggaaattccttagcattagacggcattgtccagcataatctgccgtcaaaccagaccttcctacacttaaacccaaatgtaaatacaacaatcaattcatacaattctacgtcactctcaacataattataatctctgtcatcagtatctgtgaaaagtaatttggcaatgtcatatctgaggtgagtgacactgtaccactgctcgtgtaaaccattttttcttattacaaatggcttaccatttctcataatggcgagaaattgcggatatccaaactgaatcacttgctgatacatttttaacaatattatttataactcagttagtgttatcaagacacgttcttatagctagccaattattaacagggtttattaaagcatctcttaatagtattaaataactattttaagacattaatttaagttatttaagagttaattaatgtataaataagcttaaataagtattaatttagtaaatagattacatatatattatatattatacatactatacacttgagtatatacatataatatataatattgtatataatatgttgtatatagtaatagtataatatatagtaaagtggtattataaatatatagttaagtagctccctctaggggtatataattaagtagtaaaatagctccctctaggggtatataattaagtagtaaaatagctccctctaggggtatataattaagtagtaaaatagctccctctaggggtatatagttaagaagtataacaaatagtatagagtgttagttgataaaattaagattaatgggatagttgtagtgttgtgagaagaagtagtatgctgtgatggctaggattatgcccagattatcgctcttctccaggaccccctctgtcagcgccaaaatcacactcatcagtacccggtgatgcatattcactatgtaatacaacgtcacatacgaaaataccaaacacgccaacgtaccatatatctacacaatttacacaatgttaactctgtatatactaagtaaataataaatgattatgttaaatagttaactcgtgataatatagttagtgtggacacggttttggtgtgtatccagatagggcttttgaggttagtgccgacgatggatgccatgggatcgacgacgaacatgggcaataaaattctgagaggaatattgagccaaataaacaccagaacggtgagattatacgtgataataccgaaatcaaacttcctggagaacggaaacgggaagataaaacatgaaattattgacaaaattgcgattagctggatgatgtattttagaggcactgaaggcacgttcaccttcgccaagactaatccacagcccaaatggaccaattttctacaaatccatcacatacaatatttgtttactcatttactaatagtatttgttcagggtaaataagcggaaattaagttggtttagctggaaatagttagtttagggtaaataagtggaaatagttagtctagggtaaatgttagtttttagctgcctttcggggtatatatataataatatattaatatgagaattacctggaatagaatttattgagaagtttggagtatgcgatgatgaagatgaggagaataggaattaaatggatcatttcatccattaacaaattattcacaattctaacaaattatttacaattttgcaattatcggagtagtggtgtaagtgtaagattccacattccaacacaataaataataacaaaattataaatattataaaataaaataatgaaaaaattaatgttaggaaggaaatggtaaatgtgtgttatgtaccaacaacacccatagtaccaattcctatagtaccaacacccattatactatactatagtattacctatagtacagtatcacctatggtacagtaacccagagtagtccaacactggtcaacagtagtcaaaggataggtaatgtgtactctgaatactttgggaacagtactacagtaaacagtagtatacagtgtgtattgttacaatctatgtgatattccatgacggggactcgaacctacgaccctaggatcctaggaatagtatactacaactatactatcaagaatactgttggtgatggtatagtatattgatagtattaggagtacaattagtcatcaggtcctacggggagtgaggatatgaaagagttccagttaatcatttgtatcaaaggtgatcgatacttaatataagcaatcatgtgctccaacgttaattcctcctcctcaccactcaacgccttaaacgtagaatctaatcaacactattcaacatatccatagtatacttctatagtaaatagtatagtatatatagttagtagtgtagttattagtattgtaaatagtatagtaaatagagtaaatggagtgaataagtagatagataactctgtagaatataatgaattaagtaggatgcaagcaccgtaacggagaataccaatagaattaatgtgaatgggttgattttgtatgtaattattaataattttattcgttattaattctccatccttgcacagtcgagactttatatcataatacaactccatactcactacaacaagttaactctattcaactgtataactaaaattagacaaatttagtgaaaaataattacaaatttcatgattttggaaataaatgcaaaagttgatcgggctagcttttaccgaggaaaataagtctagttattgctgcttcaaccacttatttcggaaaaaataattgcaaataataaataaataccaataggttgcaaaatgtgtaaatatctggggtgagataattaaggtataactaagggtataactgggaaactggatccgcttgaccaagccccgtaacgtacctggaaagcatttacatttgagtttatatttatgtctgaatttaagaggtataagaaagggtgtggttctgttagtaatataatcagagggccaggaaaaggaacaattgtataatctttccttgaaagtttccaggtctaatttctcttttttattcttaaataagcgcttccagcgtaatttttttaccgtgaaattgtttcctaatctgtccacactcaacggtatcacattcccaatcaacgatacctcacttatcctcccaaatatctaaaaattgttcacaatattatttattcaattatttatattatttatttattaaattatttaaattggtggaaatagtgtgaaaattactttgatgaggtcgagtgtttggaagagtaaatgtgtgtggaaataactgtttctaatggtatttttacgtatattactactcagtgtattaattaatattatgttaaatattactatatatattatactacattttatatacattaattctcatctcactataccagaccccatagcgccaatattcattaatttaatttatcattaattaattaatttaaatattaatattataatttaatttattatttaaattgggcttgttaaattaagtgcaaaattgtgaaatttcgctttgagataactcgatcctgttcggaagatggtacaaagagttcattatagaagacgtaataagtataaaactccttctaacgttgtgaagagggtgagaacacctggcgcacggttagtgcttcataaccttaagaaggttgggaaaagaccacgttgcggtgactgtaagcgtacgctcgccggtgtttccgccgtcagaccctttctatacaagaatcttaaacgcagaaatcggaccgtgtcaagaccatacggtggctccagatgccataactgcgtcaaggacaggtaataaatttttttattctataaattttgttaaatagtttttttcatttttaacccaaatatttatttttttaactaaattatttttatttcccagtaatattcggaaaactttcttttttcaattttatatatattatcacattattatattaaataaattatatcaattatatatatataataatatatatgtataatgtgtttgataggataataagggcgtttttgaaggaggagcagaagtgtgtgagaagggttgtgaaggagcgtgagacgaggacgagggctgtggaatcgccagtggagaaggtggcgaaggttgagcagaaaaaggtaaaatcgaaacccgacaaaaaaaattaacttctaagccataatattattacgtacatttatgttatgttatgtcattttctttatgctactgaggtatagatttgttcacagtgtgagtgtcagtcgtttgtatccaaaattgaatcgtagttttgtaaattcagtaaatatttcaactttggttaataattttattaatatgaacaataacccaaagaatcttaaaatttcagcacgaggtaatcacagattctactcattttctaacccctttactatttacccagttttacacttagtcaattagtaataatgttgatagtatgaattagctccctctcggggtatataaagtagctccctctaggggtatatagttaatagtattagaattagctccctctcgggtatatagttatatagttaattagctccctctcccctatgtagttaaattagctccctctaggggtatatagttaatagtattagaattagctccctctagggtatataattaagtatagtaaagtagctccctctaggggtatatagttaagtatagtaagatagctccctttggggttaatgttagtgtgataatgttgtagaggagcagatgttgagggctcaggagttactgaacagatcagtttcagattttacgaatgataagtttggatttgtgccctttggaacggatgttcccagtagggaattcaaagatattaaagatttagacaactccgttagtcaatacgtctggatcagaggtagaatacacgaactcagaggcaaaggtattatttacagtgtaatgtttataccatattagttatatataagtaagctccctttggcagtcccccgcctcactactatccgggccagttgtcgcttgactttggagttcatatgggatttaatagttccactcgactattctaactattgatagtattaaattttatgtaggtgggatatgttttctaatattgagacagcagagggagttgttacaatgtgtaattgacagtaaatctgaaaataacaccaaagacatggtcaaatggacttcagcgtatctttatactagttatgcttattaatcctctggggtgttaactcctaactcacttggtaatatgtgttagattatcatttgaatctgttgtggatgtgtatggaaaagtagtagtgccaaataccccaatactctcaaccacctcctcaagtatcttttacacagttatatcacgagtttacaaaattaacactaataacaatgttaatatatagatgaactgagtgtgagtaagatttattgtatatcgagatcatcaacgaatttaccgtttctgttacgtgacgccaataacactgacaacgaagaaatgatggaaaatcccaacgtattgtttacgcaacttatattgttataggtgatacgagtgaatcaggatacaagattagataatcgtgcacttgatcttagggtattccgttacggtgcttgctaccgcttagttatgtagttcctcatctatactagttatctatttacgcatccccactatttactaatttgcaacctttttgacatttatttattatttacaattattttttaccaaataagtagttactgcagcagaaattacaattattttcctctcctgattacccagttacacctatttacacaaattagcacaatatgaaattgtgtagtgttttgtgaatggtgtgatatttaagatccagtctgcggtatgtcagttgtatagagaatttctgttatctcacgactttgtggagatccacacgccgaagttactgggcggctcaagtgagggtggctcttcagtattcaagtttaaatactttgaccaagacgcttgtctagcgcagtcaccgcagttatacaagcaaatggcaatctgcggtgacttgaaacgtgtgtttgaaatcgggccagtgttcagagctgaaaatagtaacacacaccggcacttgtgcgaatacgtcgggctagacatggaaatggaaatcctaaacgattacactgaggttattgatctgattgaccagatgctcaagagcgttttcacaggtttaatggagaggaataaagaggaattggactacttttataagtcattcccctcaatcatgagatttaagtttctacaagaaactcctaagattacttttcaagaggtgcgttattgcgttgcgtgcaggcaattcctgcggcaacctctattcactcagttactcaattacccatccccactatttactattttgcaacctttttgacatttattttactttttacaattaaaatttggtaaataagtggttactgcagcagaaatgtcatcggagaaaatttattttcgtaacccgatcaacttttgcatttatttccaaaatcccattttttacaattattttttcctaattttgataaaataacaattactaatgttataggccgtggcgatgttacgtgagactgagttgggtggtgaaatccctgaggacttgagcgactacgacttcactacggagcatgaaaaactacttggcaaactcattaaacaaaagcttaatacggattattatatcatctatcaatatcctctcaattgccgtcccttttatactatgcctttgcgttacggtgacaggtccgctcacacaaccaactccactgttaacccaaatgaacacactgttaactctgtagaacacaatactaacactactaactctctaaactctgtagaaagtgtaaactctgtagaaactttgaacgcagtagactcagttagttggagtcgtagttatgacttttttatgaggggtgaggagatattatctggagctcagcgaatccacgacagtgtggagttggaagcccgtgctagagcttgtggaattgatgtgaatactataaaagattacattgaagtgtttaggtacggttcatttccacacgcagggtcgggcataggtctagaacgagtcgtcatgctgttcctaggacttacaaacatacgcagaacctcaatgttccccagagatcccaaacgtcttactccttaatttattatcttactttttatttagttagtaatgtggttagttatatataattagctccctttgccagtcccccacctcactactatccgggccaattgtcgcttgactttggagttcatacgggatttaatagttccattccactattccaacttactatagtattaattttatagtaaactgtagttatagttatgtagttaattagctccctttggcagtcccccgcctcactactatccgggccagttcccgcttgactttggagttcacccggaatgtgtattattcactgtactaccataactagttatagtattgtaatgtgtaagatgtgatttaagaaagatgaaagaatcggttgaagggttcgagtagaggattgagattatgttcctgttccaagtattctgtaaacactggtaacaaattttcttcagagtcagattttggagtgtagagttcggaaattgagctgaccaatgatggatcgcagtgacgatgagctgttccaatgacacaagtggacaaggttaaagataacaattctttatcacccaagtcacccaattcctaatacaaaatgttaattattgaggaaattaggtggaaaaggagaggaaaattgaggggaaagtgaggggggaaattgaggggaaaatggaaactttcttcctcaacattgtcttcattactaaaattacttaactaataacataactgtgaggtacggttaattgttgtttttgttgagggttgaacatgtgattgtagacaaatgttaagtcacaaataaacgaatcgtcccagcccagctccttaaatctataacaatacaatttaaaatgtaacacaatttaatatgacaatagataataataccgttgaacttgggattgtggagttgggtattggaatggcgagtaaactcttgatcttccagtctaacaaatgaataattctactgtggttacgaaataattcgagtaaagccacttgataaaacatgaattcggccttgtctaagataaattcagttgagtaattgttacatgttcggagtaaataaataaagaactcttcctcatcttcacaccaaaccattttattacctacacattcattcagttggaatagtacagtgggtattacggatcccatataaatgccaaagtcaagcgggaactggcccggatagtagtgaggcgggggactgccaaggggagctaattaactatacctaactatatacttagatatatacccctagagggagctacttaactatacctaactatatacttaataaatacccctagagggagctaattaactatacctagaattgtatacccctagagggagctaattaattatataactaataatatagtaaataactgagtagatagtgggataactaagaggtagcaagcaccgtaacggagaaacggaaacctcatttgacagatgattttctaaataagtgagagcgaattcgctgagaaaaaccgttggtaaatcataagaaaagccgtgactcagtagcctctccaaattcctcacctccctcaaatcacatcctaactacactattacacactattatcaagtttatatataattattaagttaactaaaatatctatagtgaggattacggcgtgaaagtgctttgagctgaacgacgaggagtcaactttatactctggaaaaagtgttaaaagttcgttggtatgtgtcagaatatgaattttcttttgaatttcatggtcgagatccagatcaaaacaaacaacaattgagtattttgatagtagccacagtgacagcgtgtccaaaccacagccaagattaacaaattgcactgtttcaccctcaaaatacgtgagaaatcgctcgatgatccatcgaattgataaaaccttcagggtgttaactgaaaaaaattaactttattaaaagtacaaagacttcctaaggtactgccgtgactcctggagcagaaatatttcataaactcgtcgtcgaaatagttcttctccaccgcctccctaacacagttttaacacttataataactgaatgttaagtaagaaattgagtagctgggatacaacttagtggcaaggatgtttggcgagaagtaagttttatctggataattttccagcttcatgccgtaaaatttaaattatttattctagaatccccagatttgaaattctacacatttttaacacattattccacaacatttacacgtgattccactgtgattacagtgttaagatagtttaaagtgtgtaaatagtgtattatattattaattatgtgatgtgtttgtttttgaaagattcgtacagttgaatgtcagactgctccacagattttctaaacacatgaaattacaccgtaaaatacaataattaagcctaaataggggataattaagagacccagagggagctaataatataagggagagggagctaattctaatactattaactatataccccgagagggagctaattctaatactattaactatataccagagagggagctaataatataagggagagggagctgtgagattgcaagctccgttacggagcaaggtccgacggaactaattactaaataacaaaataactaaagaactaattaactgatgaactaattaactaatgaactaagtagtaaataactgtgaaacggagtagtaaatgtgtgagcggtagcaagctccgtaacgcggtacctcgaattccttaatgcgacttgaaagtgtttattggtaatgaaagggacggggtctttttcacccttttcaagcggtctctttctcttgatttcttcctcaatgctctccctaatcgcttccctagccgctctatgacatatctcagctatgtcagctcctacaacaattatagtagtaaattagtgtgtagaaatgtgtaaaaaaagacacgatagtgtctaaataagacacagtagtgtgtaaaatgtgtaagaatgtgtaaagtgagtaaaaatgtgtaagaatgtgtaaagtgagtaaaaatgtgtaagaatgtgtaaagtgagtaaaaatgtgtaagaatgtgtaaagtgagtaaaaatgtgtaagaatgtgtaaagtgagtaaaaatgtgtaagaatgtgtaaagtgagtaaaaatgtgtaagaatgtgtaagaatgtgtaaagtgagtaagaatgtgtaagaatgtgtaaagtgagtaagaatgtgtaagaatgtgtaaagtgagtaaaaatgtgtaagaatgtgtaagaatgtgtaaagtgagtaagaatgtgtaagaatgtgtaaagtgagtaaaaatgtgtaagaatgtgtaagaatgtgtaagaatgtgtaagaatgtgtaagaatgtgtaagaatgtgtaagaatgtgtaaataagtgtaaaaaatgtgtaaatgtgtgagcggtagcaagcaccgtaacggaccagaatatccatcaagttgttgtgccattttggaaatattaacatcgggagcgagtggcgaattctttaaacttgccttaaatatgttctcacgactcttcaaatcaggtaacggaatatatatcaatttacccaacctcccaggcctcaatatcgcagggtcaattatgtcaggtctgaattattcagttatcttattgtagggaaatgggtgggaataggagagtgttaagttgttcagttacgctggtatctgaacacaatagctaaataaacttggtaaagtgtacctattggtggctgcgatgatgaagattggttttttgacgttgatgccgtcgatttcggtgagaatttggttaatgacgcggtcggcggcttcggagccggtgctggtgttactacttctggtcttggcaatggagtcgatctcgtcaaaaaataaaatacaaggcgctgaagcacgcgccttgtcaaataattctctcacattcgcctctgactcaccaaaccacattgtcaaaagctcagggcctgtccataattatagtgtaagaatgtgtaagtgtgtaaatgtgtgtaagaaatgtgtaaaaaagtgtgtaaaaatgtgtagattagtgtgtaagaatgtgtaagaatacctttgatggagatgaaattggcgttacactcgtgtgcgatagctttggctaataatgttttaccacatcctaaatcacactattaactaaaattagacaaatttaacaatatttaattgtaaatttcatgattttggaaataaatgccaaaattgatcgggttagctgaaataaattttctcacccagtcatttctgctgcagtaaccacctatttaccaaaaaataattaacaaaagtaaaataaataccaaaaaggttgcaaattgagaattagtggggatacgtaaatgagtaactagtatagatatgaggaactagtaaccgagggacaaaaatagagccattggggtggctaactctgtagaaaataactaaactctgttagtacaagccccgtaacggaatacctggtggtccatagaataaaactcctttattgcaagattgtccgtatttgacaaacttttcagggaattgtagtggatactgaatagtttcaatgagttcgtttttaacactttcgagcccgccaatgtcgttccaggtggtctcagggatttccacaattcgctccctgagattgctcggattacacaccgacagcgcctccataaagtgcttgttcctcacgagcatccggctgagtatgtcttgtggaatttcctcggcgtagtaatactgatgaattgctggtgagttaatattttccttgatgcagctcatggcggcttcgaagcaaagctgggcgatgtcagcgccgacaaagccgtggcactccttggcaattcgatgtaaatcaacatcgtcagccaggcgcatgttcttagttttgaccttgaggatctcatacctttctttttcgtcacagctgaccatttcaatctcacggtcaaaccggccaaatctacgcagagcgttgtcaatcgaattaattctattcgtagccgctaacactattaggcctatgggaaatttaatattatggagtaagtggagtgtgggtctgatgacccaggacgggtaacgcccgtaaatacacaagtaataaataactaataaataactaataaataactaataaataactagtaaatgagtaataaataagtaaatgagtaataaataagtaaatgagtaataaataagtaaatgagtaataagtaaataagttggtacaagcaccgtaacgcacctttattgtcagattgattaattccatccatgagagtaagtaattgtgagactaatctcctctcaagttcaccagaggttttatctcttttcccagcaatggagtcgatttcgtcgatgaaaataattgaaggcgcatttttacgggcgttttcgaaggtttttctgagcttttcctccgattccccgaccatttttgacattatctcagggccgtttatgacgtaacacttggcgccagtctcgttcgctatcgcacgggccaccaacgtcttaccagagcctactcatatttaccgtatggactgtgaataggtaataaatggtatagtgtataagttgttgctgcagtaataactaaacactgtaaagttaaaatgtttctacagtaataactaaaggctctagagtaaactcagaaattgctgcagtaactaaactctgttagtacaagctccgtaacgcacctggtggtccatgtagtataacgccttttggtggattaattcctacggttttgaagagttccggatgcaggagcggtaactcaatgagttctctgatcttcgaaagttgtttattcatgcctccgatatcgtcgtagcccacttctccgtaggaatcgtcgtgattttcacgtgttaaatagttgccactgctgtcaatgacgctttctccgacaattaacccgacgtcactgtcaacgaggacatccgcgtattgcttagaaaacgctttaattttaagaattttaaactctaatttgaggtagtctgagtcatcagagagctttactgtgccagggccagtaaccttgacacaaagtgtaaagtggtctccaacccgcacgggacgaccactcccaccactcacctctccagaaaaatactcatacaacacattcttcaccacttttctcacctcatctaatgcattatttacgtaccaattaaggtgtttaggtagtaatttacttaatttacaagtattttagaggtattttagaggtattttagaggtgatttagggctaatttagcttaatttagaggtaaatttatggtattttagaggttatttaggcttattttagaggttatttaggccttaactagggattatttagtcattttagagttaattagtagtaaaatagggaatagttaactgcataactaagtagtttgtaccagtgttttgagtattaagttgtttgattagtggttcgatggtatctttaaagggtaggatgtgtacgaatttagcttccggaacagtgttaatcttctccataaacacaacgtcgcccagtctgagtctcaaattcctcctcaaatcctcgtgaaacgagacttcatttttagtaattgactctgtaacatcaacgccgcaaactgttactttacgcctgcggccttttacctttagcaagtctccaggcatcacactgagcttgttagcttgggctttaccaattctcacatttacattactgttcccgccaaatgtgtcgtttaacagaaataatttacaagaggaaccttccaaaatcttttggtaaactgagacgtcttgaaggtcctcaacagttttgggcttcagagagtcctccaaattcgttactaatccgggggaattctcttcctcagtgggagagttgtcggaggcccagttgaacacattaaagtcatttgacttgtccttcttaaaaaagttaaaatagccactctcaaacggtattaacgcaagtctgcccctgaataacttgttcctaccgttagaattggtgatagaattactgttagaactgttagaattggtgttagaattggtgatagaattgcgattggtgtggaatttcgagtgtttgaagtcattttggctggaaatcagagcataaattgacaagtttgaagttataatacaaatcaaataaacaataaaaccaattaacatgtcgtcagcacatcttttcacagtttttacattttattattccacagttaagtttagttgatgaaaatcattggtaaaattagcgtaaaaatattgaaaggggaggaatctgggtgaaattggagtattgtaggaatcaattttacacagttggattccaggcgaatccaatcaaaaaactaaaattaatttatttacaacaaatgaattttaaaacaaattataaaaatattttaatcactaaaattttccaactaatttttacattattcccataaacatacaatacaattatttattcacattttttttaattattttaattattttttttattaatttttgaatgtaattccaatatttatgtaaattttacggataaattattaaatttttttacacattttaggtaatgtagatgagtttgcagtctttggaccatcagcagtcttgcatttcaagatcatttcaggtaatcaccggcatcagctgtgtgataagggaattagttgaaaacgccatcgacgctcaggccaccaacataggttcttcacacccaaatatctttatttagagataaaaatatataacggcggcgcggatttaattaaagttgccgataacggcaccggaatctcagaaatcaatttcaccaatctgggtactctacactattattacttacataaattgtatattgtcataatctgtagcctcgaaacattccacgtcgaagattagaacatttgaggatctttttacaagtctgaccacgtttggatttcgcgtatgataaatttgttcaatggtgattcagggagaggcgttgtattccatgtgtaatttgggtaatgtggaaattgagacgaggactccctccagtgataacggatggcttttaagatttgactctttaggaaatatcacctccaaaacgccaatcgcctcaaatgtaccgttacggtgcttgctaacgctcacacaactccctccaggggaaccatttcccctttatttagctctatagagtttatttcctccgttatttagctctccagagtttatttaaccctttggaggagctatttcctcagttatttagcccctccgggggttcccaactatgcataattcacttaactatatgttatgatattaaaatctgtatagataggaacgtgtgtgaaggttagagaattgtttggtgagtatccggtgcgtagaaaaatgttgataagaaattcgaagaaccaaatttcaaaatcagtgtcccaaatccagcaatacgcgctcattaaccctcacataagctttaactttactactgttactaataataagaaattttctaatatctttgccacctccggctctaaggacaatgtcagaggcgttatcgaggaaattttcggacacgaattcgccaaaaaacttgttcaaattaacattaaagataaggagtggaggttcgttacggggcttgcacccaacaacatagtttagttatgtagttattccctccacactacttagttatgagttttctaaccccccggaacacttatttattccttatttggtccctaggattacttagttattccttatttgttccctccggggcttatatatttaccctagtaatttgctatacagtactatcatttatgtgtaggattgagggactggtgagtaatccgtataacgagcgtgggtaccgtgagatggaatatttctacataaacaagagaccaatttcaaaggtgcaaaagttcaagaacgcgatttcggctattttcagccacttctcaagtaaatctaagccctcattcatactcaacctcaccatgaattatgaccacatcgacgttaacatctcaccagacaaacgttccgcatacatttactccgaagactacatcatcaggaccttcaaagtatctttttacgctattctacttattgtgatattatttctactagttacgctggttaatgtgaaaatagtgctgcggtgaataatttgttaggaaaacctgtacgaaattttgaagccgaagacgtcgaatttgtcacagataaattctgagattttaacgcagttcatctcagacgtcaacgttaaacacgaagagaaatcaagtaaacgggaactagtcttcacagacacaataaatccacccaaaaaaactaataccagcggctccgttactgctgcacccgttaccattactattcctgatgatactgtcgagagtgttgaacacgctattacgattactgatgaatctgagaacactaatactactgagaatactactaccactagcttgataaatgctactgagaacccgactaccgttagcttaataaatactactgagaaccctactaccgttagcttaatgaatacgactgaaaatgttacgaaaacgtgtgatactgtgcctgaggtaatagtggtggaagactctgtgaataaaactgtgcggaaaattcgtactttggaggagtatttgagaagggttccggacaaatgttgttcatcattgtcaagacgtataagaataagtgaacgccgtttatttgagcggaattttaagaagttattaccctcggaagaatctgtgacaatttgtaaattaaccagtgacgacttaacggagcacaatttcctgaatcctcaagtgtttgatgagatggaactcataggccaatttaataaaagttttatcataacaaagctgacatttcccgaggttaaatccaagtataatttttccctatacgttatcgatcaacatgctgctgatgaaaaggcaaggtattccgttacggtgcttgcacattactacacagttcctcagtcatctaaccctctagagcttatttcctcagttatttatcccctccggggcacttatttatccctgcggggccactatttccccagttattaacactacatttactataataacatttccgtaggtttgagaggttgaataaaacagtgaagatcaacaagcaaagattaatttacccaaaattaatcgagttatcaccatttctaacccaagtaattttaactctatgcctaacctaatccgtaggtggcagaaaacagtatgaatgtattactgtcaaatggatttgacgtgcgggtgtgtagggaaaaggaatttctggtatttaatgacgaagatttaagtatgacaagtgcgtacactgagaaaattggccgtggtgtgtacgtacacacactaccgcagattctaggcaaagtgcttggcgaggatgatttcgtcgatttcctcaacgaactctccgcaacggaatacgttgaaaatagtaaacagtcagagttcatttggggacttggaaacactccaagaccacataaaatctggtcaattctagcctcaaggtatgatttatttagtcgtatcacgaactcaagagattttttactcagttatatactaattaggtaaatacatggaaaatgtgttaacaatgggacagagcgtgtaaatcgtcggtgagggctggtgatgggttaacgaatgggcagatgaagaatattgtaaggaggatgggaacactgatacacccctggaactgcccacacggaagaccgtcaatcaaatgcctcgtatcacaccaacaacttgaagaattactatccaaacaataaataattttttaataatttttttaatgatttttgcttaataattttaattttgataattttaatttaataatttcaatttgataatttttttataattttaattttataattttaatttactgatgttaattgtgtaaagaattgtgtaaattttgtgaaaaatgaaaattatgttaaacttttggtaataatttaaagcaaattatggaaggccaaatttctgaaattgatgagatttggctgagtaattttaggaaaaaactgagttccagtaaaaacaccttagaattcgctaaaaaagctcttttttatgatccgtatcacttaaatttggatgaagaagattattttaaaatttctcaggataattttaggatttcggaagataatttgagaagttccagtttaaagtgttctgggataaagttactggacgtttcatcggtatttgaaattggtaaaaattccctaatttggagctcaaatgtgaaggcgaacttacagaaaattgaaacggttctcacagaaacactaaatgtgttaaagaaaaacacgtcagagggccaggaacaccgtaaaaaactcttaaaacagttggaaaatctgtgtaaaaagtttaaagagtatgaaaaaatatgcttagagctcttggaagtggtaaaatacaccccgaaaaaggtaaaagaggtggaaaatttaaacgttcttgagcaattttctgaaattacttcaaagtttaaagttagtcaggaggatctccaaatcgacactaaattaccaggcgaaactgaaccagaaactcatttgagcactgatttacaatatttgaccttagtttggtccttttacagggagtccagctgttctgaaatcttctcactaatgtgttatactctttttacaggtaatatcacagcgtttaaatctattttgcacaattctaacaccagctgcatgttatcgcacattaaagaaaattggaaagttctcctcagttacataccaatttcattccaattcaaccattacatactgccaattcagtgtgtcatcagtaaccccgttgacactggtcatgtggatactagtggtgaactaagtgctggtggtgaactggttactggtgaagttaatttggatgtgaggatgcttgtggactttattgactggtgtttctggcggatatttttaatattaaaatacacaaattcgtcatattttatcctctcaaagtttctaaaatcgctttttaaacttttggaaccagttgacagtgggttggactctctgttaagtcgcaagttgcacctgttaaactttttgaaattcataattaaacagtatttcctatacaaatatatcaactctaagcatattaatagtattgtggacagggtaagtatcatgacatttttcgagtatctggaactggacgcaagtaagaaattaaatttattctgtgaatttgatctctcattgccaaatgaacaatgcaactgcgaagaccagttcagagataaacataaaatttataaattctgcctcgcatgtaaaaccaacagactctgccaaaaactcaaagcattcttcattctcatcagtccctccaacactgttaccaattctaacactgttaataattctaaccctgtaactaattctagcccagtaactaacgctaacactgtaaatacttctaacactgttaataattctaatacagtaactactattgacgcagtaaattcggaccagctgtgtggaaaggtgtggaatgagaatggagactttagggagttttatgagtcattgttgagatcgtataacagtgacttgaacgattacataattggagtttcagagacgtttatgaaggagttaagtacgaactcatttgagattttatattccctgtcaaaagtgcttttggaaaccagtttcaaggataaagtgtacaaaatcttcatctcaatcacgtttagagaaaacgccaagtataatttcctggacaattacttcattattaactcaattttcagcttaattatcggggaacaggataattatcaccaggacaccgtggacacaattgatgttaaaaatacacttttcaagtttttaaagttttttaaactcagtaatttcaacccaaacaactattccacatacaaattattactaactcaaattaactcactctatactctggatcgagagttggatatcgcagcggattcgggagttgatacacaggacacagaatttgacacatggaatacaaaatttgacacacggaatacaaaattgtgtgtccaattggatggaataaatctgagaatagtaaatagtgtgataaagtgtatatttgactttgtggagggattattaaacttatttgccattaacaatgtggagaattttagcgtgttggtgatcactcctttggacttggtgctggcactggtggaccaagagtatttcctattactacttcagaagataataagttttctagttgacgttctggagccgcaggaattttacaacgccatgtgtgaacttgttaacttgtcaaattacatctcaaacacacagctgaatgacattctcaacatgttcttttacaccatttcaatcagtgataatttaaactatatcaattatttactcgatttacacttgggacagggttcacccggtgattcactggataatactactgtgttaaatagtttggaaagcatattgaatatagtgtataggatagatttaagttgtaatttgaatgtgtttaatgtagtttcaagttattacaagtttgtgccaaagaataataaattctacagcgtcatgaggcataaaaatcccttctccatttactccctaattaccctgtttctcaactatttgtactctaatacggcgttagactcggtactcctaaaggataattttacattctcccttaactactgtgggaccttgggtgggaatgtagatgggaatgttcatgggactgtaggtggtagtgtaggtggtagtgtgggtgctgttgggacagagggatttgggaagggatttgggaagggatttgacttgatattggagagtttggagtttttaataatgttatcaaaaatctataagagcatgttaatgtttaatcatttcagcttatcaacgggtaaacaacatgtaaaattggattacaagttgtatgaaccagcggagttaatcagtaacacattgtcgtcattgatactgttaactggtgacaaacggaatgtaaacagttcacaagtaattctaacattagtttttaaaagtattttgtatcacgtgttgggtagtaagtcatttacgaatcaagtttttgataatcttaaaactctcacactcgacttaataccaaaacccacctctgacaccgtcctaagcatcctcaatctgctcaataacactggtaacaccgttaccactgttaaccctagcagcacacttaataatgtggatactgggttgaatttgctgtatgtaaatttattagtgattttgagtgtggagatgagtaacttgatgatgatttcaagtattttacaattttgcttaaaggctcagttatcacaattaatgtcattcatcacacttaatcttgtttattccaacttcaaagggttagactctactcatccagatgttgattccagtgataaacttgacccacactgtgacaaaattgggctggctgatttatttgaggattctgatgttacttacagcaattcccttgtggatgactgggacctaaggaaaaacattctaatgttactgttcttcagggaagaaaaaggcttagtaaaaggctcaatggtaaagttggccgataatctaagtcataatttggcctccaaactgagtcacaatgtggcctctaaactgagtcataatgtggcgtcaaagttagcacacaacgtagcgtcagagtttataactgcagcaattgagaaggctgaaggtgagttaattaacatagcaaagaagaccaacagatttgacatgataaaggagaaattcttataccataagaagacagaaacgtttgagaattcaatgttcccaccagttctcgactactttgaatctacgccactgtttcacccaaacttactctacaactctggtgactcctgtggtgacagtagtatcgattctgagatgtttgagtatagaaatttgagggaaataacagtgtcagggttagtgtcactggatgttaatcttgcaagtttaatgctgatggagaattgcaactttcaatttaattcccaatttttaaaagacattcgtgaagtttttgctaaaaatgacatgagacacgtttctttatttttggactccctgttggttcatttcagacactgcaaatggcctgaaaatgtcatttctaagattgaaacagttaatgaatttctcaaactatttaaacattttccgagagatttcagtgttctggtcactccgttcatctttaaacctgagtatagatttgaattattcaaaaacatacccgaatttgttcaaaataacgtcaaaccactttattacatttatgtcaacttatccaaatttaacacacaatccaatagttctatgggtttcggtaacacttttgttagtgccaatgttgtggatggtatgtcgaaaatcactgaagataagcttagtggatgtgaattgaatgaatatttattcggtaaaattggaaattctgacaacttagcaggtaatactactgacaacctggtaaataatctgaactctgaggatatgacatttttatgtgtgaattcatttcctcatatggctgagtatgtggaaatcctgtttaatgcgtatgaccaagtatttcttgaagactttaacgttgctttgtttattgaactcgagcctctattccttctaaaccatgaaagatttgccaattttctgataaaactatacaccaagcttgttgtgccatttgtttctactagtagaagttctcaaagtattaatacgccttcaactaataaatttgcaagtcctagaacacctgttctagctccaagtaaccccagtctactccttaataatagattcttaatgttaagaaggtcaatttgtaatcttctatcagtttatccagagtataaggaagtttttagtactctttacatgccagactctggtgatgtaataaagatgttagaatcaattcttaggcacatgcctgattttgaccttacgcttgtggataattttgagttttttaagcaaaatttggtcaattccttaactttggataactttttcttcgtctcagactcaatttctaagcttgatccagcgtttatcatctcagcttaccggaaattggaacttaaattaagacctcactctgaccaacttgtcgattgcaccagattactattcgaatttgacctttccaacaacactctgtaatccaacaaccatgtaagatactgtaatataacactcaatctcataataccaactgtatacttgttctaccctactactatacctactattctcttaagtatataatattatatacttaatattatatacctataatagtatactaatactatactataatatatatactatacttaatactatttaatactataactacatgtgtatgtgtaatagtatgttacattaggtgattttcatgattccgaatgttttggatttttcgtagggtttggggtgttctgcgagcagtttaatgttcgggttatcccagtctaggaaatcatcgtttgacttccaggaccgcgcgtgtgactctgtgacttggtaaaaggtccatcgatcccatagtttctttggcacttccagcgtgttcttgatgtgagttttaatctgcaggaagttccaagtgggagcaaccagcacttggaacgggtgtccaaagtactcgtggtctggagtctggtggaacactgtgagtggacataacttattctgttgtataagttcgtactgttcaggggcccaatttggcacaaacctcagcggagcagagaagaggttacgcacactgttgttattgtactgcggcaagtctaaaacgtttgtgtccatgtccactatgctgtacacacaagtgatcacatccaccaacaaaaatgccgggtgctcattcttagtctcaatcttagactcaatcttagttggatcaacactgtgtttaaccttgttattagggtttagtgctttgttatagtagtttgagacaactttgcagagttgggctacggtgaacttgattggtactttgaacattagtgctgaaatcacttgcgctttctcgttaaacagttgagccacgacatttgctgattcctggtcaaacttgaagttccacttgtagtaaggctcaaacagcatgcccaggtgaatcacgttctcttcatgggtttgggaacgtctaaaggcactcagacgtcttaggttatatcttccggttctcctaccgtacccgtcgtcatcatactcctcgtccaagtcataatcttcatccatgacattgtccagctcgtctgcctggtcactgttatcagcattttcagcattctcaggatgtaccgttgggtcatacgagagtgactgtgacagtctttgagaaagtctagcacttgccgggttgtggtacaggtttaagttatttggcataactaagtttccctggatggtaaacaagtgtatcaacggtttctgcgtgtaccctagagagttgtccctattggagaaatcatctagagaatacaagtgagaacctatggtctcgaaattctgaggatttccgctgaatattaacacgtgacagggatccactccgaatagccaactcacatatctcaacacgtgcttacacggcattctcaaatccaccaccaggtcaacactcttcacactgctgtccaggttactttccaccgagttattttccaccaaactggcattctcagcgccgtcaccgttaagatcaccgtcgtttatgtggataacggagtttgagcagtttttccaggtggacagaagttgcagcgggtcgtacatcttgaaggtcacttggatgttattgagtttccactgaatgaagcttgggtagtcgtagatgctaaagttgtacagctggtgcagtttcaacttgttttctcgctccaattgccatttctgcttcagactgcggtactggtttagtgactcgtcaggctctagacccatactcgtcaaatacgagtctgagcaggagatgataaagttacttgtaccctccagcttaatcgcgggcttggtggtttcaaagtcctccttctggttagtcttcttctccacctgctcaatctcctgtctcatctcatccgtcggtctgaagttacacaccaggacgtctgcattccccaactggtcgtccaacctcttgtgtaccatcaagttcgaaaagttactctccacctccacataccaatacaaatgcaacgactcactcctcatcaacatgtcaattctcctatcctcatccattccattctctaccacacagttatagcgtataatttgtaattagtatattgttagtaagtaataagtatattgttagtgggtaatgtgtaataattatagtgttagtgtgtaatattaactatatagtcaagggttaacttggaagtaactacatagtgttaaatacatattaaatacataatgataacaacatagtgttaactatataactgggtaacatggtacctgtggaattgttgttggttctgttgacacttgacagttctacatctgttagggagttgggatcactgtttggaggagatccattggtatcttcagtatcagacttgggtggactttccactgtgatactctcaaatgacgtgtttgccaagttatcctcggacactggtcttccagagttaatactctccaatagcttattaaggtcctttaatctgtagggcgtcacaacgtcatttgacatgaagtggatcagctgttggaccaccactggcacaagctgtgacacagttctctgcgggttgatatgtaccattttcaggcatttaagattattctcatagtccttcgtgaaaatgtcgtaatacttgatgactatgaaggttttctcgtctggtggtgtggatggcctaagtagtcctgcagaacccaaaagagaagctgaacgttgcatcaaacttgtcgaactgatgttaattgttggtgtaaaaatcccactcgaactgctcttggggctaaaagcctcttgagagtcaactgcagaggaactcgttttcagcaaataaagcgttgggtcaaactgctggtaatactctctcctaagaagctggaccaaatctgatatagtctcgacggatattttatgtttgtatttcaagtcgccgatactcaggaacttattaaactgcttatttaaccctaggacataataatttacacataaatcttcgtctaagccggtgtccacgtgattttccgcatcgttggtttccatgccggcactatccgcgtggatagaattgatttgagagaacaagtttgccagtgagatgaacctgtcgtgtttgagtacaagtttagtgggccaagtattgaagtgttggttgagtaatatattaccttcaaagtcttcaggcgtaaataccttaaccttgacaaaactattcaacctttctcttgttttagagcgtaaacagtgtaatagtctttgtattctatagcgacttagcatctggtagttctcctttaacatgtcaacctcgcccagaatctcatccttcttactctttagcacgtagattaagatgtaggcgttgtacactttacttcttctgtaacggttcatgtggttactgtagatgctcgggttactcgggttagttgtaaagtagttataacaatcctggtcctcgccgccaaagttatcgtttatcgctgcgtattctgataccttagtcacaagctcgtcgtcaaatctgtaccaattgtcttcattctttgcaaacgcatagtagtgaccgctatttatagatccgtgatgcaccgacacagcctgcaatacataatcgccatcaacatcttctacacaattataaaatactataattagtagtataattagtagtataattgacagtataattattagtataattaacggtataatttgtagtataattaatagtataaatagtataaatagtgtgaatagtgtgaattaccggtgttggtgggatcgtgttgtatgtattttgacagtgagatctctttgtagaactcgaagcgattattcaatttgacggtatccattctactcaagtcaaaagtgaacctcttgagaaggaatatgacaactggggggaacttgaggaatcttatgcccttgttggctctttgctttccatgccccttagcctcgtacatgttctcgcctgctaggagttctggcgctgtaagcttgtcaagtgattcgtagatgttttcacagtcctggacatcaagttggatgtcctcgaatgtctccttacgacaagacttgtaatcaatgtcaatacactcaatataagtctccatctcaccctcgaaaatgttctttacacttccttcgacgggtgtgcccttcatctgctcctccatcttatctaacagtaatttcagtagctcgtgactgtcctgttgcgtgaacatgtctgagctgtcccagccaaacgacttcatcaactccttacaggctggcggagtgtcagagtagtttaacaggtaaaacaaattctgtaatgctagactcaaagatggagccttccttctctcagcctcctcctctaatattaaattacagtaatccttctcctccagctcatccaacacctcatcccagttcaagtcaaatccataaatgtatgaataatccaatggcctaactgttggtaaattactctcagggtatggattatccaaatccatcttctcctccactttatcatctaactcaagtttatcgtctaactcgactttgtcactgtctaagtcaattttttcactcggtacctcggtggccccattgtccagttcaattttatcgtccggtaactcagcgttaggggtatctaagtcaattttttcttcctccaactccactttaagagaatctaactccactttatcgtctaactcaactttatcactctgtaaatcggcgttatctaaatcaactttgtcatcctccagagtggcagcaacatcctcgaaattgacactattggcgtatttttgaataatctggaatgatttctgtccgattaaggtgttgagatcaaagttaaggctgtaaactgactttctaaacttggtaatactgtatagactctgtaaaagagcgttcatgtagcatgtggcgccgtggttttgaagtccaacgaaacccgttgctgccctggaattgtagtgtggatcccgtgctgaacggtcgagttcaggacctgtgggataaactccggccctaataactaggtcaccgtctctgttcaggaatccattctctaaaatctgagctagggaaatgaatccctgccagcctcggtcagtttcaaccctggaaaaattaaagctatcacgcttaaaaattgacgagtgtggttcagaaaagttaataagaattatagtgaagcgagtgccgtaacagatccagttttcaggccagtcaggcctctttgccgcctcaatgtaggcacttatcttcaggtggttcagactcgaggaatcttcagtatgtggacatacgggaaataacattatcctgaacacaaagttcggaagctctttccactctgaatatatgcccacagagtactgctcctttatcttctctagcgactctcctcgctgaattaacatcgacaagcgtcctataacgttgtctctgaagttctttactactaactctgtctcgttagggacgggaggaggaatcacaccctcggaggaatctgaagactggtccatcttaaactaatttactaactcaatgatccaagatagaattgattccgttgtaatcatattatttattaaaacatccaaattcaagttcttacaataaaatattctactacaatgaaatattccgtttagatctgaatattctattacgacggtggtttggataggaagtttgaatcttctattatagttggaattttatcttacttttagaatctttaatttttattaatttttgtttcgattactaagattatgatttattttactaaaaattttttttaatttataataataatattgcttagattaatgatatattataatatttaagactggaatgtttggattaatttggatagaaataaaaaggtttatgggttgaattgatcattagtttataatttcagtgatatggtataaaaatgagcaatgaaaagaacaaaacagttgaaaagggtgaaggaactaatcgcacattataatttatagctatatctaatatataagtaaaatctagtgatgatctgaagtagaatataaaaagggaaaatctgaaccccatctgtcgagttgaaggaaattaaaatattagagagtgtaaaatgggaatttccggctaatattgagttaaaatgttgagaaatggtaataacttcagatgtgtaacatgaatctcccatttatctactcgttcattacaacatcgacattcttccacaacaacttacaaatgcagttatctgctcgaaaacgcccaaaagacgatattttagataacttagatgttaaaggtactttagaattcatagaatctttgtagattctctttaaaaacattaatgtgtaggacttccgctttttcgaatgaaccctaaaactaccattaaaatcaatatcgaaggcgatgaaaatatcaggtaattcactcacactttattactcacattagtattaacattactattaacattactattaacattactattaacattactattaacattactattaacatatgtgaatatcatttgtgagagtattaggttgtataatttgtttcagaaatgagtatgatgtattgagtaaaatgaataaagtgctggcgttgcataatgctgataaggtattgaatgagaggccgactaggcattatccaaggcaccattacaagcggatgataaaacagaagaaagggttccaaatgagtcagtcgaggagagaggcgtactatgccaaacatactgaaattccaatagctgacgatataacatttttaagagacagacatatgaagggtattatggaagctgttaattgttacgattcgtggctaaacgctgaggaggataggaaaaagatattacaaagttactgtgaaagtgaatattaaataagtaaattggatcagattaaatagttttaaacaatagtgcgatgaaaagtccatcagttattccatttaagggaacgaaccgaacagcggaaggtgaatatctgttatcacaacctgcaataacggggtagaaatagtctcttgagcacttaagtctaagggtgcggtcacaggattcagcgggccaggtttcatgcctttctccatagttgtaagaacaacagagacagctgtggacgggaagaggatggaacttgacatttggaaagtttttaattacatcgcagagcaagtactcgttttgctccttgtcgagagaacacgtactatacactataaagcctccaggcttgagtaattttatagcctgagttaacagttctcgctggttagttattatctttgaagcgtattctcggttccagctattttcaagccatttaatcccccagaatctaagggttctgattactgatctcagagagccctcgagagtgcattcggcgtccaggattatccgatcaaacttctcaagcatagattcaccgttgtattctgaaaactcctgagagttgatatgcttaaagctaacgtctattttgtccctgttaaataattccttcctgagcattgctttgcaaagctcaattcttcgaattgaggagtctaagcctataatattccacttggtatcactatttatcttatctgcactgtctattgtggcgaagagctttcctccaggagcgcaacacatgtccaaaatccaagcctcctcagaaccggaaagttttctgagtcgcagggaatcaactacggcagcacttgatgcgtctatgccataacaactggatggaatgttcccaatagtattgtaaacctcgacatcccggatccagttaacgatgctatcattggggaaattacagtcaccgactttccggtaatatcggtattttctactggataaaatatctgtaatctcatttttatacttttcaacgtcaacacctagttcctttagccaggaatctagtttatgagagagcaaatcagggttatacggtaaaaccctgttctcatagtggttttgaatatcaattaaagaatccatagctgtaaatattgtaaaatttaataaaaaagtaaaaaatagcaccaaggaaaataattaaagataattataaaattaatttctttaaaaaaatcagacattcctgataacacattttatacgttttaatatattttcttagtaaatgtaaattttaaattaaaagaaataaatgtaatttgatggatttagcatcctcgtttacacacaatgattcttccctttccctggaaacctcagataagtctgtttcagagctcttatcagcctattataacatttccgaggatttaccagaatcttcctccttggaaaatgataaaagtgaatataaactaaaaagatcggcttccattttaaataaagaatttttatcgcattcctttgatgttgaacatcactttgaccaaatactcaggaacaattccatctctgataccataggattactcaggaaattggagagggagattcggcagttaacagcagggaaacagctcttgatttatgacaactatgagtgccttttctcggctcttgacactgtacacaatataaataaggagctggatcaggtacaaaataaccttaaaacgctaaactcctcccaagtaaaagctgcttcaaaggacattacttcgaggtatgggattagggataactttttgcacatttccaacctgtctaaggcggggaacgtgttcatgttcctctcgaatctgtgtaacacacttgtatctttcaatacctctaaaggattgttttactcttcctcagaggaaacttctaattttgtaaaatattcaccaaaagatgtactatacttttgttcaacagtgtaccaagttttcaagcagtttgaccagaactacaactttctgttttcgagttattatcccattctcacaaatttaatatcaagcaatgttacgttaatgttaagtaatcaggagtctttatactctgatgctttggttgatacgtgtaaatttctacacaaactctcgtttaaccagcaccagttgtatgaattttacttttttaaactgtcatcgtttctggaaaataagataagaaacctcttcataaactactccaatagcgatttctcatataattcgctgtgtaatgacgtgtttgaatctctgttcctggtttacgactcagtttcaaatgaaaattttaaggcttttttaaactcgctggatctcactggtgaaagagggaacttatgtttttactgttttgacaatttggaagtgcaatatgaatataattctaagagtaagcttttctcatcatttaaattaagttcaaatagttgttcatgctgtacagaggatttgttggttcaattcctgatgcactacactcacacctctttcttcccactaacttattctatcacaagttataaatataaccttaagactagagacgtcacttcaggattaactgtgctttttgaaaggctcactcaactgaaaatttcagataattaccaacttttgtttttggaacactgtactacctggctgatggtcctctcattgttgtatgtccagcatttattttttaagctctatgagtctataatatccaaactggtttcattcctaaatggatcatacacttcagattttaactatgtcttaacctcgtttgaaaagttggtggaagagctcagagatgtatcacactttgcaaaagatttgagcgtgtttttgaaaaacggatttgaacaggttttcaactctcttgtttttgtatacttttgtggaatcaagtacatttgttacttggtattcgtaaacatagttaaactgagatttaagtctggtgaaacccaactctactcaacgtctaaccttatgactctgagatcatgtgatgagaagaacaaaaatagtttaattgaccattttttaacggaatcaggacgaaatttggatttaaatgtggataacgattttaaccttttttcagtgattgagttcatggacaggaatgtaaagttacattttaagaattttaagtttgattctaacaataaactttacatgaaaaatttactcctgttcctgcttaagtttgaggaactgtttcaaagtctactcacagttttggaaaggaactttaacgagtcacataagatgctcacaactaatagcttagtcctgagtataaatccaaagactaacagtgagtttaaccatgtcaagtgtaagttccgggaacattttataaaaaatacaaataatctgttttttaatacaattttcgacgatttgttcattgatgaacatttaccccttttgaacgttttattactttcacacaaatacgccaatgaaagtaaagcgtactttccacttaaaaattacacaagtgggttttcagaaacatttgaaggcaaatttacgaattctgactataaactgagagatgattgttttagcaaaaatcactttgagaggtttaacataagcataactgagatgacaaataatgtaatttcacatataatgttcgattacatatatcaagcgctcaagatcttgaggtttgttctggagaatttgatgcttggaaatgatgtggttgacgagtcgataaaggattttacaatacttttatcagaagttttacaggacgttaatgttttaacaatttctcatacaccagaaacagctaatttaaacaaagatttagacaaggttatcaacacatttctcaataattcagacttttcaatcctgtcaaatgtgtacaaattcaagtttaacgcctcgagagatatgtgtctgaaactgttcacactccacatagttcaagcactataccagtacaaaactgagtacctgattgacaagaataacctgataaagttctacgaggacctgaagcggcaaattctgatcattttcaagaagaatttggatctatttataatgcagtcagtatgggaaaaggttttaaatttaacataactaatgtgtaaagattctattctttaagttacataattagataaatcaacgtaaacagtgagatttaatcataattgactaaaataattaattttggttaaaaaatttatcaatgtgtgcatgaaaaaaatgtaaaaaatttgtatagtgtgttagaatatggaaaattttgtaacacaagggattttctagagtatttttaacgattaataaaatttatttatggttatttatatttaaaagaaaatattttagagttaatagggtaagcagcacttaaaaaaataaatacaaaaaacccaaaatttagaaataaatcacaaaaatagaaagaatttaacagctttaagtgtgttattatatgttgataatataaagttaataaattcgggagatctggaaagatattttatagatccatacacctagcgatttggtacattatcatttaaataacaagaaaaaccagccgttcgactaaatttttttaattttaattaaacccataattaaaattaacctttttgagaaaattgaagctttcaatagataaaatataataaataacaaacactattgaacgctgttaaatcagctagaattattgatacaggaattttaaacattattttttaataaatataaagcctacgaatggtaaaattcgataattctgccgggattggccattcatataatgaatggatctttagcacacaaatgtatattaatattaatcatccaatgtgtatattgcgctgataaaccaaatgatcacattcgaggtgcgaatggaggacaagcaaacgaatctggtgccgaagatgatggtagtgaggacaactttaatgtggcagatgtgacgggtccaccaatatttatgggaggtgctccaggttattcacctgcttatccacaacctcctgtatttcctcagccaattcccgcaggacaactagtttcttttcctccgagtcaagtaaatttagtaggacaacaacaggtttatcccggaattccatatcaacatattcccataccaccttcgagtcaaccacaattacatccacagcctcaattacaccctcaattacaccctcaattacaacctcaattacaacctcagttacaacctcaaattcaacaagttattccgcctggttatgtacaagtacaactcattcagccaggatatggaattggctatcagcctcaggctcaaattataggttctgttacacctgtaacgcctttcatatatcaacctgttcccgtagcttatccagtggcatttcaaccaactccagcatatgtagtgactggaccaattcccggtactcaacctacagttcctgttcaacaatttcaacattatcaacctgtacaaccacaagctggacctggtttccaagatcaacctggacaacttagcgattctagtggagttgtcggcgatgttgatgataaatctcaacaaactagcgaggctgaaggtgagggtggagctgtaggaggtgagcccaaacaaccaaaggctgaggatgaaattgattatgaaagttatgatctgatagtgaaagatttggaatcgttagacattgaggatgagactaaaaagccgagcccaaaagtacctgaatcaggaatcaaaccgcatccttatggacaatttgtacctggatttttgtctcacaaatacccatcaattactctctatggaatgaatggtaaaaatgaactggttcaactgggtactcaccaccacaacgtggtatcagacactgattatattgttaaagttcgtttaaaaatccctatttgtaaattagtttctgacggcagaacagtatgggatcatcgaccaggtttgccacaacataagtttttttgttatttcaaatatgagtcaaggttctccttttattcggaaaaattagtagagtcgtgtatgatggataaaggcttatggatttgtacgttcaaggaagtcccaggaataaaattctacaaacaaaatgcacaaaacgaattagttgaaattggtcttgcggagatgcttatagattacaacgggattttagaagttagatttaatattgatccgagtgtagactgcgtgctggttagatttaatgaagagacgctttgggaaaagatgcctaatatggttttaagaggattgacttatatcgacgacaattcgatgatgctttacatttgtcaaagagaatattggcttagaaaagttcgtggcgattgggttttgaaaagactcccaagacaaactaagggtaggaggaatatgaaatgagacgaaactcattcaaccggcgttaaataggtaaataggattaaattaaggataaatagacaaaattagtattttaaaagctaaatgagtgttttttattttcaaaaataatcaaaacaagtatttaaaaaagacaggaagagcacaggtctagaggtgactataatcagagaatttatcaacacataaacaattgaccaatttttgatgtaatataatttgtaaagtgaaggaacgagatataatattctatgaactgatatacactatacatttttatacacttgatgacacctgtacacaacgctccccatctatgattaaaatcagcaataacaaaccgtgttaactattccaaggttctctcatattatattatagcattggtatgccgattttctgtaatatatagtgaatttatctgaggataagactggttcatatactagggcatcaaagttgacaggtatttccaaactatttaaggtgacccgatagctcatctgatgaagtaataaattattgatacacctctcccctttggttataacttaatactacacacaattgtggcgttagaggtataaacaacggaatgacgttgtatctgtacacctggttccaaaacagcgtagacaagaagctgaagcctgtttggcccttctcaggcataaatctgttcatttgaagcccaatgaatagggtaatttagtgtaatagacacacacttggacccctgagggatttcggggaattttgaactaattttaaatgtagtttatatcacattatagtatacattgttatccaattcgaagtcaaattggtgaataaaattccatatggataaggacaaattagtgaaaatggaaaaaaatgggttgggtgtgttattcgcaaaataatgttgaaaaaattcgtttaaaatgtaaaactggttgtgaacaatttaatttggtgtcctagataatttttaatagataatatgtatacaggatgggcggagaaggtacgattagtgagaaagaagaacgacctgatggtggggtaaaataatacataatccccattcttacggaatgggaatgggtccgtagattcacactttataaacatcgtgtaccacattgctaagaggagctttgtatatacatgaagtcattagtgttttttgtagtggcagcagccacagtgcttgccgtccccgttccagtcgtctttgacaaagagttattattaggcaaggacaccagatttgccgcagttcaccacgtagctactaaaggtgtagaagttggagttactgctccagcagctagcttcctcttcttggtccctaaactcggtgttgaattcggagatttcaaatcaaagcacggcttgagacatcttgaattcttagtcttgggtgccgatgagcatttgactcacttactcggtgtttctgactgcaagggctggttcgttgttgtaatgggtgtctggaccaaggccgctggtttgacccacaaggtcttcggtggacttaaggatacagcaggtggtttcaaacttcaccacttggctgatttggatgctggagctgattttgtcaagacacacgcagtttctgacttcttgaaggccagcgtacacggaacagcagttgatgcattccagaacaaactcccatcacatccatttacccacaagcttcttgctaagttcgcaaacttgctatgaaataatttttaaaatttgattttccattacaataattgtcagacaaacttaaaaaaattgtgataaccacaatcagtaatgtgatagataaattcatacattcataactagtgtacattttactcattacatttatttctgttccacttgcatgttaagggctcgtgctctaagggttggttcagtgtagtaaacttgtgattacactacgaatcggttgtgtttaatagtttgaaacgttttaatctttcaactgtttccaatgttgttgcatagactgggtggatttgggtcaaattgtacctttgggaatcaatcagagaaatgccacagagagcaaaaaaggtatgacaaacatcacccatataacctggaaaataagcaattccaccgtcagactgactttgggactcgattatgaattccaccaactgatcgtgatttacccagtcaagacgacctactcagaaataaaactctttatagtacctatgttacataaaactgataaaatccaccaagaataacatatatcagatttcttctctggtctgccatttaacccaccatctactcaatatagttaattatacagtattatatagtttatttggtatagtattaacctgtagtttgtctttcagagagccagaagcccagtttgtctgagtcaataagggaaagtaaatcaagttctgcaagagctccaatacagcagaaacaagcagctgcatgggattcgttcatgggctgccaggcgaacccgccatcgaagtttctgcaggataaaataaagtcaactgctttccttaaatcgatattattcagacctgcaagtagagaaagacacactaaggcgctgtatgaatttctgaacgtattttaaaggaaaaagaaacgcacctacagtcagactccccgtatttgtcggacgaaaaacttccatctttattctgaaaacatattacagtaagaaattctacctgaagagttgaaataaatttaataatatcgttccggtttataaaatccagcctgttaataagagccaatgtcaagatagcgtactaaacgtaaaaaattaaaacaaaaatgaaaaatcataaatataaaatatactaataagatgtgtaataaattttcatacatgtgttgcgataagattagaaggatgtttagggccgaatccaaaagcaccgtcatcattttttgaaagggataaaaatttgatggacatggattccaatgtttcctttgttttaggatgaacaatggaatttggaggtccttttaataaagaaattgctgtaagggaccagtataatccgcccagtttaattggctcaaaggcgaatccttctattgaaactctatcatccaaactgttcaaaaggaaattataaatcttttcaagatctagttttccttttcctcccataaaaataataaaaacaaaatgtttgcaagtaatttaactagttaaaccacacataaatactgtgaagaattctattaataattattaattagttcttattttttctcgtttattcatcatttaatatttacttattttaatttaagtttctcatggaagaacatttatcttcacttggaaaacttttatcggattatggaagcgtacgttgtatatacacatttcaacttcttttcaggctaacgtgccgtttgtttcttctaagcttaatttgtcagttgaagaatctaaagagtaatttaatccataataaaacacatagattctaatttaaatcttaggctttttaaacaatatgtctcaaagaatgaagactattccattttatatactgtacaatacaatactgatgaagataatattaacttgtctatcgtatccggagaagaattacaaggtatgtgctcctcagtttataattctcagaactgtcctccaagtacccaaacttacaatcttctgtatacggtgtctcaagttgcaccgaaaacttacaagacgcatacaagaacatgttttttacctttttggaactctctaaggaggaaatgcttagatgccaagatacaaatgagttatatattccggggtatttaataaaacatttatggagtgtaggtttgtaaatttaagagtaagtaatattaaagtgagggatttcgggaaaaggtttggtttaaaatctaatatcatatttagtattctatctcaacctagtgtcaaagtccaagaagtgaagaaggagccagttaaagtccaagaagtgaagagggaacccgttaaagtatccaaagcagaacatgttaagactgagttggaccagtataagatggattcagaatctagaaaacctaagaaacatgaagagcagaaggaagatgtgtcattatttaagtctgactcttttgatgaacctattgaagtggaagattctgacactagtccggaatctagagaaaagaaacgaaaggaagcagtatctgataaagaggataaggcccaacttgaacataaaagacctaggctaaaaaggaaaactaagaatgagactgatacaaaagtggagcaaaaaataactatatatggtatttttatggcaattgtaatatatttagaacctaaaattgagctggtaaagaaatcagaatcaccaaaaactaccaaagttatggaaaaggtattgtttacctagtatatttaaaatttaggtctgtaagaagagcagttatatagaaaacggatacttcgtagtggaagaatctgaggactttgttgaagttgttaaggaaactaagcaaaccgctgagaaacagagctcctctgttaatagttcaagaccaaatacaactgatgacggtgttaaaaagagtttaaatgggaaatatggattcacaaacaagagtttagaacccaaaaaattaaatcaagtttcaatcatgttggtttaaccttttcgtaattcatgtttaggtcattctttaaaaaacagtaaactaattttaaaatgatggaatctattttaaatttgtaaaatttatcgggaaattgaattatttcgttacacatcacttttattaatctattattaatatcatatgtggtgtggtttatttctcttttataaatacgtattaatattttaatgtatagtatgaaaattattttaatgaagtgattcttaaaatgtgtaaatgaaccttttccttattttggttaattttgtcgtttcgaacttttcagaagaatttagactaatttcccctaacaatgttgataaatattatagaaaacacacgatttggttagaaaaggatcctgacttgagccataatacaacaacggctcaaatagatcctgaaaacttgaaagttaaaaacaggatcgtgtcaattgttggaagaccgaacgtagggaaatcttccatattcaatcgcatcacaaaacttgtaatttacttaaatactaaaatgtgtcaatgttttctttagtttcattacggaagtgtagtaaatgacgcccctggaaccacaaggtttgttcttcctgaacttaaatttcattttaagggaccgtcagtactcaattgctgactggaacgggaaatactttcgaataatagatactggaggttatgatgatgaccaactttactctgatgaagtaatttatctttaatttctaaattagttcttagattaaatctcaaattaatactgctatcaaggagtcatctaaaattatctttgttgtggatgctttggtatttttatttataatgtattgatcgttaggaaggacttacttcaatggactatgaaattagagactatctctttaagcataccaagaaaagaagagatttggaaatacttctctgtgtcaacaaggcagaatcatatagaagaggagacatactggcccaagtaacacactaatattatttgtaaataatatggattattaggaattttggaaattaggactcggaaccccgtacccagtgagtgctttgcatgggacaggacttgcagaattactagacaagtattgtgttttgagttaaaatttttaggtgcgttgaggactttgagacgggagaaatcgttgaagactcacaaattgtcgttgcctttataggaaggtataaatttcttagatttatccattaaactttatttcagacctaacagcggtaaatcatcattgatcaataagctgatcggtgaaaacaggtgtatagtttcacctgatgaaggcactacacaggactcaacaaaggtgtttgtgacttatggtaaggtaaacagtgaattaaagttttaggaggtgaaaaaatgtcatttgtcgataccgctggcatgaaactactgaccaaggacagaaggagttatttgtctcaaaaaagttcattaaaggtaatttatttccatattaagtttttttagtcaataagagccagtgacgtttgtattttggtgatagactcatcttggggaatttccaaaaacgatgtaaaaatggctgaggagataaaagatgaaaacaaagccgcaataatagtgtgcaacaagtgggacttggtcgacaaaacaccttcaatttttgacaatgtaactctaacagatacaatatttttaggttgttggatatgttcgagagaagttgtattggctggactatgcagatgttctaattacctccgcaaaatcagggcaaaaggtccagaatatctttgaatctattcagaaaacatataaacaggtactttcagattaataaatccaccttcagtactgttcaaatctgcctacaaatctggtcaataaagttttgaaggacgccacgttcaacaggagactacctgttactcatgggagaagacttaacatctactatgccactcaggtattcttttaacgtattttaagaatgaaccaataataatattgccaatttgatggttataataaaaattaggtccattctaaaccgcctggatttaccgttttctgtaacgattctgaattaatgactgatgactataaggaatacttggagaaatacatgagaaacgcatttggtctaactggaacaccaattcagtaagtgaatctttattttcactaatttttaggatatatcccaggtccagaagaagaaaggatgttgtggatgaccttcaaactcccgctattagcagatctaacaagaaaaacgaccttctaatactctaatagtatttaatatagtaaccacttggttaaatatgtaaaataaattactggaataaaattaaataaaaattagtatggtacagtattgcttgggagttttaaacggtcttcatgtttacaaattggtccaaatcaccaggtttcaaatcaattctaattctaagggaacagcttggacattctgagatgagattacctaaagtaattattaaatttaatcaaatttacccttcaaaaggtcttctaaagcaatttcaaagaggtctccacagggacaaaggtaataaaaagtttcagtttctggatcgtagtcgcattcactgagtttcacaacttcgtaaaccagctggtctgtaaatttcccgaagtttccatcactttcaacttccaatgagtaatcaagggaattgatggaatttaaaatagtagaactcatttaaaaaaagttaattcacgaattattatatcaagtatatttaatttgttccgagaatgatggggggatgttactttagtaggataatttaagcatttggaaatgatcatacacattagagcatattcaggattattcctaatatttttaaataatttattcgtagaatcttattttttacccaataattcatactcttttattaacacatttggtcataagtatttcgaggctccaactcatagttttaaaactaaacatatcgcaaaagaccttttatcaaggtttaaaaataaaagtcttcaagtgaggttacacgaagatagtaataatgtgtttacaaatgaattggaagataggtatacaaatcctcctggatttaacttacccgatcaaacaccaagaaacgttatcgcaagatacatgtccttaaaggacgctctgatatcaaattccgcaacgttgatcatgttgtccatatatttgataaggatattcaggaccttagttatcgcaagaacttttctggacacactgattcaaattaacccctatttacctccatttaacttcatttacgacacaactaacttctatcttaagttctgtgactcctttcctaagttttttggggttaatcttctatctgagattccctggttcatcctgtctgcccttgaacggtacttattttcactactgggtcaggaaccctaatattttatcaattttatacattccacatagtatacttattgtattatattgaacagtttaacattaaaagtggaagtttatctaaaaataaaagtgtagaagttatattacaagagctgaagtccgacatttttattatttagtgaatcgagagggactgagtcattgaatgaaagtgttagtttattatttacacataaataggagaggatgaaggcgaggttttcctctggaaacttgttaaagtctttgttacactctctcttactgtagaagatgtgataaacagtctcgatgtctctggttgtacattgcgatttaatgcattcaagaactgagtttgccatttctgtgagaggatatggaaacactccgaaattaaacttagacttgagcaaaaggttgcgttttttcttcagagactcgatttcgtcaccttcaactttgttatccttggaattaagtgcctttgtgtagtcttggtgaatttgatatagagtgcttcctttgtgactcttctttaaaaaaagggctccccaaatagaaacattgttcttcttgcaaaagaactgaatagggtgtaagtaaaaggcgtactgcttttcaacaagatatcccagaatcaaagccagaaatgagacgtcgacgttcctcaaaatctcttcgtttttaaaaggaggaaagttaacacttgcagttcccagtttatgaaggctgtaattggccgtaacttcgtcgtttattatcttgtgccatatttcaagctgcttggagagtgtcaagttgttgatctgaaaaattatttatagttagtatttttctaacttgttccgtatagagtggagggaaatttttaaacttttcatgtgtattaaaatctactgagtccatcaacaattattatatttagggaagattccatgaccagcatacacaacccccatgagcagtttattaaacaattattttcaataatgtcgtgtaaattatttagttttctttaataaatggctgaagatacgactccttccgtatctccagtcgctacagcagtcgttctctccctatttaccatcatatttcttttattatacttcttcaagtaattccactattttttcaccaaagttcattgtatttataatgtgtaggtttagatctaagccgatattcccagagcctgaggaaggaggctcagtttcatctcatcgaccgaatattgtaacactggatgaaacaaatgaaggtgtgaccaacgaggacggcgaggacgaggataaacccaaaaagatgctaactgccaaacagaggaagcgtcaagaaataaaagaggagagaaggcggctgaaagcgctggaagatgaagaacgtgaggagagaaggaaactgcttgccaagaagcaggagcagatagaggcaaaaagacttgaaagggaaaccttgatggaggagcaggtattatcatcaatgttatacttaataataatggattaggaaagaaagaaacgagaggaagaggagagggcctaccaggagcttgccgctaccttcgttgtagagagtaaaggaacaatttctgaaacgaaccagtacacagttgacgactttatcaattacatcgtttcaaaaaaattatccaacgttgaagagttgtcagctcggttctctctgaaagctagtgtaagtttttaaaaatatttattttttaggaggttattaagcgtattcaggaactagaagaccagaataagctttttggtaaattttaatatgtaaattttattttcaggcctactggatgaccagggccgatacatttacatcactgatgatgaatctgaagcagtaatagcctacttaaagtcaaagggtaaattacataagcagagagatttactttccttcttcaactcgacgatttccctagagtcaaagcctgtaagctttaaattcataaatttctacaggactcaaatgtcgtggatttagaggacgaagaatagcaattgtacaatattaataacctgtaatatattgttattattttattataaatataaacattgttataaacattgttcaagacaatataatcaaatatatattttaaaatgattagaggaaattgctaaagtgagatttcagcttatccttcaattcgtccttgtttatattctcatttttaagtcgctcggtaacttgaaattccaaagctttcttgaattctggcccagaagttattttaggtaaaaggtccatcaactaaaatacatttaatgaaatatataactcaaacctcttggcctgtgattggagctttaaagttataagcttcagttatcctaaggtcattagcaagtggaaccagttcattatacactttatagtctactaaaatattaaatgaaatcaaatacctttatccaattcagctaagcataataacaatgattcctaaagaatttttattaccaaaagtgaaaatatgtatataggtttcagatagaaattaccttccataggggacctattgacctaattactgagcctagagaaactcgatccactttagaatcatccaggaactttgcaaaggtaacagagccttgagaaatagtgtgagatctgaaaattttttaaagggttacaaaagaacctggaggaatattgatttgaaagttttaaaagttccttgaccaaatattcagcaactgacattttcccaataggaggaagctctaacaatttttgaataacaatattgaaaactaatatatttaattttacctcgggttggtgtcacaagtgctgacaagtataagcatttgtaatcaatttctggaaactttgacttctttaacctttccattagtgaacatgatttggtgagcatgtcgtcagtaatttgcctcttcatacgcttcttttcctcttcatcatagtcgtatggaggcacattaagaaggacgtgtaagattttgaatttatacattaagttaaatgcctctgaaacatcacttttcagtaaaatattttcgatttcctgagatattcttggtctagtaacctataaccatgtgaaacccttcaaataaatattattaatttgtaaaataatgaatatttctagtatttaataccttttgagatagtgcctttaaaacctgttcatttatggaatctgtaagtttttcgtctagttcaaagttaaaacgtgagctaaatctaactgccctaattagtctaagagggtcgtccatgaatgtttcaaagggtgatgaacatgttctaattatgccatttttcaagtcttcaagaccagttcccgtaaagtcctcaataaaattcttagaaatgttgtaaaacagagaattaactgtaaagtcacgcctcatagcatcttctagtggagttccaattttcatatcaggaatcctagtatttgaggaataatcttcagttctaagattaacaaagtctacatcaaaccccaacaggttcattgttgcggtttcaaggtgtttagactgttcaggacacctttttaccactccaacagtcctagaaaagccgtatttatcctttgtaaaattattcaaatattcacaaaacttaattcctgtcatttttggtattgcaatatcaatgtccttgttattcttatcaaggagtttatctctaacccagcctccaacgactctaagatctgaaacagaatttaagaaggaattaggttacccatttgcaaatcgtaaaagtctacgcattcgttaagtaagttgaaaagtctattctctgattccgtgattttaaacttggctcttccagatttatctgtgtagttgcgataaacatccaaatctaacgaaactgtcgtgtcggtcatgttgacatctacatttgatagtttaaggaatttattatagttgttggtgtaatgagttccagatgtaaatatgggacggaacaagggtctcaatttactttctctgaaagcgtaaaccggcaaaatgaaattttttgatttaaattgaaacacattaacaaaattactgatttctagcttatttaaactatttttgatgttgttgaaaatgatattactcatttcatgattagttattttacagaagtcccacttaacataagatttcacagttaaggagtcaaaaattaatagtatataaaaaattaatccgatacattttgaaaagttgattaaaagaacatttttatgcatagaagattattgagttaacctatacagcacataatttagttatttaatagtgtgaaaaatacaaagaattaattataaaaactgaattttaattatttgttgacaaatataatttctgtaatataaataattaatggatgttagtgataaaaagtatctattgagattcccgccatttagatcgcagggttggttagaggaaaatcggaccttgaaagctgtagaaccgagtttgtgtgatgtttcaattcagcctaagggacttttaaactattctcatgttaaagcttacgaaataaaggctaattctgtcagaaaggaaattagaaacgctttgttcagacaagctcttttcaaggtattttattatattcatattaaaattaaatatcattagatacaaaatattgaggtaatatcgtataaagactgcaaaaacgacaggctactgattgacatttctaaaactgagaaaccgttccaatttttcggatttttaaaaaataaaacggtaatttttataacttttaaacaattttaaaacattttttcaggataattcgttgttatctgaagaaatatggactgtggataggtgtggagctcctcaaaaatacagggtaatttttaacacatttaaattaaaaaatgttaataattgtattaattaggttagattttttaaagaaggacctgatgggtttaaatgtaaagtatatgtcacctctttttcgaattttttaaactttgtaaaatattacctttctttgtagaatataatatttttaaaaaatttacatatatatgtttgttcggtccagacttgtataaacgtagttttatttttttcatcactgggtaaattaccaatataataacaccccagtggtctgggtaccattattgtaacttattattttgcttttgtacagaccactattaattgttttaatttttatttaattaaatataactttgaaaatggcaagtatgtttttctttaattttttttatttttatttttaggatttcttaaaaaattattgaccaataagactgatgaggagggcgattcctttacttctgctcatgtaagttaatggtttaccgttttaactcattatttagcttggggaggagaacaacttttattacaatgaggaattgaggcaatgggtagttcgcggcgaagaggagagggttagggaaacccttaatagcacccctcctccagtggtgggaacggagcctaattgcgatccttccgttcctcccacctctcaaactaacgctaatggcttggatggaactcaagtccctgttcgtcaaacgcacctggtctcccatccgacttcgactcatttgtctagacgtgttgtgagatcctctcagctctacacgaatattcctggcatgaacgtcgttgagacaaggccggcttcagggccatttctcaacatgcctcagtcaccacaatcgcaattcgttccttccaaggaagatttcgacccgtctctcgtgaatgatgcatacgccgacctcatgaaaaggtctacttcaacttccacgtccacgtccagaaatcataagccagaggatgaacagaaacagtaaaatttaatgtaaatccatataccaatttctcactagttctatttgtgtatatacttttactataattacaagttgttaatttttaaacactttcctttgtttccttctgcttgtttttgagccgcctaaaactaatgctgtgggtctaaattacctcttttttattattatatagtcgaaacaacgagtttgcctaggcccttcttccgcatcttgtacttcagaggatttcccattgtcctaaaattcgtttaaaagctgaaactcaccagttgttccatccttcttatatagtactgataagttgtctggccggtgtaaataaggaaaagatgaaacacaaaaaggtataacagaaatagaaagggaatcaggttaaaaagccctgatcctagtaacaccgccttaaagtatttatttgaaatattgagaaccagtgctcgaaacttttcatgtgccagggcaatgtctttgaatgagaatacgatataaaaagttaaaacgtagttatatgtcaaaaacaccagggcgaaaagcaacaaaaggataaaatacaaatagtttaccgatccgatgcagttattgacccaaacacagtggtggtcaaacttcgtaatacatttgttacatacattacagtgcttactactggggtctacatactcacatacgttacagtgagacatttccatttgcatattagaaggttgtgttccattctgagggtttgctaggggacttgtggaatcagttgatttggattccgtgtcctttacttcatttagtgaaccgaaattgggatttaatgactctgttttctcatttgagtccgtttgcgttttagaaaaatacttcaagaacttacctattttattcttatactcagttttaggatatataaccgatgaggcgttgggatccactgggtcaatcagtgatacgatagtgtaaaaaactaccaccagcagtaaaagaagagacgaaataacgtagaatagtgtattattgaaaaccgatatgggcagcactacgtagtagtggatgaaagagattatgaaggtaacgaatatgctcagaaattggtaaatgtgtagggggagtgaacagcccgttttcctgtgaaactttgacgtatttctctcatgaaccacatctttaaaaactaaaattgtcttcatcttatcggtttcgtctaatttagtctatttgtgaccattaccacatgattctttcatgtgtatgacggacacagctgaaaagtggcagttaacaaaaaattaaactccaaactcaaaattttaaaatgaacaaactcgcaaacgttaaaatttagaattatacattgaaacgaataaattctgtgtaaatgttctgtataaatgagcactatattgaaatgacaaatgagttgagtttacttaaaataatttacatttttaaaaatcctgctcccagtcatctgagcttacgtcggaatctaaatcttgttccgaaatcttcggctgttcgtcgtcaaactaatacatgtgttaaagcttacaaaacaaacctcttcgttatagttttcctcttctggaatcaacggcggtttcaaacctctacacgccaacgagtcccaatcgaaatcctatccaattattaccaaacaattaatatacaagatttatttatcaccatataactatactaataatgtactaattatgtaccaataatatacttaactatataagaataacccatcacataactgtaataactgtaattgttgtataatgatactctgaagtatggatgttctttgatatctttgaatccgtttatggagtttcctattctaagttctgtttttctacaaagtagtctcttgatcaggtttattccatcctgatctctcaagaaatctggaaacttcagctcatctaaattatttttactcaatttagtgacttaccatgtaagactttcttgaacacgtcaaactggtctacagcatcatctccaaatggaagtggtccgcatataaattcgtataggcatactccaatactccaaatatcagccatgcagttatatcccttgcctaatacattgtgaacaggtagaagatacccattataacttcaggtgccatgtactgtggcgttccaatcaccgtaaacgttcttccctctatttttttagcagagccaaagtcaatcagcttaatatacccctgatgatccaacatcacattctcaggcttcaaatcctaatcattatcataataagagagtttattactgagttatacgcactatttaaacttggaaattatgtaaaattgatgtaattacgtagaacaatgagaattaccctgtatataatttggcgttcatgtaagtattctagtgccagtatgattgatcctaggtaaaactgtgcttgcggctttttcaacaactcaagcttccttaaggcgtcaaacagttctcccccagttacaagttcagtaagaaaatatatattttcttcatccttaaacgtttttactaatcagtaattaaaatgcaaggtgtgtgtataattgtgtataattgtgtaactagtaaataattgtataagtgtgtagttaatgagtgataccaagttgtatgatgaatggatgatcattttgggccataatttccttctccattttaatatttttttgttgtttgttatagacaatgagctttttactaacacatttgagtgcaaatctaagttggctcggctggtgaactaccaagtttacggttccaaaggtgcctgaagaaattgtattactgagtttaataccttttcctatttgtctaactgtatgtaaatcgtcaaataagactttagtatcctgaacacggattctgttctctagatgtgacaacataggatcctcgacaatctaaacaaatggtagataaagtgagttaccttgaggaatacagatttttccaccacccaaaggtccgagtttgctgaagagcataccactgatgctgttctgggctcatcgtacaaaagcgctctttctccaaagtaatcattcttgcccagtgttcttaagcgtgttccagactttattatgtctacgtctcccttacttataatgtaaaaactatctccaacttcaccttctcttattatatattcgccctttttgtaccttttactcttgaatttttttatgagcatatcaaggtgggcttctgacaagtatctgaagatatacatcttctttattacagacaatttattgttataatcaagcttctcgtcaatcaaatcagtgcctaaaatctcctgaattgcgtgcttagttaggagtgctaatttacagctcccttccgctcttttatcgttaatgatacacttgactgtgtgggcaaagggtatttcaggtgataacacgtattcttccccgaaagagtctcctctctccattatcccaatctcgttatcctcatacaggatttgaactgatccctccaggagtatgaagaatctgatccccttgatcttctcttctctatgtaaaatcacgtcgcctggtttaaagtctcgcacacttgcagattctatcagtttagccaattgatctggtgtgaactgtctaaacactgttgagttttgtaaatattccatcatcacgtttctgaacaaaacgttatccagattacctaagactttgtttaaaatctcacggcctagtgaaacacagaccgtgtcctctgttgcaactatggttgcactcctcggttcatcatagagcaaagctctttctccgaaatattgaccatttgttagtgttctcaccttttcgtcatttattaaaacgtctgcttttccctcctttattatgtacagaacatcaccaaaatctccctgggttacaatcctgtctcctggtacgaatttggattccacaaatgcgttggttaccatgtttttctggttctctgtcaacatttcaaaaatcttcactgagtccaaaaatgacctattttgggaataaacttccatggaaatgttctttagggtttccctgaacacagtgcggtttactccccaaagagagcccagcgtatcactcgaggcctttacattttcagttactcctcttacctttactgttgctgttcgcggtgtgtcatttatcagggaaatttctccaaaagctgttcctcgttccatggtgtttacaagcttcccatcaatgtacacatcaaagataccctcattgataacgaagaaatatgagccgtttgtgccttgttccgtaacttttgagcctactgagaagacgtagtaggacattgagtccacaaaagccgacatttcgagatcattcagggcagagaagattacattgtttgcgagtgacttttttatgaaggatttgtcagattcgctcttttcgcgctttacaagatgcttcacaatttccgtatcctcgtacgattctgattcattggctttttttataaatttagatctctgtttcctgatggtaggatttttgtccttgctcatggacctattggcgaatgtgttggccagatttttgaaactagccgtcaattcatcaattttatttgacattggtttattttagcattttagacgaatgtatattttaaaaatcttccaaacacatcacaacttacctcatcaggaaaccacataatagatgccaatatttcacaaataatagaagattatccctttaaatttataaaaattgtaaaatttttattatataaaattatctatctcaaatacatacactattgaaaatatttagacaaatttaaaggggattcgttctcaggcctttgacattgtggttccggctgttagcaacaagtgaaggcctaaaataataagcccaattgtaccgacaattttagtgaatgcatcagagtatgacactccttccaagtctcccagtgggtgaaacgttacttccggtagtttattgattaatttaagctcgcttccatgttgtctttgtttcctattctttttaggctgaacgtgtgtgtacaacacttcccctgtgtttccatttacaaatttagttgtaaatccctccgcgttaagctcgtgtaggcaaaatcccggcgcttctgtgtagaacttcgagtgaggtgattttataactgattttcttcccttgtttccacttgatccgcaaactaccagtgctgttccttcgtagtccaacaattccatatcctggtcatacccagccacataagcatcaacctgagcctgcttcaaaagaggtaaaagtttataggagaggaaagtgtctccctttgattttccagatgagagaactggcttatctcccacgactacaatgtaatcaaccacttttggtgcaatttcaagcgtctttttgagctcgttccatgcctcgtttgacacatccttataaggaaactgattagacaacacccaagtatccacaaacacaaatgctacactcaggtctttatgaccactcttcaacagtgacacagctacattaatattagtcttatattgaaagtttatatttatatagagtatataaataatagttagacgtacaagcgtttgttgaaaaggtagtgaaaaaatgataccaccagtttggcattatgagcctggggttatgactcgagttatttgagtcacttttgtaatctacacttgaaagatcctttggcaaatgaccgtttaggtaaaactggtgatatcgctcatactgggcgttatagtcccctaaccagtcttctgaacccagaaccgtaaacattggcaagtccataagcccagaatcatcattataaaccgattcaaagaattttttccacttttcgtcatttagtccgttcacgccgttatcgaagttgaaccctggtgacagcaggtacgtaacccgttcgttttttacgtactcttttagtttttcagccaccaatttctgggttttacttcccgttccccaatttcccagcgaagcgaagcgcaaacttgcatttaccgatgatgaaaagatgaatatgagcaaggggagggaatataacataaagtatcggatacttattattttcagcttcatttgctacacattatataaaataatttacacatttgttaattttaattttttctataaagtttatgaattctccaggtggaattgctcctaactctctgatgtgcaccataaggtcacatgtgtatccttaaccagtaaaatttactcatataaagttcaatacaaagagttaataatacgttgtgttaataaattacatggctgttaaagcgttttattgttgaattttggtttcgagaacttttgatgttgctagtacgatagacataactgtggctccgaatatgaaaaatgaccacagtatagctctagatgatgatttttggcctttatttccagtaaacagttcaaacgacaggtatataaagaatccaacagccagtgatgtgaaaacagaataacaaactttgtttgaaactgagactgcgtaatagccaattaaaactcctaatggaacacagaatgaaaacgcaactatataaaacgttttgagaacttctgatttgaaagaatccgacagtattgatgacagtaacaaggattctgcccacttatgtgctattattccaaacccaatcgcccaagcattagatcctctctccgacccaattagagaacctaaatttaatatttaatactcatgaaattgaaatgtgtacgttagaaagttcacaaacggagattttataatttttatgatggggtaaattaacacaacaataaaaaataattataaataatataatttaaaggtgtaacaaaatgagttaattttgaggatgcggaaaatataattgtttgttaccttcaagaattgagtggccgtaaaaggcaattaataggtaaatcactctagaacccaaaatatgcttaactttggataaaaaagagccattcgttaattttttggaattactagaatttactgaagtgttggcagagtggaaacactgagaatctcccttctctaatttttcctcgtctggacaaccaaggcaaaattctctaaaataatttcataacacttaatcttactcatttgttggattttctgtttcttcttcatttttatgttcacaacagtgttcatctgggcatttataaatgtttataaaagtacctggaagaaaatctatcagaaccaatagtagaattggtgcgaatattatgaatcctctggtatctagcgagtcaaatatcttgaaggaagggtcgtcggtctcaaacacctccggtaacaaatgtgtaattgaaagcgatagtaacgctcctaaatattttattcagattaaatatttcaattgattaaatatttatttgcaaaccgcttattgcgttgtttatgttttctatatttatccatttgctatggattttggggaatttgtgtgctatttttgggacataacagaaaaaaacagtttccaagaatatcgctatggaaagaacaattttatcgtacattgtgttgattattctacagtccggccaattccggtaatgtggtggattctgtgtgttttatatattattgtgaatattattttccaccattttattaattaaacaatataattaaattttttactaaataaacattgtataccccatcaatacacagaattactagattccatgtaacctagcgggtttcattttaatttaatataaaattaaaataataaaattattcatgtgttcgtataataaaaattgatcctcaaactcgtttaatcttggagcgttgaattaatgtgttaaccaattctcagtttcataccttaaattaattttatcgtaataattgtttaagtggcggttgaacatcagaagttactgtgacgtatgaaccttttggaccggccacaagcccttttaggtacagtagtgacgtttctgggtttaagcctagaatctttaattttctaaacgtacatctctttccgcccattcttccagccattctctttcctggttttacacatcctggagttgttgaggctcctattgaccctggtcccctatgatgttttgacccgtgactcatcggacctctaaaattttttatattcattataaatataacaatattattctattattaaagtattaaaattattatataatatgtataacaatgtgtgtgataccttttaaatccatgtcttttgatggttccttgaaagcctttcccctttgtgattccggtgaccttggcatgggtacatcctacaaaggaggaaacgtcgaccagttgccctaatacgtaatcctgtggtggttgtagtttaactgggaaggtttccgcttcgttggcagagattttaataagttttcctaattctggcctattattccaatgcctggaccacaacggttttcctaaaatttgatttaaactagtttaacaatttgaaaatagttttaatagtttaagaatagttataatagttatcacaaaagttgttatggtttacaaaccgtatgaaacaagtgcgtaaccgaaatccataaactgtaatattgtacatggtaatactctaagggcagtaacagtctccacaatcccatcaggtgaagcaatctgtccaacagcatgctttatcgctctcaattgaacctatttcaatattcacactataaactatactgtatatatagtatgtagtatgaatgtgtgggaatttagtaccattttagcagtttctggccaacgagttctccagagataatctctaggcttttgggggtctttaaaaatatgaatctgaaatgtcaaattagtaaaagttgaattttttaatggaatctcaacttagtatcacacatactcgttctgttggaggaagatctctctccttagcaatgtaaagacgggaattgttatttctatttccaatttttgcgatattgatgaaattgctaagattgtcagtattggataatttataagctaaaaaataaaattaggattaattctgtaccttgagctttaaatataaagtggaaataccaaatgttaaatactaaaatatactggattccatttatttttttaatatttacatccataacattgatatcatttgtgtaataaataaattttatcaactaattggggtgtgaaaaatatattttctataaattcaataaataaaattttgatggtgaatttgaataaattgaagacatgatgaaacttgataagtaaaaaaatgtgttggagaatttgagaaattggataaatacggaatttgttggagaattgggaaaattggataacaagtaactggacgggttttggggaatggatgatattagtggatagttaagattgtctaaatccttctgctgtgtacgtcagcgtaatcaacgatgatttctcttccgtcgacgacatgtttcaggctaggatctagtgcggaatggatggaatttttgtttgcaaaagtgatgaaaccgaaccctttccccttttgggtgtgtggatctggagtaatatatgaatttggagacataccctttggaatatacacgtcaatgacctctccgaactgagaaaagtatgtcctgagactgtgaacactcgtttcgaacgcgatgcgaccgacaaacagttttggaatactcctgtctcgaccatttctcgacccgttagaatatgttcgcgatccatctgaatatgtttttggtgcgtctgaataggttcttggtgtgtctgaaaatgttcttgagtaaggttcatttctactctcgtttctggagccagaaaagacgaaactgactggtttattcggatcaaatgtggaagaattggaactttgtctgtatggagggacactctggtaatatgaatcacgttcgtagtgccgttctctcctcggatacttactgggatagtctggatacgagtcatagtgcctcttgtatctgtaactgtcgggatagtaatctctgaatcttctgtgcggaggcggataatgtctctttggacctgattgagatgagtactctagacgcttatagtcacttgaatggtattttgtacccgttgctctatctactattacctctcgacccattataacatgtgggccagactcaaacacctagaaaataataaatatttgtgtgttaccttccgtatggaatcctcgttttcaaatgatatgaatccgaaacccttgtttagcccactgtagttattctgtcttgggcagtaagcgtcataaaccgttccaaactatagaaaaattaatatttaaattttattaaactaaaattgtagtgattacctttttgaagtaatcttcgagatcatctttagtggcttcaaatgcaattctggtaataaaaattctgttagcgttgatcttctcatcgtcaagagaactcttatggtcttcaccgtctgaatgatcctggttagtttcttcaagaggaacttcctcagttagttcattgacttcgttttcctgataatcaacgtagccctaaaacggacttaataatctgtctaaaatttgatctaactaatcaaattggagatctaattccataattattaaaataattatataaatcgattttaataaaaaaagataaaaactaacatctgatgcgtcgtgatttgagtattcttgttctgatgattgttcctggtcgctggtaactgagttttcatcttctgtgggcttctttttagaagttacttttttagtttttacggtggtcttgggtttggcagcaggtttagttgtttttgtggttttttttgttttgggttctactgccttcttaacctcagcaggtttagtagtctttcttggcgccatatatgtgaaatagacaaattaaaatttttagataaattataaaaattagataaattgaaaaaaattagacaaattataagaatactacattataggggagtataggtggtaatccctgtttgataaagatcttgtgtagtaactgatgttcccagcctcacagaataatgggaacctagatcaaaataaaatatcaaaattattttaaccatttttgtaaaaatagtcatttttaaattaattaacatggaaataaaactatttgcgtatatcactttttaaatacattgaattattaaaagtcatcttctaggattgtggtacatatgccctctccctctcattcctccaccatcgcctcgtcctagttaatattaattcttgttttaacatattttacgcttattaacttacctcttcctcttccagaatatgtatgaccctgaggccgctctaaataaagatttataatggttttttctggtcttacgtggtcgtttttcttccttagcgatttcagctacttcgtttggcagcctgagagatttaactgtattccctctaataaaacattcatccagcttccaaaaatcagtcccactctgaaatatttattaaattataatatatcaaattatttatatattaaatttatatattaaattgtaatatatttggtaaataatagtttattggttataccttggaggtacaaacaacgtttaccatgtgcatattcataaaagcatcacaggagtccagaattccactgtaagtttcaccgttttttagttcaatcagctaaagaaaataaatgaagtttacatataaaaggtgtgagatatgatagaaagacttacagtgggttgactcttccccgccctcaaaagagtcaagggtaactaaaataaaataaaaaattgaataaaaaataccaccatgtttaattttttataatcttatactattgtagaaagatataacaatttagggataaaattgtaatattgagaaatatttaagaaataaaatgattttataaagaaatcatgattatattttaataaaaatatgattaaagggtaaattaatgtggaaggatattaatttattctataaaaattcccaaaattatacatatgtggattaacccattaaataaacttttgtatataaattcttttattgtataaacattttatcgcaataaataaaaatgtttatatgtgttagatttccagctcaaagaggagtcttatctaacatagagcattgtaatttaaataaaaatgttaaactattttattttttaaacaattgtaaactatattctacaaaacccggtcttatattacattttagacccggttgtgtattatatcctagagatataaagagtaaattgttttgtaactttggtactttagcttccataaattcacctgttaaaggtagtccaattcatgcttatttggttcaaagaggtacttcaaacgaattagaatctcacgaagacatatacaaaactataatttctaaacttgaacatttaaccaaacacctggaaatcaaattggactcaattccatatgaactgaactacaatgatcaatcttataactttattcatcgttcacataggtaccctaaggaatccttttcatatgaaggttttattaacctttccctgacaaacaatgagttgtacactaactttgtctcggaaattagactccgccaacttgaagaattaacattaaatcgtaaactaaacccctcaacaaacttatttaatcaaaaaggtgtacaagtacaatttaatgaaaaggagctccaaaatttacagaaacttttggatacaaatttctcaagtatggttaaaacaatgacatttgaacagtcgattttgctgataaagagaatgtatcttctaggtttaaccgtatcatataataacttttgtgacctcttaaattcccttaaatccctcaataaactatcagcaaaggaggtaaataatttttagtattttaaattttgtagttggtggagttggcgatttgcgttagagcgtatgtcgactctgataacagttttcttcgttattttatggtttccataggatctgcactcgaggataaggtttcagattttgaacttttatctgaccagaaattaattgattatttatttcctctttctctaatgcagtttaatgctcacccattctcctggttaatcatttcaaactctaaaattttagatcaaatcactcaagattttgaatctcttgccgtaaactaccaggccaaactcctgacaatattgtcgtcactggtttcttctcctgaaattgccagtaaatattacaccgtctacaactcactcattaattcattacaagaatcaatcaagtcaatcccctccaatggtacggaatataccaattaaatatctatacaatctattacattagttgaatgtggtttagaaatattaagtatgatgagcattaatgtgtgttacccgaattttgagatgctgagggagtctctgttcaaggaagccttgaacaggtggagtgaattcccagtaaactcacttgcatttctgtacttgaagcataaaggtattaaattagattataataatgtttagacgaaataccaagagagtgttctgacgagtttctgaagagtttgggtcttaatctgagagcattgactccaaagtacctcccagagttatactgctcataccttaaaaccggtcaattaacgacaaatcaatgcagatcatatgaatacgtaggttgatttaagtttacagtttgattagtacttgggtctggggtacgcttcactcacagtaaggaacgtttcaaaccttttaatgtacctaagcattaatgggaagtatacttgcagaatctatgatcatataataagaagatttcaaaacttcaaagattcaaactcactcacaaatcaacaggtttgacaattttactagttttcaatatacttttaataactaaatttatagctactggacgtggtattgtcaatgtcgttggttgggattcacacgagaaatgtttggagcaatgtcaacctttcaaatttagtgttccaaacacccaaaaatatacttgtatacctaggttacgcatttctcattactaatctcaggggtcataaactgtggaatgtacttgttcagaggtattttttccctctatcagcacatttaatcagttatacacctaatattatataccatttaaaatagttatatacttaatattatataccatgtaaaatggttatatactgaaatctagtattgagttgtgtgtatagaatattgggagagaataagcattataactctgagacgtatgaagtgttaaaatctgcggaaatattaaagtttataccaaatgaccagtttaatggaaaccttaaccgtctgttagagcattgcaaacaactatacttttcaaaattagcaagacagagatatagatcaaaggtgccgtatgaggaaatattcaacaatttgggactcagatataaaaaaggtaagatagtacttgataatgagaattagaaatcataatcaacgagttatacgaggcgccatatgtgttaccggagtttggaataataattgaacccacaagagatcaaataaatcatcaggtacaaatactataaataattgtgtgttagacgtcaggatgtgtaactggagaagcgatgttgaggcatagagtctggaccaagttaaactatagaatattctcattccatgattcggagtggcaagagttttataacgaaaacgaggatagtaatagcgaaaacgatggaggttcgtgggatattgagaaaatgacgttgcatttctgtaagaatacaaggctaaatcatctaattgctggggaaggtaaagttaaggatttatggaattttttaggccaagaacggcgtcaaattttgaaaatcaagtcacctgagtctagaagacatacgctactcaaaagctcaagaaccgcaagtgcacattcatccaaaatcaaaagactacaaaacattattatacaacaatccgacaattgaataatttatctcattttagtaaattaaatttctgttaatttaatgtaaattcatgttaattagtttataaaaaattaaatgtgatgaagaaggtgttgatatcaggcctggtggtttcatttttgacaattccagtggaatccaggttcgaattaaataaatcaccgcaaaacgaagatttcatatcaaaagatattacagaagtgggattaaatgtgtatttggacgaaatcgacttcataccgagagaagtctcagtagttggaaaaaacgcagaagtttgtaaaaggtcacttgaaataaattacgaaaatgatgtgtacggtttatgtgaacatttcaactgtgatataaagtttatttcttctataccgtacgataacagagtagctcccttttcaaaattaccagagaatataatattaccaaatactaaaaatatcacggatcagcagaggaaaaattgtaatttaaccaaattggcagcacgttgcagttcgtatttgaggtttgcaaactgtgtattcgttaattatgttggtggattccgaagctcagaccaaagtataaagctctcgcccgaaatagaagaaagccttggaatatacccaaacaacgagtttgtaaataagtatttctcagttggaggtggccttataggctttctattcagtgagtatatgcaaaatatatgcagttttgtacataatgcctgtaaaatacatccgcaatttaaggacctagaacactattttagttcccaagcttgtgtagtatttgattttattacgccaattgaagggcacaggaaactctttgggccactggtgcctgttgaccaacttgacttttacatttccagggaaaaggaacactttgttagttatcaaatatataaaccaagtaatattattctctctgaactgaatataccactgctagatccgttcaatactgacgtccaacttcaagaatacaaggatgcactactcaaacatagatgtgaattgatcaatcaactctacgtataagatagttaactataataattcaatctgtatattttttagaacagatcggttaatttgaatttgtattcgccttcggggaaatatcgaatatacgccgcctgttttcagctggaaaagtattacaaaaagtgcgatttatgtaaaaaaatcgggattaaaaatactaaatcataattaccaattggattttctgtaatttatacattttaaaaaggtatgaagattggaaaagtataatgaagatatgtgaagtataatgaagatttgtgaagagtttataaaatcaaatgacttggtatcattgtttgagtggttggacgagagtgagttgaactgtgataagctttgggaattgcttagtcaaaattattacagtaaattcttatgtgagaatgtttattttttgtatttcggaagactgaagaggagtttgacggtgttccaagatgcggatttgaacgaggtggcgacaaccctggggtcaatgtcaatttactctgacggaatttcaagtggaattgaggacgagtatttgcaagttgaagggtacaaaaggccagagaattttatagaaatttacagagaagcctgtgaaagtgttgacgaggatttggcctttgggtcaataatgcagatattgtcccacaccggtcaggatttttacaacttattgagtatactctctggagttattaagagaacagaaaagggtacttcctcactgattacaagtagtctggtgtccatattatcttatattaagcccagaaagggtattaggctagggcctatggttgaatttttggagtctgtttgggacactaaggatgagcaagataagcatggagtcgcctcctcctctttaatttccttttcaacaaatataatttcccagctttatacctcaaaccttcttcaattggacggtaattctgggccattgtgcctggcaaatctggtctgtaagtataataataatatttaccagtgggtttgttctatatcaacaatgcagtctgagccagtttctggtcctctggatacagttccatttaatgaagcaatttgtatttttgtactattatcagataaaaggagtaatgtccccagggtttattccctgaaaacaatggcgttgatgggtttaaagatttcaaatgtttttctagtaaatcagcataaattaaccattgactcggctaacttagggcttaattacttggaaaaggagtttaggtgcagtgattcagagccgataagtgattttaacacatttccgtggcatcctataggatacttggcggagttactagattcagaaaatgacgaatgggacgaaaaagaatcaaccaagattctaaaacgctccctgtcactctgctcccaaagtgtcaagctacacatcctcaagggcgttgtcaagctattaaaatctgaagatggaataactataacactcatggaatgtaaaaatacagcatctatcataaataaaaatgatgaaagtgaggaaagtcccaataggaatgtggatagtcctattagaagtgtggaaactcctaatagaaatgtggaatcttatgttaacggagataggaaaatttttgaattggaagaatattttaattttgtcaagagcgtgttggattcttatttttctactgatttggtcaagaattttggcgattcaacgctggattccttgtcaatagtgttgaactggattaaatttttattactgacaaagaggagccggtattttaaaaaaaatatcaagaattgtttttctctaaaattaaatgaattgtgcgataaattggacgaaggatttgaatctagaactgaatcttcccataacctacacatctcactcgtaccaataaataaactgaatttaataaagatgttgtttacagatgtgctggatttgctaaaatagaatttttcattaatttttagtatatttatacatggtagagtataataatagaaggttaaggttttacattttttcactgtataacatacacagggactgtgttcaaacttgtaaaaatctcgaagctctgaccaaaatccaggcgtttacactttatgagctgttgaaaccgaaaattcattccgatgaaaatgatttgaagtttaactttctcctattggtcactaaatgtatcattgtacaaataactaatgaaaatattgaaatatggtaacttttcctattttttactgattttagggacggaaaatctaaaggtgtgtacgatctggataagattttaactccctttaaaaccttaaaaatgggtatttcttactaatttcatcttatttttagaggataaacaactgtcagcatttgtggatacaattttaaagaataacatccctcatcctaattccacaactctaaagtataataataagttcaaatcttcagaaacaaagcagaaacaaaatcagcctaatctggctgatatagactcttacataaacaatcccatgatgttttttaactctgagattggtaaagctttgaatagttttccaggtgattttacaataactgacttgattcccagtcagagagttttaattcctactggagttcttcatctgtcaaactcttttatttatccatttatccagtcacttaaacaatccgactctgagtataagtatgctcagaaattgatcaaatttgttttaaacaagaagtatatattgaaagatggagataatttaagaactccgtcccagatattcatacagtgctcaggccagatcctgtataatcaaatcattagaccctccgattccggtaaaaaggctcaaaaagtgggctgtaagtggtcgaaaatggttatttatagaagatttctatactttaaaaggggaaataccagggaaaacatacccttcaaaacagtatttgactcttttgataacaataaaactacactgtggaagtttttcacatttataatttttaataatagatactactcagaaagcctcaaggagagaaaggagtctctaaactgctttcttaagctatccaacaacaagatcccaacgaacgaaaatgataacactggacccaagagtgttaagtctcgtaaaactcttttacaaggcttattctcacatttctctaagtttatggataatttaaagactgtagtctgggaggaaaagaaatacttgcgaagtgggcccttggctgaaactaatttgaaaactgttcctttttctaacgtttacaagtatattaaatcaattgtagagcagacagttactcctgaattactctgcggaaattcaaactatttaaaatttttaaaggtgtgttattccctgataacgctgaataagggtgaaaacctctcaatgtctgaagttatgaaggggtttaagattaaagattgtgtatggacggggcggggttaccattccatgggtcaaacaaggacaatccttgactatttatgtagaataatattctttgttctacaatatttgatcgtcccagcattgggaaggtttatgtacattacggaatctggattttccatgtatagaatacattatataagaaatgaggactggtctaaaatggtaaatagagccagaaatgattatttgaacaatggaaaggttattcgatctgactcttgtaatgagtttccaaagctcagatttgttcctaaacagtctggaatgagacccatattgaactgtaatgcaccttcaggatgtaaagaattttttgacaacttggcaaccaagtataatcataaatttaaaccttattgcaagtgttacatgtgtacagtcaacaagaaacttctctactcaactaatctcaacagattacttaaatttatacacgatgccctgactgtaaactctaagattaatccgatactgggaaatggagttctgggatataactcattttacaaacatttaaagaaatggtggtttaaactttcaaggtacgttagaataggatccgatgttaaattttattattttgttgcagatttgtcaaagtgctacgaacgaatcccacatgacaaactcatggaagttctcagggaactgccacttgtagactcaactttctccgtagtttacaaacgttttctagtaaaactatcctcaagtgttaattcatttgccaagattgaagatatcccctcccaaaccaaaagggctaaaatccttaccaaaaagaacaaatcaaatactcaaaaaataaagttgagtaattctcaaaagagtaattacctatctaacattattaatacaaataagagtaagggtagtgatggtaatgtgattaagagtgtgaaccggttgagtgcgaggttatatgggaattctgttatagcatcaggtttagactcttctaaaacttttactattactagatatgacattttgtcagcagtttcatctttgattgaatcacaaaacgttcggcttccgaactttgggagtgatcggtacattaagttaaaccgcggaattcctcagggttgttgcatttctccttttctctccaatatttacctctccagccttgataaatcactagaatttaagccaaatattacttttacgggtaatgacacgcctttggttttgccaaacctgttggtaagatggattgatgattttttattcgtctcaacaaaccctgacgatgttaatgacctcgccaaacttctttgttacaacaactttgatgccgctattaacactaaaaaagttgttaccaacgcttcccgttatgccttcatttcttctagtactaactctaatactgtcctgtctaatctccagcttagtcaggaaaacagtagaacttcatcccaggaagaggagactctaaagtggataaactgcaggtttaactttgatatgttaaatagatttataaatgtagaaattgtcccatggaagttttctaacctcaggataagggataccatttctctctcaaaatcacgaacacattcgttcatgttcagcgtggttgagcagcgactcataggatatatcatgaacaagcttagtcataaaacttatacttgttctaagataaattcacctgagtgtatagtaactaactcttatatagttatgaggacttgtgctctcaaattgcactgttcaataagagttttagtccaagatttcggctgctttgtaaacttgagatacttttacaaacttattctaaacctaattacaatcacctcaaacttagtctccaagggaggtttaaacattagaagtcattacttgagggagattctcatgattgccttgatttacacatttaaagactctagcaccagctctctaaagagtaaaaagatcaggaagttagactgtttggagcttataaataaaaagattatccggaagctgtttcaccatgttaattcatttttaaataaggatgatttattctctattgcctctattatcgaggaaaggtataaaattcactggtctaaagtttagtaaatccctctactcttattatactattatatttgattatacttaatatataaaatatatgtctattagtatattatacgtagtaatgtgtaatatgtatagtatgggataggactaaattatgtgtttttacaccgtattaaacaaaaagtcccgtttgtttaatactaaatgattttttaaacttaagacgttgactttacttattaattattagattaagcagcatgaagtgctagcgcgcttacgagatgatgtgctggaagaccttcagctttgtgaacgtccttgaccaactcgtggagggcggctacaaaagcagccataccaacggccttagcagtacctggatttgctcctgcggcgaaggcaaggaacagatgaactgctcctcccaaggggtgaagaacttccaaatggacaaacttcttactctccttgctacctacaaagtgcaagtccaaaagtacttcgtctccgactgcctcccagaccaagtggtttccacagacaactttgtttaccttgccgtggactggtctgacccatgtgaagaaatgatcacccttggcaaaagtcttgtggaggaaaacggtggcaggaagagcaccaagtgggcatttaccactgtctactgcggtagcagtaccatcaccgtgttttccgtataggacaaaccccaatttcctcaagtctaattcatcggctgatacaaagatgcccgaagtcaaaactgtgaacaaagccaatacagcaaacttcatcattactgactaataaaagttaaatcagttaggtgtagttgaattccaactaaaattactattcctattcctgatggggagaacaccacaatttattcctccccattaaattttttattcctggtcttttcttaattaatcccaccaaaattactccaacacacttaatattatcttacacattttaatataacatcttatacactatagtatattttatatatcaaatgtaagatagaatattaatgtgtgataatgagaatttattgattttgtaaatttgtggtgtaaatgtctaatttcttgggattcccaacccactttccagaattcgacattttcatccccttaacaccgttggaatagaatggaaacagtctgtgtgaaattccctttttataatatggccttggtggtaattggaaaacgcttggaaggccagtagacttgaaaagataaaatggcggcgggtcataaagtctacttcctcgccataaaaatggttttaaatttctcaggtaatgtaatctcttacttcttctcaccacactgtgtcgcttatatgttatctttctatactgtgaggagaatttcagtaccgattcgtcaatctcaattattctagcactatgtctactataatacaccggagcaggtataacctacaccacattaacccatttacttatacattaatatataaatattgttaacaatgtgtgtaactaagtagtgtgtgtaaaagtgtgtaaatgtgtaaaaatgtgtaagtgtgtaaaaatgtgtaaatagtacagaaatgtgtaaatgtgttacttgaaattctggtaatttttcctgtctaattttgaaaacagcgttggcaaatgttctagaagtttccacatccttgtcaatgaatcttacagtcttcaggtgataattcggaaccgctttgtccaactatattaaataaatttacagaatataattgaaacctgtaaaatagtttcgtaagcttcttcaaccatgatttcacaaccatcttttggcctgtatccgtgaagtgattctcccacatgtgtcatgagaacatttgttattttaagaaagttaagatggtctaatgacttcttaactgtctcccttaacctcaaagctgcttctctagaattaccctctaaacattcattaacaaataattaaaacatttattaacaaatagttggatacgccagaagtatggtgtgatcatgaaggcaagtagtgtacactttgacgaaccaaacgttggggttaaaatcacatcacctacaaatttttacactattacccagtatcagtattagtatagttatattaatagtatagtactagtagtatagtgttagggtaccaatttgaagtgtgcgtgcttccaggagtgaagatttgtattcattttgatatttaaaactgtctttcattagttctagttccttaactcgctctgaaattatcaattttgacctttgaacaagtgcttttacgagttttttacctcccaattccagtaccttgaggcctattaattttatatatttttggaaaataccaaatccacagtgtggagttaagttaggcgggattggaacaacgagacaatcaccagtttcattcaatatgtcaccgtgttccgctgtaattgagccgaaataatcaataatcatctcctcaagtttgccttgataactgtgtgaatttatgtcatcaagtaaatcacttttaggctcagtgcatggaagcttaaaagggatcttacactggtccctataaacagtagtatcagtcctgtttgcatgttttatgggatttgtcgaccttatccaatcaatctgttgtcttacagctctgtccctaatggtttgtaaacggctctgcaagaacgaacttgtgctaaacctcctctcagaatttaaaaccgcacgaaaaaaactatcaaatcttcccaaattaaacattttacagaatttttttgatttatgttatattatcagagttatgatatattatcaaatttatgatatattagcaattttggggtattttagggtattattttttggaatatccgttatttttaaagactagtacaacttcttccattagggctagtggcggatcagttaatccaaacttagacaatgctaatttttattatattaatataatctaaaagttatgctaaatgttattacctaaggctaaatcgttgtagagttcaagttcgtgagagggagctgaatatcgagggtcaagggaaggatccttttccagcatacgggccaaaattgcctcctctaatcaattttacaacaaaatcaattaaatatcataatcaattgtatatcaaaattaattatacaaaaagatgtatagtaagaatttaccttgttttttaaagtaaactgtttcttctgctgtttttttatcgtcgataaagttaaaagttgcaaagttccgagttgagttaaatcttccaaattttaccttgttaaataatctcaaaattgagtaatttttagaaatcacttgaattgccatagatttgaataatttttatataaatttaaaaaaagaagatgaaatggtttaggaatcctaccacacaggatcatctaacaacggataatactatagaagcgtatgcaaacgggtgcaagcctatggttatgaatatgctgaatcctagacatactgaagtaattttaagacaattctggctaaattaaaagataaagttacacactcggtttgatacgttttttcagaaattttcctataatctacacatttagacaataaatcttattttctccttaattcaccgaatttgaataaaatatatcacaaaaaactaattccaacacttactgtaaaactacaacacctactgtgaaactacaacacttactgtgaaattacaatacttgggataaaattgtgtagtaatgacacattataggtctaatgggaatgggagggtgaagactgctgacaactggacattccagacgaatccttacatcactgcaaggcctcagatccactgcgttggcgacgactgcaagaggagtgatttgaacgtatactatcaatacggcaagatgaacgtgaacccgccggaactaattcagtacattccggtgattctaatagcaactctggcactgattatactaataattttcctcgtaaaaagacacagagctaacaagaaataccaggaatctatgctatcaaggatggacgatttaagggaaagagaatacattgaaaccttataacaataaattaactcaatttctaatcagttgtaatcagatgtaatgagttgtaatcaattgtaatcaattataatcaactgtaatgagttgtaatcagttgtaatgttcgaagattgctaatttatttttaactccgttgaattcgggtacgattttgtagagaatagtggttaaaagcgtgttgagtgacttgatgatatgggacgttgtgattgacaccgctccctagataattttttaccttaatattctcattaccttaaaatttttaagctctgactttatatttgaaagtttcttcttactatttgccgtctccgttaataattttattattgcattcctcgttccctcaggtaatctctcctatcaaatcattaacataatgtataattaagtagttttaggttgagaaattagttaattaagttgggaggacttagttaatgtgttacgtagataaaatggttaatgtgttacgttgagagagctgtgtatgtttaggagtttgaggtagcctctgagttgtaaaagttttgtgtttagatctttataaatcgccaaaacgtcagaatacaagttaaaaatgttcagtgaattatcttcaggtacgtcctcctccaaaatcaacatcaaactctaaacatacgaggtggtaaaatataattttattgaacaaacgcgataataaatgaagcattctttacaagatgaaactgtgattggcttttgaaattccgtgcctaaaaaagattaaaatttcgattaaaaacccttgaaaagtgttaatcggtagtgacattcgctgcaaaaagtttcgttacacagttgactaaaaatataaaattaaaatttttttaccaggagaatttatatctggacttgaaaagtcccgatttaaacaaatgtccacagatatcacacttagttctctcctcgtctatgtaatgaatgttcaaaagtgatctaatatcctcgaaatctgaaaatttctaaaataatattaaaaaactgttatttctaattgcttctgtgatcctttgctttctgggtggaagttgtgacttattcaatttgcgataattcttaaactcgtccgtcaaattattatatattatatacattaaacattaaatcataagtcatagtataacaatattaattatactaaaatattaattattatactaaaatattaattattatactaaaataagaataaaattacacattaaataaatagaataacaagaaataatattaaattatgtttggaaaaaggtggaaaattgttcgaaaatgagcaatgtgtggtcactggagtttggatcgtttttaacatcggagtttattttaaacattaaattatccaatttatcctctcccaataatttttttataatttcgaaaattcttttaattaaattaatcatttgattcctgaacattttttacacatttgttggtacctctggttattatccggaacaatccttttcccacatggaactactaattttgtggttaaattgttgaaaaaaaataactcttcgaaattacttagggaatcttctaatttaaactggtttgacaggaaattaatgtaaatgagtatgaacctggcgtagcaatccgggaaataatacaacgtgtcgtaaacaagatgtttgaacacgtctcccaagcatttaagagaagcgattacaatattcggctctagcgagtcgatacagctgaatataagtctcattgtctgtagcattgtagctgaacagaccagcggcgtattttcaaggtataaattatacttttcaataaactttttcttaatctcagggttattcattatgattatcctgtcaattagagcttcaactagctcatacatccgaacctcagtgtcattatacaccaaactcgtaagtccaatgtaacattctagtgatttcaacactgccgggttatagttatttatgtcatctgccattttatttgtaatctatcagttgttattcagtaaaattttacctctctgaatagtgatacatttgggtccttaaaggctaaaacaattgttactcagtctaaaataccttccgtatgattatttgacatatatatcaacaagtcataaatgtcatccaaaatcattcctataatacaactgtgattgtgtttgagtaaaatatactaaccgcaagttttgttatatatcatgagaagtgtggagatgagatgattaaactgaatactacgcgtttcatgcacatttaacaagttcatatagcatttacatacaagtctacatcctaaacactatataatcatataagttaccggtgagggccaattttgagggagttgggtattggttatagtgagagtttgttttattgtacaggtcaatgtctatgaattggggattttccagggaacattcgtgggattctgaaccctccaaccctaaaattgataaacgattactcacgtttattggcatgtgtataacagttacaatgccagatatcttgagaagtacattttccaagtatcttggaaattcaagattcaatgaacctaaagattgaattttaactcataaattacccttaacattagtatatccatagaattgcgatagtgatgtaaaaataacctacaatattattataataattaacttacagaaacggtgtgataatgactaaaaagattatttacagatgtttcaataaatttacaacaaaatataagcttctttttattggagatagcgttatttactgtgtgatagtgccaaataaagccatttggtgataagtactggaggaagaggatgatattattatacacagttgattgaacattgaagttaaactcgacttcgggtaacctttcagaggcttcagtgaataagccattgtaattgcagtcaatagtagtggaaacgtaatttttatcattaataagttcactggtttcaaaggattttaaaattttgtagtattcacactgaattaatttgtgaaattttgaaaattaccaaattttggtgtaaattgttaaaaattgagatattttcatctttatatttgtttatatttgtagaatcttcagtattaaattccgttaatgtgtatagtaaatgggccaaattggcatttatttctataaaattattaaaataataatttatctaacctgtgaaaagattatgtatcgccataaaaattatttattttatatataattagatttaagcccaattagcgtaaaacgtaataacgaatcagtattataaatcttaataactttataatgtgtatttttataacaaagtataaatattttacgtttaattttggggatcaaattattaaatcgttggatgggtcgggaattccgtattttaaattagttgttaaaaataataaaacagttaaaaggttaaaaactttaaaaacaattaaatttatacattctattttttcttatcctgaaaataaaagaaaatacttaccaagtggtaatagtgtaatatacttagattccatcccaaaaccaagattaatcaagagtataaagatttataagaataatgtgttggattcgggaaatactgaggataatggaacaggttcagaattagttaaatcgctattcggtttaaaatattctggtaaaagaagggcaaagataatgaacaaaataaaggaaatgtttccaattgaattgaggagtattttatttaaatttgcaatgaagtatatggacacatttgatgaatctgacttatgtcattttgaacaattgcttgccctttactccgaagattctagagattctatcctattagattccataacttgtaagaataattctcctaatttatcaagtggaaacccaattttgctcaaattgcttaaatttgtctcttcctctcatccctcaataaataattgtaattttaaagattctccgaatattaataaagtttagtttttaatttgataatatgtttaatttattttatatgtagaataagggtttaatttttgagtattcagactgttgtatggttgttctgaatttttgaaattaacccgttaattctaaaaataatgatagaataattggttaataatttttttatgtggtttttccaatttattggtaaatgtgtagggaattattgagacgtttgactgtgacatgttgaatcatgaatccccgcaattataaccaaagtatggaaccaatgtataaagttatattttaattgagacattaggtcactgttgaatcatggcttatattttatgatggttgtgtaaattccattaatataaaaattcatcagtgtgttagtattgtaataataaaggattttgttgtcaaatttgttattcaaagaagttgtatgtttgggtaaatagcatttgaagagtcatacaccaaattataatacacgatcacgtgttttccttgagtaaagtgtgtaaaagtataaaatttatcgtatcttacaccaaaaaccaagtttaaagtaaaaatactaattaacaaaatattaataaaatcttaattaaagtgtaaaaataacacaattaaaaggtaattttgttaccacatatttttagagtataacttaaagttggatagtaacggcctaaattttgctcaatttttatttaaaatatttcaaagtgtttcaaaaataattaatgcagtaataagttaaatgtgtaaggtaaaaataacaaatttttaatgtagagcgtaaaatattttaaaattcggcaaataggataaaattctgctgaaaatattttaaatgtgtattattctttaaaattaaaaggaaggttgaatatttttcaagttttggctgattttgtaatcaccggattctgcaagtgtgtataataagtgtgtatagtaggaatatccaaaattaggaaatttccaaatatttgcaaatattttaacgctctttacctgtagaatactgaatgatttggaaaacttgattttgactacaatttaatggagctttgttttgtctgtaaaatataacaaaaaaataattatgaaagaagtcaattttgaggctacttctaacagtgtaccgtatttgggcaagtatgcttcagttccttccgggacagttaactcatcctgcactaccatttgtgagacctttgacgagctaacaaatgatgaaggtgaaaaaaatcacaacattcaatcttctctaatggaggataacgagttttcgtcaatgaattacaaatgtgtaagcgaatatgacgtttttaacttgggccttgttgactcgaactactttaacaatattccaaatcctaaccaaatgaatatttccaaccaaatgaatatttctaaccaaatgaacaatcgaacactcaataacagggagcttagtaatatacaaatgagtaacttacacctgagtaattctaacatgaatcacattgttagtgggaacattgactacaacagcagttgccttaacttttatcccgaaagtataaactactctgacaatctaaatgattacacaaatggtttaaatgactattctaataacctaaatgattacacaaattctggtttaaatgattattctaatggtctaaatgatcatgaagagaatggtatgaatgaatataatgtgaattataatcctaacataggttcaaactatggcgctgataactgtaacaataacacgtacacgggtgacggaagtggatatgctgttgaaagtaactacgttaattccgagaattacccgtgcaaagatgaagggttcgggtttgacggatacaagggtgaagaaaatgtctacagcggtggtaactactatggaaatgatctaaagtataacatgtataacatgccacactttccagctgatgaaaatccccttaacccacgagataactcggtagatagtaataactcctacaacgttccaatgcactcctcttccacaattaacctaagtcatcccaatccaatcaatacttatgagcaacagaataacttgtcaagttatgatcctcaaacccagatgcaaaattatgatccacaaaatcctatgtccaattatgatcctcaaaatcctatgacaaattatgataacacaaatcctatgcaaaattacaattgttcgggttatgacgcacaaagccagatgcaaaattatgacgcccaaaaccagatgcaaaattatgacgcgcaaagccaaatgtcaagttacaattgctcaggttatgaggaggggatgtacgacatgaataactacagtaacatgaattgcatatctggagtaaagtaccagaggactgataacaggtggattgcgcggtggacaaccgccgagggtaagcgcgcctgtaagagtttctctgtaaacatttacgggtttaaccaggctaaaatgctagcaattcaggccagacagaagggtgtggccctgtcaggccgatcattttgtaacagagaaagacaacatgcgatgaagagcggggttggaattattggaatcagatttgataaaacccaggctcgctgggtttcttcctactacgaaggcggtaagagaaagtttaggtactttaccgtaaaagactatggctatgagcaggccaagagaaacgcaataatttggaaaagctgtaatgatgaacgtttggttaagagggttaaggaaggctatggcatgaactatggagttcctaacattatgccaaacattgtttatcccgtcgaaggatacccttacgcctgcggaataccaaacactgttcccaataacctacaaattaatgcaatggatcttaaggatcaaaaggatatggaactcgataatcagaatttcacagaaaataacatcaacggtaacaacatcgtcaacggtaacactgtcaacaattttaatggtgacaattttagtaatcaagattatttgaaggattatgattacaacacagaaaacaacactgaacacaaaagtgtgacccagaatgaggagttggatgagggatacaggacaatggtggctgtgaacaactttgggaattttgaccagaatgagtcaactataagctctggtaggaacgactacttctactgctccgactcacacgacgaatccggagactctgaaaccaccggaatcgaatctgaccaatgccaggaaagtgatgatgatagcgttggcaatggaaatactgttggcaatgatgatagtgttggcaaaagtgtggatagtagtaaggtgagttacgacggaaagaggggcaggtgggtttcaatgtggcgtgacgaggagggaaaaaaggttaaaaaatactttgaggtgcataaattcgggtacaaaaaggccaaacaaatggccctggctaataataaactaatttaatttctaaaggtaatattcaaaattttaatatatttaaatgggtcaacaattagatattcatgcgtattaaattattatactgggtgaagaagttttatttgaaattgacggagtttggtgagggaaaagccttggtaaagttacacacccgatagaatccccagggcaaattagaaatgtttgtatatttcctttaatgagatgagattgttgagtttgtttatttttattttatatttgaaggtatctgaagcgtttagactgaattctaacaagcaccagaccaatactacacattcctcctgtagaaataaagttgattcttctctttttctctttggctcctctgagaagtcactcagcaaatgcccagtcttgaactcgctcagttccaaagtttcgtaccttaaccagaaggtcaattcactcgttcccggcggatgggtcaccactctctcacttcccctaggattcctcgcctacaaatgtctcacacctctccactaactactctaacacatcttatatagttaattataataattatacagtcaattatacagtcaattatatagttaattatatagttaattggatagttaattggatactttatgtagtataataaatggtgtggatatgttgattagatttatggaagaagaaatctggtcttgacaagggttctacgcttcataggtaccagtgtacgagctgtggctacgtaatattccctgcacggaaccgagaagaaaagttcttttcagaggtaagttcaacttaagtaaattgtttcagagctttacctgcccaaactgcggatcccctcgctccaaattcacagaaaaattcagataatataataaacttttcatataattagtctataagttgattactccattgtgtaagaatattaaacgtttacaagtggttatgaagagcacatgaagcatggctcgttggggtttgggttcagggaacagatttgcggttcgtcgttgctgaactcgtctctgctagtctcatcaactgacgctaggggttgcagtacgtccagagtctccgtggttgacattgtcccgtcactcatgatcgttgacattgtcccatcacccatgatcgaggtcaggttcccgtcactcatgatagagttgggtttagctctgtttttcgccaattgtgatatcgaggcgtcaactgtgaacttgatagcgtcagttgccggctgtgtccttaaatagtaaactcccgttttcaaaccctttttccagccataaaagtgcatactcgtgagcttactgaatgtcggctgttccatgtgaatgttgagtgattgagactggtcaatgaaaatgccacgatctgccgccatgtcgattatgtgtttctgcttaatctcccaaactgttttatacaaatccttaatatgctgtgggatctcgtcaatgtgctttagtgacccgttgtaggcgattagcttctgtttcattgtctcgttccagagccctagctcaatcaagtcattcagcagatgaggatttaccacgaaaaactcaccactcaacactcttctgtagtaaatattactagtgtaaggttcaaacgattcattgttgccaagaatctgagaagtactagccgtgggcattggtgcaatgaataaggaatttcttagcccatgttcacggagatcagctttaagtttatcccagtcccagagcgaattatccaccttagctccccaaaggtcaaattgtaataaacccttggaggccggtgatccttcatatgtttcataagtacccagttgccttgccagatcaatactctcagacaaacatgcatagtacattgtttcaaaaatgcgtttattaagttctcgagcctcgtctgactcgaacgggtaccgcattagcatgaaggtatctgctaggccttgtaccccaacacccatcggtctatgtctgaaattagaaaccctggcttgtttcacagggtagtaattcctgtcaattactttattaaggttataagtgattacacggcagatttcatagagttttttgaaatcgaatgtccgtgtctgcgtgttaacaaactttggcagcgctactgaagctaaattacacactgcaacctcgtccttgtttgtgaattggacgatttcacagcagaggttactggatttaatagtgcccaaattctgctggttactcttagcgttacatgcgtccttgtataacatgtacggagtgccagtctcgatttgggactggagaattgcaaaccacaacttctgggctgggattgtctttcgtcccaagccctgctgctcatactgagtatacaaacgttcaaactcgtctccccaaacctcgtgcagacctctacactcatctggacacatcagtgtccaattcttatttgcctcaactcgtttcatgaacaggtctgggatccacagcgcgtagaataaatcccttgcacgctggtcttctgcgccgtggtttttcctgagatctaacaacttgaaaatatccgcatgccaaggctccagatatatcgcaaatgagcctttacgttttccaccaccttggtccacgtacttggccgtcgcgttaaatatcttcagcatgggcacgatcccgttggaaatgccgttggtgcccctaatgtatgatccgctggctctgattttgtgaattgcaagtccgattccaccggctgatttacttataaaagcgcactggctcaaggtgttaaaaatcccagccagggaatcgtcttgcatgtcaagtaggaagcaagaggacatttgagggtgcctggttcccgcgttaaacaaagtcggcgttgcgtgtgtgaagtaacgttgactcatgaggtgataggtctggatcgtgcgttccaaatctccgcagtggatgcctgcagaaacgcgcattatcatgtgctgcggacgctcaacgatcttcccgttcgtcttcagcaaataagacctctccagggtcttaaagccaaagtaatcatactgaaagtcgcgggaataatcaatttcagcgttcaggcggtccttgttcgccattacaaattcaaacacgtcgtcgctgatcaaagaggcgttggtgttgaacacgtgtttatagctgtggagtgtccgaatcacctcactgaagtcgttcagtgtgtttttgtggaggttgtcaattgttatgttagcagccagacgggagtagtcagggtgcgtcacggccatgtaggcgcaggtttgtgcagccagttcatcaagctctgatgtccggatcccagtgtacattccgttaataacactctgtgtgactctgggagcgtccactaacgagtgcagacctagcgataacttcctgatcctgttcagaatcttatcaaacgatacgtcctccttctccccgtgcctgtttattacgtacattatcttcgactccgcctcaccgaagaaactcagcatcggcgagtggcggctcccttcagactcctgggacgtatgtgagtgcaaatcgtggtactcaggcctgcgcgaactctccgacacatcctcaggcgaagaataaattgtagtattgttatgaccctgttgatgtgcatccatcttaactttaaaaacaattaagcaaatgacgagtttatatcagaaggaaacataatttaaaaatatagcgagaggtaaacaatatatagtctgatttcctatcctgccacacaatccaaatctaataattcaataaataccaaaatccctcactaactaacgctattgcactttaattttattctaattttaattcgacaatttttcactctcgttttcacattttcgctgaaatcaccgatctggcccattctgtgtgtagtacctgcattcctccgccaaacagaactttccagttttccctctaaatattatctttttagcacatattttttattttcatatttgttgacattttatcttttaaatttctttacttcccttgtttatggatttgtctcagacttaaaagccagattattaatttcccttcttctaggtaaatataacgttactaatccccttaatatgaatttttggtgttattatttcagcatatttatatttcatcctggattctttttgaatttgccatttttatcgtaaatttatctttttcctatttaagataaattttttaacattcttaattttaattattatttatatctcttttgtcaggaattacgactaattctctgtcatttaaataattatacaatcaatactctacacatttacatgtataactcgtattattcggtgatataacattattttatccaattctctggatataagctttatcctctgaattgtgtaagtgcagctggtgttgcttccccagagaatagaacaggtacttgtccttaatcccaaccttgttaaacgactaaactgagttaactgtgtggatggttacctgagatatgttggcgatgtctgtgtggttcaggttttccatgttcagcctcaagaaggggacaaaaatagcgtaaaacttctcatttttaaaccccaaatacgccactgaacgcaaacaactgctcaaattgttcatactaaacctgtaaaactcagttaaaccaattgtgaaatgtgtttaaatatgttagaatatgtgttagaaaatgggtatgaaagatacgtattgacgttttcgcaaattttgtggcatagttgttcgatcattgatctgcttgagtttgggtccatggcgtcttgttccaggagtagcgggttatttatccacttgggaggtacgaaattggttatgtgtaacatccgattccgtacgttcttcctcctaacgacgatcttgttcagcttcaccaagtccttcaaaaacaaagaaacctgcgaattcgacgcactcccatcaacatacgatttgataaacctaaaccacaatattgtattgatatatttgtcaatatattgtattgatattgtgttgatattgtattgatattgtgtagatatgatgtattgatatattgtgttattaatacctccgggtgatgaattcgagagtttggtcgtcgactgactttctgcagactgcgaggagtgagattaagcacctcagctaaaaaatcatttgataatgtgatttacctgttccggatcaaagttttgaatgatttcatccttgtacaagtgtttcaacgcgttattcaacaacttcttaaactccggctccatacggtgaaacttaagctaatccattgttaacattgtttacagtgtgtaataatctatatattggccaagttaacagagtaaatagtacatagatcatggagtctaggattgagatgatttgtccgcatgtgtagatttggtccttttggttactgaatttgactggttccaggattgacaagtctggcagttgagtttgcctgttccacactctgaactcgtctgggtgagagttgaatctgatgtatttcaggccatctacgataactccagtgggaccgcagtttggtgatcctatgcccatgacgttatcctcggccggcggctcgttgttaaagcagtttccaaggtccatttgactgaaaatgaacaacagctccttggctatgtggttaaaaaacgttatgtgctcgtaattcatgtgcgaatacgcgcgcaccaacttcgtcttctcaaacctcgtcaaaagaccccttgacatcttattattcaatattctacagaaattatacaattttctacagaaattatacaattgtattaattaaactgttgagtacctcgcgaagacttgtgtcatttgcttattcttctgtccgaggacgccgattttgtacattatgttgattaaatcattcgtcggaattttaggcgaggcttcaatcaggacatcaaaaaccatatcaggaaacgggtccttgaacccggcgtaaacaaggtaatccaacagcctactcattatacaattgtactctcttgtatacataatttaataataactagagagattggcacctgtggaaaatatgcattttgtctggtatgatattgtacagattcctcatgactgatttgaggaagaaggactcaaacggcttggaaagcagtttggctttgattaaattagctgagaagttcgccagggtgttcagctcattttcggcggtcttatctagggatatttttactcttcttttgtctgcttcacgaaataattcgttcagctttacagcgtagtctgaccaaaattcctggttcacattatgagagcttatttttgacaaaaacatggaattctgctcaatggaaaatcgacccctcaggaattctcttcctaattccattaccgccccatggttttccatattcttcgatccatcgctaatataaccatccaacttcttaattatacgctcaaatgaatttcccgctctttccaaggaatatagtcttacattcaggaaagatacgttaaaatattttaccaatttctgagggaaaataaaatactttaatttagtcattttactgtacaaattctaactaatgttttcgaggattttatctgccaagccgaaattaaccgtttcctacggtcgttattagttttcaagttacctgtgcgcccatgtagtcgccgatgtttattttctccagaatttcctcctcagatttattgcaaacttttgaaaaaacactaatcactgacctcctggcccttaaaatctccttggaatatatagctatgtcctccgcctgccgaaatgacaaggttgtcggagactgtcgcaacagcgtatacgacctcggaagaacaaacctcttcccccgtgttccagacgctaaaattaacgctccaggaccataagcctatgtcacccatatatactacataatgaatatttagtacatagtattatactactgagtattataatagtgagtattacagtagatagtattatagataatttgtacactagttgtgtggtacctttccgagattgattgtgataacttcgtttttcaggtaactgtgaacagttgtgaggatttaacttacttcataacgtcaacgatgttcagggcgtcgatttcagatgttgaaatcccatcctcgttcgaccgttcgttatccgaatttatatatctaattcacattaaattatgggagatacattttaattggtttatcctgcgaatcgtagtccagatagagcagctggctgatcactaaatgtgccacctagataatatgcaaatgtataaacattaccgtctgctggatagggtatccgatgtacacaatccgctcactgaggagtagtgagggtaaatctggaggtcttgttttaagcgctacttcaagacgttagataatgaacaaacctgaacttggcaaggataaaagctgcgaatagaatctcctaggccttaccaccgtactgtttttataattatttgatataaaaaaggtttttccagtaacaaaagtggttttatttattattttttgtttgactggatattgcgaattttgtgtttttttgggagaaattggggagattattttatggaaaaaattataatttgagaatcctgaggattctgtgctcaggtgtacgaggaaacttgacaaaattaaaactagtttcaaaatgagcatttatctcatttctccagggttaaacactttaaaatactataaaaataataaataagaacattgtagtgatgtgtaaactcaagacatttataaaataatttacaaaaaattaaaaataaaatcttttaataaataattacaagggttagttattttagacatcctacggatttagaagccattaccaaatccacaaacttcctagtctcatcagccaatcgcgccatctcctcagccgtcctaattctcattattcaatctcaattactaatattcaatcctatttatactatttaattctataataatgtgaaagatgtgtaaaagatgtgaaagatgtgtaaaaaatgtgaaagatgtgtagctggtggaatttgtggtaaaaatggagtatacttgattttcccttcattattatcaaccttttgataaatagagtctgggtctttaatatcgtctttttttctgggaataacatgcgcgtgaaggtgtggaattgtctgcccagcctcaggcccgtcctgtcaaaatgttactcagttactcattaggtaatgtaatttgggtacttgtattataattgagcaagaagttgagtcgtacattttctcaagggattccgcaaccacctggaccaaacacgaccaatcaaacatctcctccggcgttaaatccttatatctctaatcaatcaaatgattaagttagttagttagtcaattaattagtcaattaattagtcaattagttagtcaattagttagtcaattagttagtcaattagtaaagtagtaaagtagtaaagtagtaaagtagtaaagtagtaaagtagtaaagtagtaaagtagtaaagtagtaaagtagtaaagtagtaaagtagttaagtagtaaattggtaaaagattgtgaaggtactggaacgactctgaggggagagactagtgagtgtccgggagcaaagggtttaatatttgtgaaggcgtagcttgagtgagttttcgcaaacacctgcgagttgtgaactttaacgtggccgaaaacgtaaaactcaacgttttgcggaatcttcagtaattcaaacctcaaaggacgaatcgccattttaaaattaacttaaatttttacatttatagaaataattttaataatcacacagtataacatttgaattaaataattattttacaaagaatcggagaatagggggaaatactttacaaatttagaaattttaagaattttacaaattttacaaattttacaagattataaaaattatgaaaattatgaaaattatgaaaattatgaaattatgtaacaaatgactaaattgtgaatggtgtgggattagcaatgtgttggaatcacgaaatggccctcctgtcatattgtatgttgtgtaaatatttgaaattccagtatcagttcattttctaaaccttgtaaacttaatttgtcataaattatgatctttactcttttagttcaataaaataagttttacatactaagatttatttcctaatttaacatatttcctaagatataaaattgcttaattggacataattccaattaatcgaatcatgatctttaaatattaaatgtatcaaattgacatactaaaattatcaaattgacatactaaaattatcaaattgacatactaaaattattattgtaacactaaaattatcttattgaagtactaaaattattattgaaataataaaattattattgtaatattaagagtaacgaatttcattggagtatgggacgggatgagcgttctccttcacatcgcaagcactcgagtagttcccgccgtagatatggccggagccccgtacggtcacataaccgcagctcctccagaagaaacagatccaaaagccaacacaatcatagaaccgatcacaataacagaagtgatcacggggatagaagtgatcacagtaacaaaagtgagtatagggacagaaatgaggatagggagaggaggaggccgtattccgtgaggcgtggtaggagaagtgattcgaggagttactcacctcagaccaggagatctaaacatgaagccgaaaaattacaacacaaagactctaaaaatttacaacagaaggattctgcaaatttacaagggaaatcggaaaattcgcgagagaaaaaatctgaaccaaaatctgatacgggaaaaaatgagaaaaccgagttggaccagaaaaaactggacagactgaacaggttcaaaaaattggccgagacaagactaaaatccgacctgggtaagaaatcagtttcaataaagttaacaccggctggaacaaagagtgaaaagcgatttgtatcgccttttcaaggcctttacgagatcccagaagagcctcagccgcaagaaactgaacaggataccaccgatatcgatcctctagaccagttcatgtcaaatctcacccaggacgactcaaaccactttgatttttccaaagtcgccacactagaagatgttctcatgtgggccaatccattccatacagatgatccacagagtaacactgttcctcaacatacagatgatccacaggataactcaggacatatcaataatgttaacactgtaaataatactgtggataaaagtgtggaaaatgctgtgggaaatagtgtggaaaatagtgtggatgaggatgatgaatttctattgagattgaaggataagataaggtctgatgttagaattgaggaggattttgagcgttgttttagtgatgacgagtacgaccctacgaaggtatcgatgggaggtccagattacatggagctgttgccaaaaataaggggtggaaagaaggagttaccgagggttgatcatagtaaaatcgattacctcccgttcagaaagaacttttacgtccaggtctcctcaatcacaaacatgggcgagcacgaagttgacgcattcagaaaggctaatgggaatatcagagtctacggtaaaaagtgcccgaggccaatttcaagcttctcacagtgcggacttcctgacccgatcctcaaaattctagaaaaaagagaatacgaaaaacccttcccaatacaaatgcaatgcattcccgcactcatgtgcggaagagacgttatcggaatcgccgaaactggttcctcatcttcacactatttactattatactattatacctatactatacctattctatacctatactataccttatactattatacctatactataccttatactattatacctatactataccttatactattatacctatactataccttatactattatactataataataatactataataataatactatgttattatgtgattgtaggttctggaaagacgttggcgtttttgttgccgggtataaggcatgtgttggaccagccacctttgcgtgagagtgatggtatgatcgtgttaataattgctccgactagggagttggtaattcaaatttcaaacgagtgtgctaaattttcaaagtctgtgggcttgaggactttggcggtgtacggtggtgcggggattggtgaacagctaaacgctctcaaaagaggcgctgaaatcgtagttgggactccaggaagattaattgacgtgttaaccctgagtaaggggaaggtgactaatctgaggagagtaacttacttagtgctggacgaggcggatcggatgtttgacatgggatttgcgccgcaaatttcagcaatcgtgggtaatatcaggcctgataggcaaactgcgcttttttcagccacttttcccctaatgattgaaaatctggcaaaaaaaatcctggtgaaaccactccaaattgtcgtaggacaaagaggaaaaagcgcatcacaagtcgatcaacacgtcgtagtactaaacgacgataaaaaacttcttaagttgttaaagttattgggagagtggcatgagcacgggaacataattatctttgtgaatacgcagttggagtctgagcatttgtttaatgatctcctggcctatggctatgaggctgggattttacacggcggagttgaccagacagaccgcgagttcactttaaacgattttagagaaggaaagaagacaattctaattgcgacgtcaattgccgccaggggaattgatgtgaaatctgtagttctcgtgattaactacgctgcaccagaccactttgaagactacgtgcacagagttgggaggactggaagagctggcaccattggcacaagttacacttttctaacaccggaagaagctgccaaatcgcatgacataatcaaggcacttagattggcgtcacaggaggtgcccaaggaactactccaactctcacaggcacacctcgcaaccatggatgggaaactgtccagagggagaggattcgggggcaaagggttcaaattcacagaatccgaacagtccagacaacaacaggaacgcaaacgcgccatcaaactcctaggtactctttacactattattatacttatatagttactatatataatggtatagtatgtataataatagtatgatatattgtgttatttggtgtaggaatgttggagggagaggagggagaagaggaggaggggacggaggattcgttaccgcaaaaggtttgttggattgaaataataatcttcaggccatggccgcactacaaaccgccaaagaagtcgccaaacaattcgataaacccgtcgtattattattgatatattcctcagtttatatatattaaacaatttgataatacaatgttgtatatagaatgagccgaaaccgatgataaagggattatcgtgtgcggggtatatagatgcgaatactgggaagacgattgacgagtttgacattaataattacccggaatctgtgagatataagataacgcacagggaaatcctctcggcagtgcaggaaaacacaaacgtcacactgcaagtaaagggaatgtacatctcacccgacctaccaaccaacagactaggattcgcaacaggaaataaaggactctacatcgaaatcgttggacccaccgtcgtcgccgttcaaagggctatgtactctctatactattttattatactattactattatacttattgtacttatatatttactactatacttatatttactactatacttatatttactactatacttatacttactactatatttactactatatttactactatatttactactatatttatatacttattactatatttactactatacttattatactaattatatacttattatactaattatatacttataatactgattatatttactactatagttattactatacttataatactgattatatttactactatagttattactatacttataatactgattatatttactactatagttattactatacttataatactaattatatagttattatacttatacttattatactaattatagttatattatacgattagtaagttgatgatgtgattagaggcgagttgagggggataattcagtcgataatggctcctcagcagggacagcagatgctaaaaccaaccggccgctacagcgtagtctaaaccctttaacttttgtaacacaaatctcactattttacaattatacaattttatatattaatattttacacatttatattttacacattaattttaatatttaatattttgagaaaatttttaatattttgaggaaaatagtttaatattttgagaagaaatttttaatattttggagaaatttttgggggaataatttggaattttctgtgtttcgggttcctgacactattttcatttctttgccaaaattagtttataaaatattctttaaaatgtaataataatataataaatttttaacactattaatattccattagtaaatggatgtgtatgagactgagtctgaatttaagtctataccaattcttcctcagttaatttccctgggaattaaccattccctatgcatttccagaacaaacgcctctgcaaactcctcaagaagtagaaaaaaatctgacgacgggaaacagactgcctcatatctaaatgtcttatcttggggaaaagtacccttcaattgcctgggccagggtgtagaagttaacacatctgagtttccgagagttattccattcttcagtggcaggagagtaactcaagtctcatgtggagattaccattccgcagtgttggtctgttcctcaagggagaatattaatgccggaactgtgttcacatttggattagggaactctggaagactgggatatcacattgacactaactctgaaatcatttctcagcaaattggcacagatgacaaggatgagccgtcatggtgtactccagtgcctcaacccgtaggaatgtcaataggcctaagaaataacgtagtaacaatctcctgcggtgcaaatcataccctagtaaccactgcagatgggtatttgtacgcctggggagttggcgcccatggcgtactcgggaacggatctgtagctaacagatacatcccagtcaaagttatcttcccccaagatactttcatttcaaagtgtgccgcaggtgccagacactctatggcattggatattaaagggaacatatggtcttggggctacggaggtattgtccacagtattttccacattatccatagtatttactgttatatacttaatgtatatagtaaatggtatatagttaattttatatagtaaatagtatatggtaaatagtatgtgtatggtataggaaatggtagactgggattgggaagtactagaagttgttttacgcctaatttgattgagatttttgatacgtacgaggtgtttcagatttcctgtggtgactcgcacagcgcttgtctggacagatttggcacagtttacacttggggctcttgcagaggagggaaacttggtctaggaaatatattatcggacgtcctagaaccaaccatcgtacagtcactcaaaggaatacatatcatacaagtacaattatattatatttatatagttaattatatagttaagagtatatagtaaattagctccctctaggggtacacagtaaattggctccctctaggggtatatatagttaattatatagttaatctggatagaataatgtatgaatatgtaggtatcatgtggtagtggaaatacgttggcgttatcatcgagtggaaagatataccagtggggatctacattgggatttaataagcaaactgatggattaatttcacatactgtttattcgcccgagcctgtagctgaaactgggtttaagaacatatttgtaacctcaggaccgtatagttttgctgcaattaacatctttggtgatctcttaacttggggattagggacagggtatagactaggtcatggtgattccaaagatcatgtaatccaactattatactattgattactttactatacccccagagggagctaatttactagtaccccgagagggagatagttagtgtatatacccctagagggagttactttacttacccctagagggagctatcttactatacctagaattatataccccaagagggagctactttactatacccctagagggagctactttactatacccctagagggagctactttactatctaccccgagagggagctactttactatctaccccgagagggagctacttaactatatactattaactatagtatataactatagtataaatatattaacaggtgatacctaaattcgtatcatatttgaggactcgggtgtatattgacaatttgcttaaaacatacgatgaggctgcgtttaaggttgaggatactgttgaaaagactgtgaacccttatgacgagcgtagaatacagcaaatagctgtgggtgatgctcacggagcacttttaacttgtaacggaacagtttacacttggggtgccaataacggcaccggctgtaactctaccacagaacccctagaagtatttataccataatttattcatgtgtagaactacttataccatacacttattaatgtgtagaactacttataccataatttattaatgtgtagaactactgtgaaccgattttgtttaaccacttttcgtcaaaaataactaaaatcgcgtgcggatcaagtcatacacttgccgtgactattaacggactactcttctcttggggctccaatgaatctggacaactcggacacggtaatccacactattactctataattaacacaattattatatactaacataaatttactatcataaactgataattggatatgaatggtataattgggtaaaaagtgattaggtgatttgaggagtcgagtggttccagacagtgtgagtaacattgagaattgtataaatgtatttgctgggatagataacagcggttgcatttgctcagtaagtcacgagaacatgatgaaagacgagtatggcacactctgggtctttggctcgtcaacctgtggtaaattaggcctcggtgagaacatgacctcagcagtcatgactcccagagaagttaatataacaggagtacactctgtggctctaggtatcagataaatccctatactattataggaccaatgcactctttggctttgactagtgacggcacactttacgctgcgggtgcaggttccggaggaaggcttgggactggaaatacgacaaattccttcacatttgtccaggttaaaactgatcataagtttgtggcagtcggtgctggagcctcacactcacttgcgatttccatggaaaatgacctctacggctggggagaggggaagtatttaacttttgacgaagatgttctagaacctacgattattaatactattccctccaccacgggacaggctaaagttgtcgcactcgcagtcgcagccaatcattccctcgttttatcacaatccggaaatgtatcccaatgttatttagttaataatatatctaagtagctctccttaggggtagttaagtagctcgctctcggggtatataattagggtatagttatgtagctccctctcccctatataataaattagctccctctaggggtatatagtaatttagctccctctaggtatatagtaatttagctccctctaggtatatagtaaagtagctccctctcggggtatagttaagtatatctaagtagctccctctacccttatattattagctccctctgggggtatagttaagagtataatggttatagttgtctggttttggggataattcgtatggccagttgggggttttccttagcatgaaaagctctgcgaataactttattaaaatgcctctcccagtaaatgtacaagggaacatcgtctgcgtcgctacttctcgttatttctcttcctgctccaatttgtatcctttttacactatttgtaataattatattaattatattaataattgtgttaaaattgtgttaaaattgtgttagagggggagatgcattttcttggggacttgcaaaggatcacaggcttggtataggagaaaccaagagtaaaatcatttacaaaccgacaccggtactttacacctgataacaattgattagattgcgaacacgagcatgattggagacttgatggacaagtttgaacttgactcttacaaacacacttcaatggtattttacagctgttaattatgttcagagcggatatgagactattttgaattatttcctggatgaacttcattactcaagtgaccctcacagcattaactggcgtaacctccaaattgttctcaaaaatgaagaaaaaattaccagcgaagcctcaattaaactttttgaagtattcctaatctctctttatatgttaataatgtattaggaagaccttgtaaagtgtttgaagacgcacgtggactttattttaagtatgagcgagagttatggtagagtaagagcacttcagtttaagctcttgtctatggttaaggatttttgcacagctttacggggtcaaaaagagattaacactaaacccggtagggaattttttagcccgttcaaggccaaactcacgcaaattgaaaaactcgttgaaatactattcctacaaccagcttacttcgtcagattagcaatgttctcccatgatctagatctcgtctcaaacatcgtacatcacgtaactcttatactattattatttagttatatagttagtataaaaatgtgtaagaatgtgtaaacgtgtcttattttgtgtgtgaagtgtgtaaaaaaagacacgctaatgtgtagaatgtgtaaaaatgtgtaaataagacacactagtgtgtaagcgtgtaaaatactataaaaagtgtgtaagaatgtgtaagaatgtgtgtataggtgtatggagatatccaagttccaagagtccataatcagtattttgctcttttgaggtccttgctgagggaggaaactgccttattttttaagcctacaaatcctttaaacgcgttttgttcgccattttcaaggatactgaggacatacgcaatgaacaaatatctcatcatagaaaacgcacacctgtttctttcccaaactgatcaacagtatgtagtatccctatgagtataattaatgttaataaattgattagatcagttgtgtcacatttggcgacatattcaagcccaattctaattcctcaagaaggattcggtattacaacttaacatattccaacttaacacatatttaacatattccaacttaaatacataaaatagattaaaattttagagtataaggaccacaaaaggtataaggagggaatgtgtaggtttggttcgtttttggtgtttctggcaacagtgttgtctcgtctggttttgcataataatattaagcttcttttcacgcaaatgtacaatttggtaagggaaaagatacccgtagactgggcctcaccagcagtaccacttgaatacctcgcaatattccccctcataccagtcttcgttttcgccattatacaacccttcttcactaatcccaatcacatctcacgtattcttaacacattctaattagacatttattgtatccccaacacattctaattagacatttattgtatccctaacatatctcattttatttatactgtgtaagttgtgtagagatgtgtggattgggtgtgatgggggatgagaatgtgttgaagaatatgtgtgtgatttcgacttatttcgactacattgtgaaccctgagctaaagatgccgccgatgcctgcggtactgacctcacttgcccagactttgtatagtaatctttcccgactgtttctggagtatctgagatcaattctccacgttgaggataatttttacacagacttgacgatgcagatttttaaaagtcactttgacactgattatgtaaacgtaagtattccctcagacaccgttgcaaaactggtgaatttatgtcactcctcatcacattatctgaacttttcggctcacgatccgcttgtgaagataatttccggcatctctgggtcgaagaaattgtccccaagtgatgtgatttatcccacggactttgttgaaaaattgtcaaaaagtgggttaaccaattttagggtggatcacaggttcatggtttatgataggaacatgtcattttgtgccttttcaaacacgtttgtaccgcaaaaacttgcatacagacaaagtactttttccgaagactgcgttaagttcatttccgtaattgtcaggtatgtaccccttgggaaatatgacccctgtaagattttacaagactcactgactcaacttgatgatttaagagtacagtatggcacctacgatgacttgactgacgagatgttcctcaagtcaaagtacttttcaagccttagctcgcctgattttaagcgggctgacattgccaaggaagtttttaataccgttcagaaacttaaaaatgatataacccccaccctcgttggtaagagcattttaaaaaagtgtctggagcggattaggcataggaaatacttactttacatatatcaacatcaaaacgagattgaacagtgtagaagaaactttgaagctcagatatcttacaatgttgaatatctcaactcttgcattaattcgctccactacgggcatatcgatcctgccattaaaagagctgcaataaaacacagagttaacttattcaccataaattctaatgttgatagtaagaaggcagatggtaagaaatcctatggtaaaaggtctgatggtaagaagtccgatggtaagagtgtatcatttagggagtattcatgtcttgagctgtacaggaatggaacattagtgccggatgattctgtggcaactcgcgtgtttaacaggttagtcatggcattttcagccagtattgacactggctgttatattacgcttagaggaattgatcattcagatcataaggaacttgagtttctcagttttgagctacttcaaaagtttgttgattcttccaactcaggatatcaccagatattcacaaacccctcatatccctctggaatgttcgtaatcaaagcttcattccttgttgacaccttcatggcactcgttagaagttaaccattcaattttttatgtctcatatatacctatggtagtgtactatttattatatattatgtacttgtatagtattaggagtatactatatagcattggtatacagtaagataacacttattccagtaatatgtaacacttactactccttaatactgctattataagcctaaataatgtataatatagtaattatactatagtaattatacacctaatttactaaccgtaaacccagacacataattattatactctactatactactaaatatatattatatactatatgtataatatatagtatagtgtatttgtatagtattaggagtatactagagtatattgcatggttaagtatacagtaagatatcagtcattacgcgatgtaaataccacttaatactgctataaggctaaataatgtataataaagtcattttactctatgttatatacacctgatttgctactgtactatactatatataatatactatatatactatatataatgtactatataaaatatgtatagtagttagagtatattagggtatatatactagggaaccgtaactacttcttaacactccttaatacaattaatactgtttaatactgctataaaacactgtaaatagtgtattaaaacactttaaacagtactgtaatatactttttatacacataattaactggatataagtccataaacccagacacctataccatacacatactatatattatatattatatattattatatatatactatatgtatagtatatatgtatttgtatagtattaggagtatactagagcatattatatactattactatacagtaagataacactcattccactgctatataccaattactactgttcaatactcctcaatactgttattaaacactgtaattaacgtcttaacccctcttaatagtactatactgtagtatttatacactcaatttactacccaaaaacactaaacccagacaccaaaccctaaccatactaatactataaatttatactataaatatatactatgatatgtgataatggtgagtacattatttgaaaatagagtaagcgagtgcgcctaggattgcgattgtcattccaaagtacccgagagtggtaattttatacccgaacgccacaatcgagctggtaatcagcactatccgcttaagcgtatttgcaattgcgtgggaaacctggttcacctctccaagacatatgaacgacatttcattacacagaaagtagcagacacatgagaaaaatgctctgagcaatagaacatacttctccttatccgtcatcttcagagtggctgtggtccagtatggaacccacttggcagactcgctcaggaacgccaagaaaactgatcctacagaagccgtcagtgtgagtaacatgtaaatgttagaggaggtcaagttagttcccagttcatttttatttttcatggtcaattttgcgaaaacgctacggagtgagctgccagcgtttgagagcattgcgaaccaaaatgcaacccagctgaagtttaattccttaaccgatgccagggcaactcccacaaccacaggaatcaacgacacatacgcgtaaaggttaaggaaatcatccagaaataatgcggaaaagagggcagtcaccacgggctcggcagacttgacaacgtgtgtaaatgaaactgcgccaatgcccatggacactacggcgcccaggtgtacaaacagatgacaaagtccctgaggtaaaaacacctttaaaaatactttaaaggacttgagtctgggcgcgttccggaaccccgtggcccaaaacagaatcgcaaacagccagccaacggtaagttgaagacaacttagagtccagggcaaaggtatgaggtttaaaattaccttgttctcaataacgtacgccacgtttaacaagtaccagccgaagaaaaggcccacaagtctccaggaaaagttcggaaacgagacgtattttctaagcgcttcagccttagaagggaaggctgaaggaggcaaaagagtgtcaagatctgaaaagttactctcgtacaccgaatcgcccctcggctccttcgtcggattctccattcctcaatatattctcagcaatttttacattaaattctcaacaatttttcaacaaattattaaataattttcaaatttttacattaaattatttccaataaattattataatttaagggagaatgttggataatggttgaggattccagtggaaaggggtgtaaaattgggtgtaaaattcggtgtaaattgggtgtgtatagagccttccagatataaattaatagttaaattaacagtaaattgttttatcagacaaataatgaaatttgggtgaaatatgagaaaacagaaactaaaaagtgtggtaaaaaattactaaaacaacccagtgaataatctgaagaataatcaactgtctaaaattatttttcagtgtaattattagtaaaatgttagtaaagttgtgtaaaatattaaacttgtagttacataactggggctgtgattccgtaataaattagtaatctagagcgtaattacgtaatttagttaataaaattcgtttagtgaaattatgtcaaatttgaaggaaacttttcacaaaattctgtggaatctgacgtaaatttttacacatttttcattactcaaatggttaacttttgaaggaatttatggaaaattatgcaaaaattcacatttttactgttaagtaaaatattcgtaaaaatctggctaagttgtggaatatgtaaaaatttgataaaaataaattaaagtatataaaaataattaaataaaaataattaaaaaaatctttaaaataaattttaagattaaaagttggtaaaattcaaatttgtgtaaaattctgaatttctcaaatatttgtgaaaactaaatctattgtaacaaatgcacaataagattaaataatttacgtaaattgtaaattacttaaatttaaaaattttttatttaatttttagcataaaatttgttttttgttttgtagaattttattttatttattatataaattttttaattagtaatgtcgttagaatatgttttttcgtgatggatagtagtacaaattccggacccgtttccgaccctggatctgaccctatcctaccctcaaactcacattttcccaatcctcaaacccaaaccaacattaacgttgatgaaaatgttgaaaatgatgataaaaattgtgaaattagtggaattagtgaagtttctaaacaacttgagtcatcttctttaagctacaataaacctccccaaacgctcgttaacacagtaattctcatatccttaattagttatataaacccttgtaattatggtttaggccccggaaagggttcaaaaagcgcaaaaaactatcgacattaaggataaatccataggctggggagcaactcaggtaattactcactcagtttttcactaattaaccgttaactattctattatctgttaaataacaattctattatatgttaaataacaattctattatgtgtgtgtttaggtaataattgacattgacgacacggtgaagtctagtggtgggattaagttgtttaatgtgcctttgggcggtgttgatacgcagtatggccggggagaattgtaccccgggtgcttccaattcatactcgaactctcaatgcataaaatgggcaagaatcggaaaccactgcttctatccgtactcaccaccagaatcccacaggttattcacactgttttacagttatttactacttacgacttagtttcccagttatttactccttagctccctctcggggtactagtaaattagctccctctaggggtatatatctaggtagctccctctaggggtatatagtaagatagctccctctaggggtatatatctaggtagctccctatcccttagatagtaagatagctccctcttggggtacatagttaatttagctccctctgggtctctttttacctgaggacttatttcctcagttatttacccttcctgaggacttagttttacttttttagccactccagaaactcctatttcacagttttttaccctctggagtacttaattactcagttattcagccttagttttacttttttaccccttccaggaacgttaatttcttggttatttagccttaatttacttatttaccccctccagaaactcctatcactcaattatatgattaatagttacagtgttgaaaatgaatttaggtcccgataacggtggattctgcgttgaataggcggttgatgcatgtggctgagaagaggggcgtgttgaattgggggatcgactgcgataataaaatcctctattccaccttgaaggagtggttttttaacgagtcgaggggtgagaagaagtttgtgaactttagaaaactgctcagattcgtggctaatgagaacagtgacgctcggtttatctggattggggacactggcgacagagatttagaagctggagagatgatgataaagtatttttcacacaagataaaggcagttttaatgcaccacgtgtcatcaaaagggagcgacacaatgccaaatgattattacctcaaatcagtgccagttttattctttaaaacttatgtcggagctgcgaaaaaagctgtggaacatgggctcataagtcataacgcactgtcgagagtactggtgagagctgtcctggagctcaatgataatacaaccacagatcactccaaatggaaagatctcatcaaggatatactcgtattattactattagttatatacccctagagggagctaattatttatatacccctagagggagctaattatttataccccgagagggagctactttactatactattaactatatacccctagagggagctacctaaatatatagctagaattatatacccctagagggagctaccttactatatagctagaattatataccccgagagggagctatcttactatatacctagaattataccccaagagggagctatcttactatatacctagaattataccccaagagggagctatcttactatacccctagagggagctaatttatatacccgagagggagctatcttactatatacctagaattataccccaagagggagctatctagtttatacccctagagggagctatctagtttatacccctagagggagctatcttagatatatacctataatacctttactataccccgagagggagctaaattaactatatacctataatacctttactataccccgagagggagctatcttagtatatacctagaattatataccctagagggagctaaattaactatatacctataatacctttactataccccgagagggagctatcttaaacatactatactatatacccctagagggagctaattatataagggagagggagctagattaactataatatattgttgttaggaggtggaggagatagcgaacttgaaaaaatatgagcaaggtttaattgtgaggacgaggtcaataatcgagaccagaatcagagaattatcgcaaaacattacataacataacatttcactctaatttttcactccactataaaattaatattaaatatattaatttaaaatattttatattataaataaaattctaattcaagagtaaattctggtaaaataggaaaatgataaaatggataaattctgggtcaggagacccaatttgagccgttaattgcactaatttctctacacattttaaattttaatctaaaataaaaaggcgtaaaatgtctactgagactgtggttagtacggagatatctcggtcaggaacaggggatttagaaaacgttgatttgtccactttatttctctactttagcgaggggaaattaacaaataaatcagaattttcagacgaagagattaagaatttgttctctaaatattccaagagctttccggacaatgagaaggtctacgaggttttcgcctcagttttcagctccagaggcctttttgacctttccagagcttgtttatataccagagtttacttacttaaaagagactcccaagcctataaagataacttggaaatgcttaaattggttaacgaaaaagccgtggaacaggttttaatactgccaaaaagcttcctggataaccttttttcaagggaaaattcagtaaattttaacacctggaagtcgaaaatggcctacacagaaacttcatcacatctttactcaactttcgaaggaaattatccgtccaacactgcgtcaaatttgtccaattgtgtgtcacgttcaaatgtgtcagatagtgtcccaatttcaaagagtttgctgaggcctggagagttgattttgaagtcatctccgatatccgtagcgccttggaatatttatagtgtcccctcagaccccttgttcatgtgtgaacgtgtgagatcttgtttccactgtttaaaggtgagattgatttctgaggttagaattgcgtgtccaaaacatccctgtgagtgtaattattacttctgttctacggagtgttttcttagaaacggagcagttcacgagctggaatgtgagcagttaccaaaactaaacaaattctcagagcatttcctgaacccttctttcgtacttttagtcgccagaacactaattaagtgcagattaaacatgacaaacaccgccagagtctctgatatacacaggaaattggacaataattctctattagatgtaatactaagttatcaaattaatgatataaatggtcaaagattgcgaaattgtatagaagaaatggagagatttgctttgtttctgttggaggagttggggtttgacttttgtctgcacttgacgacgagggagttaactcattttatcctcgtcgtctgggtcaacagtgttccgttcacatcttgtctcaacttaaccaacggacaggtaattggcggctccttttttaccctaaaactcaagttcagacagtctgaaacacccaattgcgtactccattttgacgacggaaagtttaccgtaagatcgatttatgagatttctaaaggaaacgaactcacaattaacactcgcattgataagtatacccccgtaattaagcaactggatcacttctggtcagtacagttttttacaccagaaattcagaattttggccctacagaagtcagtgctataagatgtaaaaagtgtatccaaggcttttgttatccgaaaattgacaatatctcagatcacaacaattctaactctgtgaatgagtggcactgtgaaacctgtggcgaggttaactctgaagagttaaatctactccaaaacaaggccgaggggatatttacggaagcccaaaaattgtatttaaagagtgaattcctaagggcaaaatctgttttactggatttcataagcaaatggtctggagtgttacattttgcgcactatttgttatataattcttatcttattcttgctgggattttgaataggcctggaagtatcacagagtctttaacttacttaacaagagcaattattgctgctgacaaggttcttccaaaggtatgccatgaaaaggcatacctttacgatgtatttgcagattacttacttaagcttaagacacacgtgagaatcaggggaccagaatatgacagaattaaacgtgtgattatgaactcgttgtacaatgcgttgtggaactgggttgtaatctccggtacaaattccttcaactcaatctcaacaatgcaaaagtgcagggctgtggcattttcactcaatatccatacgcccccagtaggtagaaagtttgtaattaacttaccaatcaagtatgcagagcttgttaagtttgccacggggcataaagttcaatctgatcttaacacctcggacgtgggaactatggcgtttaccgcagcccagggccctgagtttaacgatacaattgtccaagttctgaccagtgtggacgctcttgggattagacaactgggcacaggactctcagtactcggaattgtagcctcaaatttgaatctcccgttcttcacagcactgattaaatcacactacaactttgctaaatcacttttaaacattgataatcgtttagacagtaataacgggggtttagacactgtaaatggtgatttaaacgctgtaaatgagagtttggacactgtcaatagtgtgaatagtgtcaacaatgtaaatatgtgtagagaggagcaactgatgaacattttgcatagtatatttggccctaacgaggttggtgtaaacttgttaatcatcttggcatgttttttacacaccaatgcccagtgtaattctgatgttctgggaacagaaactgtcatggccaaagtgttattttcatactccgaaaagttcaaaactcttttatcacaatttaaatcttccaaaattgtttctattgagtttgacacaacgtcacataatttgttagaggtgaataatacaactgctgaaatcttggggtgtcaaaccgccctgcactatgcgagtttcaggggtaaaaacttgttagcagagtttctactgaggaaaggagctttggtaaactgtatgaacctggacggctcaacgccgttacatttagccgcgtttaacgggcattacgcagtagctaaaactcttttaaaccataacgcaactgtttccgccatgctaaaatctggagaaacgccactacacatggccatctacggcctacacaaacaagttgttacactactattagaacacacaaaccccgatcccttccataatagtgtaaacattggggagaacagaataaatagtgtaaagaatgtggagaatgtggagaatgggattggtccgacaatttggcatgcgttggtgtgtggtatatttcacgtgaagtctgatttacggtgtaaaaatccgattaatccgttgattgttgagttagtggaaagattagcgaggggattggaagtggttaaaatattactcagtcacgtgggactgagtggtaaagtttgggtctggtgtggttacttaccatcacaactactcctcaagctttgggataatttgctcgaaaatgcctcattgttctcttttcccaaacacaaacccactttatacgtagtctcaaggctaaatggcgttatcgaaagggatcttagggtcttaacaggcactaacccagacaaaaccgcacccatcggatcaccacaacagattaatcatcttaacaagtataatcacgttaaagagtgtgaacaagttaaggagtgtgaagagtggaatggtagaaatgacttggcatttggcgccttgaggacgttccagttcctgttacacattctcaaatccatagaggaaagttaacatagccatagaggaaagttaacatagccataggggaaagttaacatagccataggggaaagttaacatagccagaggagttaacaaaggcatagagaagttaacatagccataggaaagctaacacataaacatagaggagttaacaaagccatagaggagttaacacattacttctaaaagggctaaacagtgaaaacacctaaagtataagcaattttaaggtaaaatagaataatctatgggaatgaaaatttttgaaagtggtgtcggcagtgagccagaaggcttaaaattaatgtttttttcatgtacataatttttttaagatttgtcaaaaattagtaaataatgtaaatttaaccctaattaacctttcaacggtaaattttatctcataaattttatcctataaatttttttgtaaattttttttgtaaattttgttttatgttaaatttttggctgattccactgggaaaatgtgttaaaaatgttttaaaaatgttttataatttaattggtttagggttggagaatgttggttagggcccgggtttcgagtaatattccaggattttcccagtctaactttaaatttgggatcgccaaaacggcattttcccaaagaaactttgcgtcaacttctaataacacaaagcctaaggttttattcctaggctcaggatggtcttccgtcttcttcatcaagaacttaaaccctaaactgtaataattttacatatttccacatataaaataatattttacatataaataataattgtgtgatgatggtttagatttgacttgactgtgatatcgccgaggaattactttacttttacgccgttgcttcctaagattctctctgggatggttgagagtaacacatctgctgagccgattattgagtacatgaggaggtatttcaggaccaattcgcagtttatacacgccaaatgtgtcgatgtggattctgactccaactgtgtcacttgcgctcctttagattctgggcctgcgttttcagtcagttatgactttctcgtaattgcagttggagcccaaactaacacttttggcaccaagggagtggaggaatatgcttactttttaaaggagcttgaacacgccgagctcgcgtttcagagaattgtggacaattttagagcagcaagtatgccctcggtaaccaattctgaccgtaaaagattattacactttctggtagttggaggaggtccaacaggtgtagaatctgcaggagagctttcagttcttatgaacagtcatttggggaaaatataccccgaactcatgccatttgttaaagtgtcaattgtggaagctggacagcgtttactccccagcctcgcccaaaacacttccaaatacgttttaaaagtgtttagcaaaagtgtcaacatgtatttcggcaaggtggtgagtgaggtcagggaaaagtcttgcattttaaaggaacttgcgagtggaaatactgaggaggttgagtgcggattagtcctatgggccagtggccttaaggaaaccgatttggtaatgaaattgaagaggaagtggaacgtcccagagggctcaagagctctcctagttgatcaatacctgagactccagggctcaaataacatcttctgcctcggagactgctgtaaaattacgcccaaaaagctgtcggaaaatgttaaatttgtgcttgaaagggtgaaaagtccaaccctagaagcacttgtaaaggccagaaaaatgctttccagagatttcccccaactaaatggagctaaatgtaactttaatgacccgaaatttcagaaatcactgtcagaattgagtgagagatgtggtgacggaacggaggaatggtttgtagaagttttgaggctggtggatcaggggtactgtccaccatttccaacggcccaaaacgctaaacaggaggcgatttacctctcaaagctatttaacagtggtgcagttttatctggtaactatgttaatgcgttttgtgacaagtggaagggcacgctagcctctctgggtgggttgagagttgtgatgaactcgcccctaatcaacttaaacggcggactattcccactattcctgtggaacaccgtctacatgctcatgttctctagccttaaaatgagactctcattcgccttcgatatgctcaagaactttctcttctcacgacacctcattctcaagaaatataactaatatactataccatatattcaagatattaagtatattaagtatattaagtatattaagtatattaagtatattaagtatattaagtatattaagtatattaagtatattaagtatattaagtatattaagtatattaagtatattaagtatattaagtatattaagtatattaagtatattaagtatattaagtatattaagtatattaagtatattaagtatattaagtatattaagtatattaagtatattaagtatattaagtatattaagtatattaagtatattaagtatattaagtatattaagtatagtaatagtatattattaagtatagtattagtatagtattagtatagtgtggtaatagtgtggtatatgataaagcccagaattagtagtaatgagcatctggttgagttggttatccgggtactatccgggtcaatttactcatgactacactataatataatattgacttgattgtatgtggtataattagtgttgttggtgatgtcaggatagtcttatccagaggatttttactctatttatactatatatatactattcctaactactgtactactgttattatactatagtatagtataccaatagtatagtgtgtatagtactatgggtattacgtgtctgggttttagtatactatagtatatatggtatatacactatagtatagtatacgatacgtatgatttaaaaccagacaagtaaccacagacacttaatatcttaactattataattactatactaactaatacccttactattattataattggtatgctattatagttaatatactactgtaatactatactcttaactatatactatatacctataataccttaactatatacccctagagggagctatcttatatatatttataatactgtgtactcttaactaatatacttataatactatagtactatactatatataatactattgctatactatatactaagtataatatactatatataatatactgtatatgtatagtagtattagtatattagtatgtaaatacactatcaaattaacaccttaataaaccacttcaaaccctaaacaccactctaaactgttgtaaaaccctgtaaacaccatcttaatccctcttattagtactctactgtagtatttatacacccaatttaccacctaaacccagacacctaccacaataccatactattactatagtatatattatacaatacccataactagtagtatacacccagaaaacccagacctaatacctaaacccagacacccaataactaataccataatactataatactataaatatattataagagtatattatggtgttagtctagaggtctatgttctgctgcttgttttcgaactctgttgatatactcatttctgttattgaggaatagaaggtacggatccgactgcgccggtgatagtgggtttgggttatccaaaagatcctaaatccataataaaactatatccccacctggatcccgagtaaaatctgctttatggtgattgacggcttccactcctcgtcctcgttcaggatggagagacacactgtcccagaaggatacacattcggatgaaacaaaactttcgtaaatctgcatttaggcggcttactagggtaatcgtcactaaactccattatcaactgatactcaccatcctcccatatcgtaccctaatatcaccaatatatcacactatatcatacatattatacatattatatacataatagttattatggttaaatagtgaatgtgtataattgtgtaaaaaagtttggtgggttggaaattactttttttccgggtattttacagatccatttcatcatgtcgaatcctcttccgtcgggaaggggcgcgtacttggctgaaaatccaaccgggtgatccctcctccaatcagcccgctcctgagccagtctcttcctcgcaatcgatgacattattcatttaaactgtcattatcactattattcaataaattcattaaattaataaattcattaaattaataaattcattaaattagtaaaattaataaattacaataaattcattaaattagtaaaattaataaattacaataaaattagaaaaattagtaaactaggtaaaatgattaatattttaaataatcgggaaataattggaaaattggttggtaattataatacatgaaagagtaaaagagaagattttggatagtttaacgggtttatggtgtgaatgagtagatttggaatctggccttctggcctaatttcacggctgtttacgcctgaaaatgctgggatcttaaattaatctaacatgaaaatgtgtacatgaatagctaaggtacccagagggagccaaactcccaaatcccaaaaaattaaattatctcacataattaatataaatcatctctacacatgattacacgtaaaaattgtatggaaatgtaaaaaattgtatgaaaaattgtatggagatgtgtgaaaaaaagtactgagaggcgtactgagggtgtcatgagtggctgttaaaattgaggtaaaaaataacaaattaatattttaaaagagctgaaaaaattaaatttaaataataaaatgagtgaaataaataaaagttggtacaagaggctgagattggaggttgaggacgtgaaaaaattccggggcccttacgtaaatccttacataagattagccgcttacattctcataaccttcctaacaggtaaacttataatattataaaataaattaatgaaataaaataataattgtgtaggttgtgtttactggggctggaatgggatccaggagctgttatacaaggcggggtcgtttgcggatgtttgtgcgggtgaatctgacatttcatacatcgttctggggaatggccagttcataggtaatttcagtagtttcaaattgtgtagactgtggacttcggaagagtgaaataaacaacctttacaccgttgctttcacgtcacatttcgtgttttcagtggtaggaggcgttctcctggatatcattggcccgaaaattgtgtttctgggctcacaaactattaatttggtttcgtggctactgattttcacactgcccaagaacaaatttgcactaattgcagggttctttctcatcggattaacagcagaatcaagctacgtaccactcttaacaggtgacaaatcaattatttagtagtaatttagctctatttagctttaatttaggcttattttagggctatttagctttatttaggcttattttagggctattttagctttatttaggcttattttagggctattttagctttatttaggcataattttacttaatttagtccttaattatcacttaattggtctttttttggctctaatttggccttggtttacctctatttagtcataattttggctaatttggggcttatttagtctaattttaggcttaatttagctctaaattagtatcttttaacaatagtccggtcataaattagacattatttgcctttaaatgactcctaaaatagccttaattacccttattttacccttattttgaccttaattagtcttatttgaccccttaattacctttattttggactaatttacctgtaaaatatctttaaataccataaatttacccctaatttacccctaacttaggcctaaaatagtcttattttaccccttaaaacccttattttcacccttaattagtcttattttacccctttaatacccttaatttagctataatttacccttaaatacccttaactactctctaattactaattaataacaatgtgtagtgtcgagatactttccgaggaacaacaactttataatgactttgctgggctcggttaggtcgttatcatttttcgtgcctatgattttggctgagatttttaagactgacttcttcaaacctgaatccctgtataagataggattaatctacgtattttgtggaaacgtagtggccataatgctgggcggttacctcttacagttcaaatttgagcatgattcgatgactcaaaagtctatggagttggaggtccgcgaggactctgaagtcatgagttacacgagtcaagacttaataaacatgctcaaccctgagaataataaaaagatctcctgtttcggaagactaagtgactctgtaaaggccggatttaagcatccgcagttactggaatttgtcctctttttaatcagttccacgcttttcctaactgcctacggatttattaacaaggcccagcgtgagattttcgttacctctgacgggaaaagcgcacttgaagtgtttaaatactttaacatcctgacattcatccccgcacccttcatgggaatgataatcgataaaatcggaccagcctacgccatcttcattctacaattcttcgtaactttttacactatttacacattttttactcagttacacattttacacattttttacacacttacacactatcgtgtcttatttagacatttacacacacacttaattacacactaaataagacacgtttacacacctatacacttacacactaaataagacacgtttacacactattctacacacttacacactaacgtgtcttatttgtacactacggtgtcttatttacacattagtgtaattaaaatattacttgttaattcgctagaacaagttaaataatttgtttgattgtgttttagggttttttcttttatgttttaattaaaattgacgcgtatgtgacgaagattttggcgtgtttctgttacattatcgccggttctatttccatatcctcaatttactgttacttgaataagcgattttcccccaagaagttcggcactctgatgggaattgtgtttgtctttatcggggcgatttcactcacaaacatccccctgtacgatttggccgtcattacactgaaggacaaggctccgttcaactttaatcccgtggaaatcggactcgccacttacatggccgttgccgcctcaatcacaagctacctcgcagccaacgcgaaactcaaacaacctcaacacaccaaaactgagtccgactcgttctccgtataatatttcaatataatatacaatctataatacaataatttacacattaaatacattaatttatatattaatttatatattaaatatgttaatttatatattaaattatatattaaataatgtatattaaatataataatttatatattattttatatattaaataatgcattaaattatacaataaataatacaatatttatatattaaatatattaatttatatattaaattatgtattaaataatgcattaatttatatattaaattaatcatcgagttcgtaaaagtctagcgtgtttagagagtttaaattgaggcataggaggttaatgttggcagttgacagtacgtttaggactgagaattgtgagagtttggacttacgtttcttctcctcgtgagttagcccagacaaaaacgcaccgtcaaccgtagttgaccgttttatcagaaagttccgacgcttacattcggcctcctttaacattgataacaggttttccacaggccactcattctcaggaattctaacaacaaattaaccaattatacattaatcaagtaataatacattaatcaagtaattagttaacattaatgagttaaaattaaggaataatacattaattaaggaataaataacggattggataatgtgtaggagtacatttggcagagttcgtatgcgagttcgaagtagaatggcgttgagagtccaacggttgtggcggtgggttctgtgaaaagcgccctggcagatttgtagtagctggggaactcaattttacataaccccgccttataaagatgcttcgcataaaacaaaggcaactctatctcatcctcagacctcaactaaacatattttcacactatcaaattattgtacaaattattaattactaaacaaattaatgtaaaacctcgtcggatctgtgttcgtgtttgagttcgtcggaagcttttgtggataaaaaggagagcccgggtaagttaatcagtggtttgcaaggaaccttctaaaaaacaattaataataaaacaaacgataagatcgatggaattgttaaattctttatgatttaaaattagttcctggatattctttaaaatatcagacattacgcggggaaatggtcaaatcaagcgtaaacccaaaattaaacactcaaaaaatacccaaaaatacccaaaaggtgtaaaaatatattaagtaaattaaaggggtgaaatgagaaaactcagtgaagtggaagatctaacaaaaagtgaaatgtgtggaagctgttccgactgtaaaaaatgttatctcagctaaataaattattttatctaattttaatgtggaataattagaaaatttggttcagcaaaattggcaatttagccccgtggaatctcgtctaccttagagaaattaaatataaatttacaactttaaaactttttcagtggaatatttaaagttttgttgcaaattttaagaattttttaaaattacaattcatatcaacaccgttggaaaacccgaacctggccgtaataaacgaaatttcttataaataatgaaaaaattaattatgaatatattaaaggcgtgtgtgccgtgtgatttagtgaattatgtatgtcgtgtggaaatgatgctcgacatcttgaccaactagatcaacaccctacattaagacgttgtaaatttaatagccttagctgtttgttcctttttactaacattttcgtcatcttccaaatgcttcagattcttatcactctccaatcaatttaactctcaaatcaattttttatcattttattttttttatttttcgaatatttacttttttttatttttttatttttcgaatatttttgaatatttttgaatattttatttttttattttatttattgaatgtgttgataatttgataatttttcttgtcaaatttcccgtttgaatctgtgaagtgaaagattgtctacatcttaggtcagaatgggcagatctagaaggagaagagagaggaggaaattcacctttccaacccccaaacccgtacaaaaactaatcacatacatcttcatgatacttctcacaggttacaacaatcctatcttatccaatattatctcaagttatcttaagttatcttaagttatcttatcttatcttaagttatgtcaagttaagttaccctaacttatcctatgttatcttagttatgtcaagttaagttaccctaacttatcctatgttatcttagttatgtcaagttaagttaccctaacttatcctaagttatcctaagttaagttatgtcaagttatcctaacttaagttatgtcaagttatcttatcttatcttaccttaagttatcttaagttaagtcatcttagttatcctaagttatgtcatcttaagttatcctaagttatgttaagtcatcttaagttatcctaagttatgttaagtcatcttaagttatcctaagttatcttagttatgatgtgatgttttaggatgtacgtattggggttggagtggtattcaggagatcctgtataaggccggttcctacgagcacctgtgtgaaaatgtgttggaaaagagtgtaatgatcatcggtggcaaggagtacactggtgagttctgcgttaacttatgcgttaacttatgcgttaacttatgagtatagattgcggacccaggaagagtgggattaataacctcttcaccatcgccttctcttcgcactttatttcctcggtcttcattggcgctattttggacaatttgggctccaagtatgtgtacatcatcggccaggcgctcaacttcatcgcctgggtcttcatcggagcactgcccaaagtacactgcgtactcgtcaccgcgttcttcatcatcggaataaccgcagaggccatctacatgccacttctctcatgtatcatcggaactcagttttagtctattgtagtagttcagttagtagtagtcaagttagtactggtaaagttaggagtaattttagtagtaaagtcatgagagtagcttaaggagttagttagttcttagttatcagtaaatcatgagttagttatccgtaactccatagtgttagttaagtcatgagagtaaattaaggagttattagttagttcttagttatctgtaactccttagttagttaagtcatgagtaaattgaggaggtactagttatccctagtactagatggtagatatccctagtactagatggtagatatccttagtagtaggtagtagatatccttagtagtaggtagtagatatccttagtagtaggtagtagatatccttagtactgggaattagatatccttagtactgggaattagatatccttagtactaggaattagatatccttagtactgggaattagatatccttagtactaggaattagatatccttagtactaggaattagttccttttggtagtagttaagccatcttttaaattaacctaaggatttattagttagtcttagtattatttatcagttacttagtactaggtattagttacttagtactagatactaggtagacctagtactaggcataacctatccctagtagtagatggtagatatagtactagatggtagatatccttagtagtaaagtcatcctataagagtaacttaaggagttattagtaacttttagtactagaccagatatccttagtactaggagttaggtatacttagtactaggaatcagttacttagtagtagaccagatatccttagtatagtactaggaagtataggaattagatatactcagtaataggtagtagttatggtactagatataggttacttctagtactgggtattagatatccttagtatagtactaggcattagatatccttagtactatattaggtaaccttggtattagatactgggtatccttggtactaggaagtagttatagtactatatggtagatatccttagtactaggaattagtgacttagtagtagatactaagtatcagcagtactagtaaagtgttctaagagtaacttaggcagttattacttagtactagaaattgttagtattaactcttgacagcttaaataagctacaagagttatttaaccataatttaccttagtctaggttaaattagcaagttattaaagattaatcaggccattcaaagttatttaaccctagtttattcagtttaggttaaattagtcattttcagggttaacccctgtttaagggtttagtatctccagttaaactattctaaaagtgtttaactgtagttatcttcaatttatcttactaattgtatgaattttgtagtatcgtatagcttcgagagtaagagatcggcggtgattggtttgatgggttgtgcgaggactgtgtcgtaccttgttccttcgctaatgtctatgatttaccagatagacttcttcaagcctcagtacctctacatcatatgcacggtttacgcgatcgttgggaacctgggctgcttgatggtagggttcctgatggttgacgggacctacgacaatcccctggaagagcctgacgaggaggaggagatcctcgagatcaagatcgactcgagtaagaacctgccgctcattgacaaggcgaagaagttcttcgaaaaggcactgacacgcgcccagcttaaagagtacggctgtctggccttttccaactccatcttcctaaccgcaattggctttgtgaacaaggcgaacagggaaatgctcataacctcaaacaagaaaacagccgtcgaaatcttcaagtacctaaacgtactcagcttcatacccggacccatactaggaaaactcgccgacacctatggagccgacaaaatcctatggaccatacaatgcttcgtatgtccccaattttagcttatttattatatagttaatagttaatctagctccctctaggggtattaattaagtatagtaatttagctccctctaggggtataataaagtagtaatttagctccctctgggggtatatacttaaattagctccctctgggggtatatacttaaattagctccctctgggggtatatacttaaattagctccctctgggggtatatacttaaattagctccctctgggggtatatacttaaattagctccctctaggggtattagttaattagctccctctaggggtattagttaattagctccctctaggggtattagttaattagctccctctaggggtaaatagttaactaatgttagggattggggtattatgtgtttacgggtatggactttttcatatcgaagatatgtgcttgtgtttgttatttcgtgtcatcttcgttgtgtgtgtcgataaattattattatataaaccagcggttcccgagaaagtactttggggttctggtgggttttatattcttcattgcgggcctgacgaacctgttcaacattccgctgtacaacttgggctcgaagacctgggaacacatcccgccgtacaacttcatgagagtctcgtacatcctcctggtatccaaaacttcaaataattactttagggatgcatggtcgcgggtctcatgggtgccggatacctcctaattgttaataagaaaaccgccagctgcaccagactgaagtcaaaaagcaagtttaaccaggtaaaagaggagcctgacaagttcctagcgccaagcgaagacgtcttggataacgtaatgatgacaagtcaggagaagctggaaaacttaatctcaggctacgaggacccttccacaagtcttggggacgttgaactgggcgctgacaggccctttcagggcttcgtggcgccggatctcattccggagacgatcggttttggttacatggacagttttgacaaggaagagataatttagaaaaaatataaatttctctattccaattacatttttagatcaagctagaatttagatcaagctagatttttagatcaaacttctaccgttcccacacgggaatttttatttaatttcagttttaattacaactgctgcgtacttgtttttgtttaatttttttgctctgattgagcgattgggagcttgggacacttttcgttctgatattaatcgatttactcacagcgagcctcggaaaatgggcaatcatgcaacgcaagagaaacaaactctcttcaacagctggaaatatcctaaccgatatatcaccctcgccttatactttctcatgagcgtcatcggaagtaacacctactcacaccatactcagcaattatcatcaatatcagaaatttatcagagctaatcagagttaatcagagtttattattattttaatttttttattttttagcggataatagttttgggttattttagtcattttttagctgtagtcataattgagttaattttggattatttttggattattttcagttaattgtagattttttagctttatttcattcatatttatggttatttagtcattttttagctttatttcattcgtatttagggttatttagtcattttttagctttaatttagtcgtaatttggtggttatttagagaaattatggttatttagtcatttttagtcattttttagctttagcttggtcatatttagggttatttagtcattttttagctttaggttggtcatatttagggttatttttggattattttcagttaattgtagattttttagctttatttcagtcatatttagggctattttcagttattttagtgttatttttttgatagttcagagttatttgttgtttaattttagttaattcagttttcttacactaattcaaagttattcagttagttttagtcatggattctagtcttttagttagttttaattcagttttctcacactaattcaaagttattcagttagttttaattcagttttatctcgatagttcagttagtttagtcttggattctagtcttttagttagttttagtcatggattctagtctttttatagttttaaattagttttaattcagttttatctcgatagttcagttagtttagtcttggattctagtctttttgtagttttcaaagttattcagttagttttatctcaatagttcagttagttttagtcataaaatggattctaatttttaatagttttgagttaatttagtcagttttagtgaattttagtcataaaatggattccggtctttgtagttttcagttaattttagttaaattagtcatttgaattctaatttttaatagttttgagttaatttagtcagttttagtgaattttagtcatttggattccgttcatagttttaattgtagttttattccctcttaaaacttaaatattgaagagtacttcttaaaacttaaatattgcgtatttcttaaaacttaagtattgaagagtaaaacgagtatttgtggtttgagatgactgtaggtactttttatttgggcggctgcgagatgaagtcaatgttgtataaggcgaggacttacgaggagctgacgtataacgtcgactacatcaggatcttcacagttggagtcacagagtacttgggtaagtccctgtcgaattaaattgtttagactgtgacgagaggagggatgcgatacagaacctgttcaatattggaaattggtccaaatttctatgcgccctaatagttggcgtagccgttgacctcataggcccaaagtttacctacacctttgcacagctggtccagttcatcttctggatcctagtcgtagcacttcccagaaacggaaaactactccaaacctgcttcttcttcctcggagccacagccgaagccaccgttctccccctcacaaccagtaatctctatagtcagtagttaacagtataccattgctatagtataccattagtatagtataccatagtatattattagtatagcattagtatatgattactatggtatattaatataacaatagtttggagaaaatttaagagggacaggtcgttgataatagcgttgacgacgtgtggagtgggtttatcgaacgtgtttccgctaatcttgggtaagatattcgcgaactacgcgattcgggaggaccggttttacgttgtcatggtcgtgtacaccgtgttaaccaacctcgtctgcctagtcctgggtgctttatttgtccgaaatacgctcccaggtgataaaagaagtaaggccggaagacccgtggtaagattcggcgacgtccaaataattaaaataagttacctgtcagacgagtttgaagatgatcaagaggaagatgaatttgtagaagaagaaggggaagacgaatctatgagtattgatacgaaaaattactacttgagaaagaaccagtcgagtctctcgttagagagtgcaaaggtggataagatgaagctgaggtgggtgaggattaaggattttctcaaatcgagaaagctcctggagctgatcatcttcgtggtttccatgggtttagttttggactctatggagtttttcaacagaattaagaaggtaatcctgagcccaaagggagaaaacgtcagctcgttcgtgagatatttccagtacctgaggtttatcccggcgccgttcgtcggaattatcattgaccgattcgggcccgaagcactcaacttcttcacatacttttgcgtaagtaattaaattattatgttcagatgtttatgtgtctttccctcgctgcaattgattcgtacggggcaaaagtcgcctcaattgtcttttattacctggcctattccagtggaattccaggcatatactcgaagattgtgtacagattctcaaacatgtacgggaccttctgcgggctagtgttctgcttcactgggatcctggcactgtgcaagatccgagtttacaaaatcctactcggtgaacctgataggttcacacagtacgttaagaacacatcactccaactctacatcgtaggtttccagccttaaacacatcttcagatgggaatctgcatagccctgatcatatcaatactcagccataacatcacaaaggagaactaattaacacttcctaatgtctttttccagtacatcaatagtcataccaggattatttagcgaatttagggaataatttagagaatttagggaacaatttagagaataattaggggatagtttagagaataattaggggaattaggggaattgagggaaattgagtaattggggaatccagctacacatggttagattccgtaaatttttgaaaatattttaatgaatgagtgttatgtgcgtaataatggggaaataatgaagtgggaaatgtgagcgaatgtgtaaaatggacacgggtagatagggccaaaaaaggcctaaaatgtatagaagtgtgaataaaataataataaatgtggtgataataaaaaggtgtggaaataatgagaaataactgggcaaatgaactaacgttgtcttgttaacacacaggacaacagagaagcgctgcgggtaaatttgggaaaattaagttaaaatatttcccgaagtacgaacggtctttcaaaggtgccggaatccacttattgtgtaaacaattatacacaaattttccggcacatggttcctcaccttcaccacaaaaattcacacataattttatccacaataaaactgatttttccaacataatcagccttttttcctctaaattgagtgccatagtttaaactgaattaaatactttaattttgtcattttcacacttccaaagttaaactaacatcttccacaaaatttcaagctaaatacctccaattgtaagagaataataatttttattaataactaatttataaaatgaggtataaaaatggaaggttgtgagaattgttataaatccaaaattgtcacctaaaactcctttaaaaatcatttttcgccttccctggacctattattcaacttttttataccttagaataacatttttcataggtaattctacaaatctcacgcgtaattatacatacctatgcggatatactaaatattttcatattatacgtatgaaattttcgtatccggaagattaattaatgtgttggttaatttttacgaatatatgtcactgtaaaataactggtttagccctgttacataaattgttacaccactttttgtgtttaattttagtaatatttgaactattttttacatttaatttcacaaatcttttaacgattttttagcgtttaatttcataaggtttaatatttgcggtttaaaatgcattttgaattttcgcccctttatatattttttttaccccttccaaaacgggaatcttacaggcttatcccgtttcggttttgacatggaaattaactcactgtaacatagacacttgaaataaattctaaataatgaaacaatatgaagaagattctactaaaaagagaagtttggttgttgaagatccgaaaaggttccctccaccttttattaatccctttttaagacttgccatttacatttacatcattcttctcacaggtttatacatgtttacattactatacaaacttatacatacctatattatacatacattactatacaaacctatattataccttatactattactatactataccttatactattactataccttatactattactatactataccttatactattactatactataccttatactattactatactataccttatactattactatattataccttatactattactatacaaacgtatattatacatatataaatagtatagtgtggtaatgtattgtaggtaatttctttttgggatggacgggtttgcaggagcttttgtataaggctggaagttttgaggagttgtgtgatgagtccacttctgaaattgttaaaatcaggtcaactgaaatcataggtaaatctctctccactaacaattgattagactgtccggctaggaagttttgtataaaccagttgtacacaattcagttttctacaaacatttcaatgtgttttctggttggcattttcctcgacaccttcggccaaaagtacactttcgttattggacaacttttatccttcgtatgcgttctcctagtcggaatattcccaaaaaacggtccactactgagggtactattcttcattctcggcggcatcaccgaagccaactacctaccactcaccacaggtacaacattactacacaaatactattaatgttaataatattaatattgatgatgagtagtttcgagatattatccggggaatggtaactttataatgtctttgctgggctctgtgcggtcgttatcgttttttatgacgagtattttatcagctgtgtattacaaacctggtgtgaaaagaggtgctctggtgtatattatattagtttacggattaatttctcacgtagcttcggcgattattggaattttcttagttcagaaggattttttcggggtttctgactctaaaccctcagattccacggaaactctggctgaaattccaagcaaagttgatagtgaaaaggatttactcaagagtttaagagagttccgtatcaagtgggttgaaattgtcaagagtggagttaatcatgaggatttccctcagacgatcatgttcacagtttctgcggcactttacgtggcgtcggttgagttcataagcatgtctcagcgggagattctgaggacgtcgagtgggaaatcagccattggcgtcttcagattcacctcagcactagtgttcatacccggcctattagtaggatacatttctgatacttttggaacacccaaaggactactaatcatgcaagtcagcgtatctcacatatagttgtattatttactatagtattagggtataaatatagtattatagtatagttaattagctccctctaggggtataaagtatagagtatatagttaattagctccctctaggggtatatagttaagtatatagttaactagctccctctaggggtatatagttaagtatatagtaagatagctccctctccccttagatagttaaatagctccctctcggggtatataattctatagttaattagctccctctaggggtataaagttatatagttaattagctccctttaggggtatatagtataagtatgagtatatagtaacagtatataaatatactaatagtacaaatgattatagttgatgttaacgtatgtatgtgtaatgtttgatacgtattggggtaaggtgctgggatgtgttttccacttaacgggtggttcgttgtttttttcaattattttcttctacgggtatgagaatttcccgccggagaggctaggcctggggatagggataatcatgttcgtctgcgggatctttgtgctaattaacataggaatatacaacgccgcgctgaagtatactacacctgataacttcgcaatggtcgcgattgttctactggtaacttttcctagttttaacactggttcaggcgtatctcacagtatcagtggcctcaaactcgggagtaatgtacctcaaaagcagaaaatccagccagaaatcaacgacagttaacttaaatttataattctaatttgatagaaatgagttgtattgtatatattaatttctgtgaattttcaaaaagacgcctaacattttgcctgaaaagttgtggatgcgagtttgactgaaatattgtcagatttgttttaaaaatatttttaatgggtacggaaaaataaaatgagtttaacaatgacccaggaacccacttgctcaaacaatagtcatgggtagcccctgactgccatcaccgttcctggaatcttccatgacaataaaaaagtaaaataaaaagatggagaaagtggaagataaagattataaaaaggacaataaagattataaaaaggacaataaagatgataaaaggggggacaagaaggatgaaatgaaggtaaccactgaaattatagaagataaagccggaggaacactactaaaaggttcagaaattgatgataaatctggaggaacactactaaaaggttcagaaattaataataaacctggaggaacacagctaaatctacaaatcgaggacaactctggagcagcacagctaaacctggaaatcgacgataaacctggaggagcacagctaaatctacaaatcgaggacaattccgagctattggcaaagactgtggaaattaacgagactactgagacaatggataaagttctaaaagaaacagactctaggagtaactttaaaataaaggcaatagaccctaggcaatttacaggaccatacataaacccatggataaggttacttatatatataataatggtatatttcgctggtactttgtatctgggctggacagggtaccagacattactatacaaggcaggtgcctttgaggaatgttgcgtggcagaatctgacataacgagggtcacaattggcagtgatgattatattgactgtggatgtcggaaagcggccttgaataatttatacacaattgccttttcaacgcactttctctcgacttttttaacagggatagtgtttgacctcatagggcctaaatatttgtatatgatatcccagttggttcagatggctacgtggattctaataggctcgtttcccaaaaacggatcagttttaagagtagctttttttctggtaggattaagttccgagtcgtccattatgcccctgatgactatttcttattactttccatattgccaatcactgatcatctcaatcattggagcaacgaggtcactttcatttattaacccaatcctactttcaaaaatcttcgaacttaaaattttcggccgtgggcacctgttccttattaccatcacgtattccattattagtaaccttacgtcatttgtcattggagcattcatagtccagaaacggttctacaaagttgggaaatcaaagcacgggagtaggcccaggtacattacctccgctaacatcacatccggtcatagtttatcgttctttggcaggttcagcagctcacaccttagttcacaccttagttcacatttaacctttgatcaatctgcgagtttcggaaagagaacactgatagacattagaaacaggattatccgcgtgattagccatcgtcaatttgtagaatatgttatcctagtcctggtctcctcactatacctagcctcggtggagtttataagtaagtcccagagggaacttctaatgtgtaccgacggctccagcgccgtagacctcttcaagtatattcacatcttaaccttcgctccctgccctttcatgggatatctcattgatcgattaggaccatcattcgtactcatcattttacactcttgcgtatgttcatacacacaattatatcatagtattattatttagtattattatttagtattattatttagtattattatttagtattattatttagtattattatttagtattattatttagtattattatttagtattattatttactattattatttagtatgattatttagtcaattgtatattgtagtattatactaactgatcatacaagtaaatatttaatgagtttgtttaacgatgttttagtgttttttttattatttttttgtgtcgtttgatttttatattttgaagattatagcttgtgtattttacttgtttgcttgttcaatgtttgtttcgcatatatattgctacgtgacgaagaggtttaacctgaggaacttcgggagactcgtgggattttgtttcttctcggcgggccttttcgtaatactcaacgtccctctgtataacttcatgacgaaccggtcatcgtcgctggacacgcacaatttgaagatagtcacgcgagtgttcataggctacatggcctcagggttcgtcatgtgtctcatattgctatatttcacctctaaaaagaaacgccgcacacacaaacaaatacagtcacagtaacattttaaatttgtcactagcaaataggacagaaattgtctgaaaattgttcaattcacataaatttttcagaatgcagttttatattttgtaaattaaaaaactcaaatttaagtcccgagaattttaaaataatatacactaggattttaaagtgatataactaggattttaaagtgatataactaggattttaaagtgatataactaggattttaaatgaagtaatagataaaagtaatctattttaaaatgtatacgttatttatgtggcgtgcacggttctatttagatcattttatacataaaatgggaaggcggaaaacaaagaaaattaagccttccaagtcttccctggcattaaaaaataggaataaaccgctcagagaattccattgccacttttgccaaaatgatagatccgtatggataaaaatgtaagatttcttcctaattctttatttacttagcttaatttaataattaacatatttttaggcttaaaagtatgtagttaaataataagtgatatggaatgtatatgttttagttctaaaacaactgggacggcaagtttacagtgtagaatatgcggaacccagtctacattttctataactagtctggacgagccgatagatgtttattcctactggatagattcaactagacattcaaatcagacagcgcagaataattcaagagataggcccaggaaagtggcatatcccgaagatactctagacgatgaagataaaactgtagaaaaagacttagacgcaaattactcaaatgataaagatttagatgcaaattactcaaatgataaagaattagataaatcctacgtggaatcaaattatacagtagggaactcagtttctgtcaatcaactgaatcaatctgcagatactgacacccctggttatcccacggatttagtaaattcttttgaaaatattgtaaagcgtagagaagttcgtgttttggatacgcagtattttaaaccaactgatccagctcctttaggctttactgagcctgaatttgtaaatatagaaaacagggacgaaatggtcgattttagcatatttgaacatgagaatgataattattatcaaattgtggatatttccgggaacggaccacaacgaattataccgctggatgattcgtataaccttggtcccagtagttcgtataaccttgattccagtagttcgtataaccttgattccagtagttcgtataaccttgattccagtagttcctataacattggtcccagtagttcgtacaaccttggtcccagtagttcgtataatcccttaggtaatatgggcgtgtatggaggaaatgtatacaaggaagttggagccagaggtgaggggaattttgaaaagtttgattcctcagtgcacaaccttttctcagacgaccagtaaacatcctttaaaaatgataaatttgaattaaatcagtaaatattattttaaaatttttacagtacatttttaactatttttgccccgaattgtgtattccggtgcctatcctagagtatacccagttgtgtatggaaattgagcttagttaacctatcggctcgtaaattttataatttttaagagtattttaattttttgtaaattattttaaattttaagggaaaatggacaaggaaagtgagactgcgttgtctgacgtaaataagctaattaccaagaattataagctaatttctaagatttctagggttcaggggaaacacatggttattgagattgttgagggccagtttaagatgaacgaatttagctgtaacgacctgttaaggaaggttcgagacagttacgacgtctctgactccaagtgcgatggcgctatttcttacagggactgcaagatgatgttgtctgacgtggagtttgtacacaatattgacactcgttttgagtgtattttggtccgcctgttccctctctcttgcataattctgaaaaattcagtcctggtagttgtgaacgagaacatgaagatggatggatttatcaaggatttatgcagaattacgcagttttacagccgttttaacgcagacaacgccaggaatcgcacagtcccaggctctgaaactagtaataactcgtctgagcagtctctagttggaagtgaagaaagccaaaacacctttaattttaagttaccctttgaaatctgcgtactagaatgctgcttcatcaccgctctatcgcatctagaatctggtacttccatatacttattttacacttaactttgttattttatgatactaatataccaactataattcaattacactatttgtatactctacttattgaggataattaagtatatgatagctattgtataagacttgactgtatgtgtataatgaatgtagacttgatagtgtttgaggagaagaataaaatattggaggataaggtatacaataataaaaagttcaaggacatttcaattatattacatgatttgaaacacccggtgtcaaatatgaacgagatgtccaggggatttgaggacctcatcaacgaaattctaaactgcgacgaaaacattaaagtcttagaattcagtaatcacatcctacactacggatccgaaaccatgcgcaacaatctggtaatcatctattcaccacattaaccaatttattatagtattgttatagtattgttatagcattgttatagcattgttatagcattgttatagcattagtatagcattagtatagcattagtatagcattagtatagcattagtatagcattagtatagcattagtatagcattagtatagcattgttatagcattagtatagcattagtatagcattagtatagtagtattgtagtagtattatagcattattatagtatacatgtggttatgtactgttgacactagttattggtagttaaacccttggcggggataatattcctaaaattaatgtaaaatattgtagtcgtatcgccctgtgaaccatgacttgcagtttttgctggagtattttgaccaggagatagaaatggtaagataaaacaagtttaaaaatgtgttagttgtgtaagagagcgaggacactggataattcactggttcatatagaacgctatataaacttggaattggcaatcacaaggaacgaaatgatgcgtttagatgtgatgtgtagcattttgggcgtgtcattcggagttggagcttgtctgtcaggtaataacatacacaatgacagaatttaggcctctttggaatgaatgtgatcaacggattagaacaaagtcgatacgcttttacttctatcacgctagcctttctgtcggtgctatttgtggccatttacgtgaccagggtgctccaagtcaaacatagggtttaatttattgtgttgtattcttgggtcatttataataattattttacgcggaatattataaatctttataaatatttttataaatattgtaaaattccgttttcgtgtttgaaatatggatgttgctatactccatattcttgcacattgctgttaggaccgctgtttttaacctcatttttaattattccgacacatttctattaaactcgagaacaaaaatgattaattcacttaatatcaggtaatttgcctaaattctcctgtcattggtgtttaggaattattttggtggccaaacccgtgagccttccaatgattcctcgcccgaagattccgaaaataccagaacacccgcgaggctattcaattcccagaagaatggtaatttaaaattttttatcaatttttagaaaatctggatgaactgttcacagattcaagtaccaaatttttattattatgaatttcaggtgttcaggaaataaccgagagtgagtttagaaggtcagttatgggagacgcgaagccaaaagatgacaatgagcctactaatgtatctgacccaaaagatgacaatgagaccaaactgacgaaatctgacttaaaagatgataatgagatgaagttgacaagacttgaccagtccgatgtaaaaagtcttttgaagttggaaaagaaggccctcaagaaggaatttgatgatgagcctgcggttggttcactatttaacatttatataaagaaatgtgatagtaacgacgacataacttcttccagatttgacccagcactcttcgacatcactccctacttcccctccaccatgtgcggaaaaccaaacaactccatcctgtatcctttttacccaatttacccagttaacccatttagaaatatttatacacaatagtcaatatttatacacaatagtcaatatttacacataatagtcaatttatatataatagtcaatttatgtagttgtatgatgtgtgtagattttcattggtatcgagtgtgttgcagaagtcggatgacatattttgtaccgggaaagggagtaggaagtcggtgttaacgttgttggcgaatttctaccgagtactcatctactataatccgccagatgtgatcccagtgacttatttgctactaaacaggttcctaattccacctcatcattttatagaatatgccccgaatatgaaaatattgaaattggagttggagactccctaatcatcaagtcaatgtcagaagcctacagcaaatccgaaaaaaacatcaaatcaagtattttaaccactattaccactataccatatactatatactatatactatatacctaaaatattatatatctagagagcctagatattaattactattagttgactatgtacagctgttggtatattagtgtgtaatagtggataataatagtatagatgataataataatgtagtgttgaagaagtatgaggatttgggtttggtggcggctgcgagtagctgcacatctcaattactcttcaagttacctgaaaatacaatttctggcgtttttaatcattttagatcaattgccgcagtcaccgggaaaaactcaaataaccataaaaaggaaatcgtacctctcattaccattatactatttactatatttatatatttggttatatattgttatagttattgtttaaatatggtatggttaaccctattttgcatatataataacctctatctaatttctaaaatttagataaaaaaattgttaataacggcaaaaaaggttgaatcgaagtatataataagatcactgcagcagaggctgagaattggtattggtcttaacacgattttccaagtatttgatctatttgacaattttagatattagacagtatacttagtaaattattttctagtgtattgctgacgcgttttacttgacaaggcctgggactgtcaaccccgtgaaagttggagaaaataccgggaaagcgttaactaagccaattggagatgtgagaactgaggataccccccctaagtacacaattgaagatatggaattctcagtgaagacagcaataacgatgttaccgaacatagagaaggttgtaggacacttacttgataatgataacagtgaacagttggtagaacactgtaagattacacctggaatacctgtaagaccaatgctagcgaaaccagtcaacgatcaagcagagatcctccaagctctcggaggagataacgtcaccttcacttgtgaatacaaatacgatggcgaaagagtacaaattcatcttctcaaagataaatccatcaagtaccaactatactactatatagttaatatagtcaagggtattatatagttaatatagtcaagggtattatatagttaatatattcaagggtattgtatagttaatatagtcaagggtattatatagttaatattatggtattaatattagtaatagtattgataatattggtatatggtattaatttgttattaggttgtttagtagaaatatggagaatttgatggagaagtatcctgatgtggtggaacatttcaaaaagtctataaagccagatttagaagaatgcattatcgattgcgaagtggttccagtagatgatgaaaataagatcctatcattccaatctctgtcaacaaggaaaagaaaagacgttaatcccaacgtattttttactcaaccaacaattatattattatacttatattatctaaataatactaattagtaataattaagtatattactggtgatattaattgtgtatatcttgtgtagaatgtgtcggtgagggtgtgtttgtttctctttgacatattatacttgaacggagaatcattggtgactgaaccgctttcaaagaggagagagcatttgtacaattgtgtgaacaccgtacctgggacagtagtttttgcagaaaacagaaacttccagtcaattgaacatatcgatgatttcttaaaatcagcactacaaggtttgcgttacggtgcttgtaccatcttagttatttattagttatttattagttatttattacttagtacctccagagtatttatctcttactgtttccttagtttttcactacttagctaattagtcatttagggatacatattttattacttatctatactattctatattactaaaatgttgatatagattcttgtgaaggattgatgataaaaaccttggatgataaggcgacgtatgaaccccaggcaagatcaaacaagtggataaagtacaaaaaagattacattacgggtttagctgattctgtcgatttagtccccattggcgctttctttggaaaggtttattctagttaatttgtccgtctggaccattagttatgtatatttttacaataattatacaaactaataccctattgttatgcaattgtatagtgttagttattggaatagttgaatatgagtgtaaatttgtctagggaaagagaataagtgtgtttggatcatatttgttggctgtgtatgatccaatgcaggaagtatatcaggcactttgtaaaactggaacaggctttacggatcaggctctgaaggatttgcacgactcacttcagaaggatattacgaaaactaagccaagtttctacgacgtttcagaaaaaatggtatttttccactaaattacatgtgttaggagccggatgtgtggtttttacctaaaaaagtctgggagtgtaaagccgcagatttgtccctttcaccagtttacactgccgcaaatagattaaacgcaaatgaaaaggtaattattgtgcttttcctatgttaatcttacttttagttactcagtacttcccatacatttattaattaataattgtgtgtgtataattaacaattctatgtttgtgtataattagtaattgtgtttacatataattaacaattgtgtttacatataattaacaattgtgttaggggattggattgaggtttcctagattcttaagggttagagaagataagaaaccagaagaagctaccacaagtgatcaaatttttgacatgtatatgaaccaatttaacaaataatttttcaatccacaaatataccattagtattaccacttataatatttactacagtattaacattgataataatgatgtatccaattgtacatactgttaatagcgctaattatattagtaacagtaagtgccaatggtagtataaatagttgtaaaattaataatagtgttgattataatggtttttatatttattaaagcatttttacacgtgttttttgttaatatatttgtgtggtactaacttaaaattaaaatgaattttttacctcaggggaattagtgaggagaatcccgcgtaaatcattcaaatcggcccagggttcgagtctcgactccatcaccggcccgggtcactattatagaggagaaattttatacataaataaataataaagttaatcagatttaataagattgcttaaaaagtcctgtttaatgacttgaaatcgttcacgagtgggatctaaaaagtgtgatgtgggaataaaataccagtgaaagtaaagtggagaattgatttaaacatgatatcctcctctaaaagagttttttcatctcggatttttctgcggataggaaactcaacaagatgccagtcatccagagaaagctcatcaacgagaatggtctggatgttccttcttatgttttttaccagagattttactggaacttgaattgtaagagtagttgactttggaaacttaattttaacctcaacaacggggcattttttggcaaattcagacttgctctttagcgtttcaagctgtttcttagatctagactcgaagttctcattttttccaatattatacatctataattgagatttcaagagtatttcataaatttatatgtaatcaggagttgaatagtgtttacctttattagggaagatacagtgggcttagatgtatccaagggttcaggttgtaattttttacagggtttcacattagtttcaattgtaattacagggttccaatcttccagctttgactgagattcatccttctcctataaattcagtatataatttgttaagtatataattaacaggttgtaggtattggtttaagataaaagtaggaacttactgaaatttccttaacagtatcgtcaatgatagatttagtttcatccttggaaatgatctcaaaataatcagaattgctaaaaaataatttaaaaatgagtagaagttagtgaaatgaaagaaagaagtaggtaaaataagtagaaaatgagtgaaatataagtgaaatatgaataaagtgtaagtagaaagtaggaataaaatgaaagtaagtagtagttgaaaataagtaaaaaataagtacaaaggggtaaaaactgagtaaaactaaatactaaatcaaagataagttagagctaaattaactgtaattaataatgattagggttaaaagatacgagtaagtattggaattgtgtttataggacttaaaagggtcgaaaaagtgtggttggagtgatttataattcaggttaaaagaactgtgtagtgtgttgattagggaattataagagtaaattagtcgatgaaagtaaacatgttgaagtacgtaaaactcttcaacaataacaaagccaaagaaggtaaacaattcaagaaaaaggtgattattggagatgtattttacaaaaatcttattactcctgcgaatacgcctggtttttagattagtgggatccaataaaacattttccagaattttcagtaaatatagtaaactttccctctctttctcatcctataaaatgattataattggttaaataatggaataatattgacttaataggtagtttaaaaataccttagagatttgttttaatagtttatttaaattatcatcataatcagagtcaacatcctcaaaatattcgatagaattcaccttaaataataaatcggcctcttcatcaggaattgttggtgattccactgacattttacataaattacaattatttattagtttttaccacaatttataacaaaatgaatataaatataaatataaaattgaataaactagaaaattaactgtttttgccagctgccatatattatataaacactatataatagtatcagtataataagtataataatataatagtaatggtatgataaataatacgagtgtatacagtatattataaaattatggcttaagtaatttagaaaattcctttgttatccaaatagtttcagattgtaatttacacaaatcatcagctaaaaattattatagatgtatataaataagaatgagtataacatactgtataatgatcttagaaggtgaataaaatcattattatcctttaatccttgcgaatagtcgtttagaaaattatttagaagtttgccatcctggatttgattgtgtgtgttttcaccagcgtgtttgtggtttaattttaagtaaagttcaagtgctgatttaacttctgatgatttactgtcagaattcagcaatggaaggtcaagttcctccaaaaacaaatttaattgatttattactaatttgtcagattcacgcaagaatgattgatttgtggatgaattagaagatttgtcttccaaatctattataatttaatttataattaatattattttgtgatgatagttaaataataaatgtttgtgtgtgtaataatagtaccacttgaggtgtgattgtaaaggctggaaattgatagatttaacagtttatttagtaaaaataattttttttcgtcagaaaattgatttttatcataaaattcagcaggaagattcaactttaaatcttctgagtactaaaaataaatattgaaaatataggtttacgtttttcagtagtttgttccaatctgagccttttgaagatttaaacttttcaagcttatttccggtgtaatgtttgatttgttcttcttctaattttaataccaattcaccgaatgatgtcgcgtaatcttccggtggatcatatcccaaagttttgagttttttatcaagaattgatttatccattattaatttatatttaaaaaattaatgtaaaaggagaaattgagagatatatatgaaaggatcacaacatactgaaaatattttttcagcacttgcaattttgattatggtgtattagtttatttaaatctataaatttttgtataattagatttattgttctaattttccgatgtgttccttaaattagtatgtaattttagtgtttcaactccacgttcttctattaatccaattttctgtttaaaatgatactaatgtgttaatttatcattaaatatgttagtagaatttgtggttgaattttgtaccctaaaatattttacccactacaccttaccataattaatacacttgtattacactgtgttttacaccctaatattattctattctgaactattactataagctcttgtctgttctctataatatggataaagtatctgtatggaaaccctcagaacatgatctgccacattctgagcttgatgaaattggtaaaaatatctcaaattttaatggaaactatgctaaacggaatttttcaaataaatttaatatggaacccagaactagttctttaaaaaaacttaacaatttggagaacactctaattgaacatatgggaaagagacgatctcataatattaataatcttaatcaatttatttataatactagaaaacgaacgtctacttacaaaatcgttaatgataacaacattctttatgataataataaattacacaatactgatctaaataaacataatatctttaaccaaaataatggaggaatcaatgatatatccgatatggataccactactagtagtactagttatactgatagcactcccattagtgctggcaatactgtggataatttcaataatacgaaggttgtgagtactaatattgtgggtactggtaatacaacaggaaaatctagtaataagaccagtaatgtgagtacttccaatgtgggaaatgtgggagctgagaataaaaataagagtgaaagtgactcaaaatcaatgactaaagctgagtttcaaagaaggatggcagtacttacatcgtggtacaataaattgccaataataatcagtagaaaggataactcaattcaaattcctaaaagggttactgtgctaccgaaagaaaagaacccaattcttattgaaagtgaatatggtctcgatgtcagattcaatttaacaattctaattgatatcttaacttgcccgttatgtaaaggtttattccacaatgcacaaactattagggattgtatgcacactttctgcaaaagctgtctcatattatccacttttgaaagtttcttctacttatccatactacatatagactatccacatatattatatatagtatccatacatattatattacttatatagatgtaataatgattatagatggattggtgtgcccgacgtgtttttcgccgatactttcaagtataaccgagggagtggaaccggatacaaatatacaaacaatagtggataaattgttcccgcactttgctcaaaatgaacagaaactaatagatgaaatgaaagaaagaaaaaagaactataaaattagcctacaagataacaagattagtgatactgtagatactaagattccggatcttatagataataagattagtgaagataataaaattactcaacaagataacaagattatcgtacaagataataagattccggatgttttagatactaagattgttgatactgtagatgataaaaaactatgtgaagttactgagactactattggacaacataaggagattgttgtacaagggagtaagactactaatgaaaaggataaggaaattgctgtacaagttaataaacctactgttgaactggatagtaaaagtattgatcaagataataaggatgtgcatcaacaagatagtaaggatgtgttcgtacaacacagtaaaactactattgaacaggataaggaaattgttgtacaagatagtaaaactactattggacaacataaggagattattgaacaacacagtaaaactactattgaacaggaaaagaattttagtaatatagataataagattagtgaagataataaaggtgttgaacaagatattaaaattgataataataatgcacgtttgataagcagtgaccaaaataagaaaaggagtaataaaacgcctttaataagaattgaagaagaaaagaaaactgaggctagagaggtgattactgaagaaccgaaggaggaaataatgtatcgcaaaactaaaatttcagacccaacagaaactttcttaagggagttaaacaagtgtaaagacttgactaggttttttgaaagtgtgtcatgtctggcattggtccatgtttctgataaccagatgaatggacctttcaatgatataacacagcaaatgggatatttgggggatagattacgcttaaatatgtcaggaagatatccaagaaagtatatctgtgtgcctaaaaggatacgggttatagatattgtgcgttatctggccaacgaactcttgcttggaccgaaatataatgtagtcttcatgctgaagaatctcgtcctccaaaaaacatatactatcgagtttatttttcaaacctttaaaatcgatgcctcaaaatgcgttgttttcagatacgaaattgtacaacacgaaaatagttcataatattacaacaccattacacattctcactatttttttataaataattttataatgactggagtcagtgtttaaatttttaatgttgtataatataatcatatttatgataaataatgtaatatatgaatttttgcccaaatgtgtagattccgtattaattgataggaatcttcataattttaacaaatcaaataaggtcacacttaattatggatatataccagtttttaaacaatttaaatccaaattcatcaactccttaaacaccagtaactcggtttacacagttaataataaaattaacacagtaaaaaatactaatgatgagataaatgaaataattactgaagtagagaagataaatggaagagatttgagtataaatataaaatcagtttctagacttgattacaacaaggattttttattaaacactttcaatttggctaaggaagttgatatgaaggtttctaaaaatagtggtcaagctgattttaacaatttaatatcattttccggagatgatgaagaggaactagtgatgttgagtaaagatgaaatgagtaaaggggaaactatagttaatattcccttaaaatcttgcatatctcttgattcaactattcaagatctcgtgaatagtattaataaatacagctcaagtaatccaaaatttgctaattatttacaatacacttctggattattgcaatttgatagagggaattttattaaatctaacatgaatgataaattgagtggacaagacaaactccaacccacttgtttggatcataaatttagtgaatttgtagcatataaaagaatcttgacattaaaatcactaatactatgtgatttgatattatcaattgataatacaacgaacacttcaaatccttatgaaaggtttaactctgtaaattcatatgaaaaagaattattactactgactatggcacttagttcagagtattttcttaactctatttcacaagtattaaatcgcaacattaggacatcacattctaaattcattgatttgaagaaaaaatggttaaaatggttatttaataaaaaagtatcccatataccgttgatgtttgataaaggatctgtggaacaaatacaggaacctattatacaaaataaaatagtacagagaaaactagctttaactgagttgttctcactatttactgatccattatctgttatcagggataaaatcgaaagtctcactagtggttctattgatttggctggattagaagaatatttattaaataataacataaaacatgaagttttttcagaaaacattttcaaaattagtaaatctgaagttaactatattctcaccaacaccaataatattactgatagtgttaataacgtggatactgttaataccgccaatttacataatgatgtaattgatagaataaatagtatgatgaattttgagagtattttaaatttcttttgtaccataaattcgcatattattaggcctaaaattgataaaactattgataatacacaatactattatatgcttaatactgccagtggtattaactgtcatattgttgattttattaacttcgacgttaatggtgataatgctgtagattccgttaactcagttaatagtgttactgagttgagatgtggttatttagtccctttaatatcattgtgtaatcatagtaattctaaacctaattccgatatttcactcatgtactcagatggagaattatcatttaatttaaaaactaacactgatatatctgctggttctgagattttattcagttatggagattatgacaataatacactattactggattacgggtttgtttctggtgatgagggtgataattgggttttaatgagtttagacaatgatttggtgagagattcagcaaaaaagaacgaagttgatcatttactgccttcaatattccctgaaggtattccaaaggagaaacttgacctaataaaacagttgaatttaattgaagttaatgataaaggtgaccttacagagatatactccgatccttattttgatggaatgccaatagtaaagtatatggaattcaatcaaaggttcatggctaatacgagtgatgtacagtcaaatttatattactcaactaattccaaacaagatcgaacaattcacgttgataaaccagtagattatcctgacaactggattgattattctcaaaacgtcaataatattattaaaatcaattcagatggaatcatcgatcacagattaatactactaatcaaagtaatctttacagtagttaattttaataaactagtttttagtgatattcatacacaattagatagttacacagacatatatatatataactagctgtgtaacaaatttctaattattctaacacacgatattgatatataatgattgatttttggactttagataatattgtgtaaaacgaaaaagaaattggagtggattaaaaaccaaaaccctgaattactttcaaaatcgataaactcaccaattgatgtatttatttattctaaacatattctttacacaattaatactatgtagttaacattagataatatattagtatatagttagtagttatatacttattgttgtaattcttatttttagcataaagcgtttgaagtggtctctagtattccattattatattttgataacaaatatgataaatcactgtttgatgatatttgttctctaaatgtttcaagaggaattttgaagaatttgatgttaacagcacatgcgatgagacgaaaaataccattttacaagtgttcccactattacaggagtatatcatcaaaccctatcaacaccattgatactagaaatggtcccaataaaactggaatagaagttggcacctaatattgacaataaattaacaataaattaaacaaagttaactataattaattctaaattaagggtaagttgggaataaaaaattaatgaataaagtaagtgcgactgaagcgatcggagatgaatttggtgaatttaatggcggaatcacagtctgggggaagcctttcaattaaaaataacttaggtaataagtcacaaccacactgcgaattagtgtttaggttattttgacgcagttttatagcgtttaataccagctgaagtaataagcagtagtccttaataagatcccaatcgtaaatcttattattgtcttctgaaagcctaacgaagttgaagggatgattaaactcctcagagtcttctggtgtgtggtcctcaaagtttaaagttggtgtctctgataaatctgataacccaaacaccacaacgtgttcaatattgtccgaacgatatataatcttatccacattctctatatactcatttatatggtcatagccgtaagttatcacacgatcttcctcctcagaattattgtcagtattaaccttactatcttttttactagtttttagagtattttttgggaggtgcacggtgggagtggaatgtgtattaagagttttggaatgagtgttaaaacgaggtgaagtgttatgtatgggagaggtttcaggggtagttacggttttagaaaatttagagttaaaagattgtttgaaaaaatcatcaattaatttgtcagtatcagtaaaatctttacattcctgatgtaaattcataaattcacatgattttattggtggtttcaataacatttcgagaacgtcgtattcttcgataaaacaacgccttttgtaaatcagtagtagcttcttgttacttttgtagcaacaacagtttaaaatactgttaatcaatttcactgtataatatacacattcagaattaggggcgtcaaataagaaacaagctgaagtgtcattccccttcatattaatttgttaaaattattattatctatttaaatttacgatattttactaccatttttataatacatattttataaaattttttatattgtcggctttataaattttaaaaataactctaaataacccacaactaatataaattaagactaaattatcagtttaaaaaaattaacaacataagaaattctttttttgacgatgtgtaacttttccatcgggcaacggtagggtttggaatctttggttctcaacaaaatcctgtccaccgtaaattacccttggtccgtttttaaactgttcataaggaggctgtgcttgataagcgctgtatctgtaaggtgaaattgaagtgtatactgggattccagcctcgtacatgggatagttatacatatattgcctctccatagggtcaacataacttcctggaatatggtcgccttcaccctgctgaattacatactggtttcctggatacatgttcatttccctctaatacactgttaatacaacatatattatatttaaccacatgatacagtttgaataattagcatgtataaatagtgtagataatgagtaaagtgtgtgttgttaacctcgtcttgcattgtctgataaccgaattgtggattataatgtctttggggatcatctaatttattaagattaagttaataaagttaccaattctttgacttctctcttgatttccattatttcccctaggtactgcgtttttctggtccatattatttactcttcagttacaatagactttgttatatgtattctattctggtttgaaattactaacttgaaaaattaagcaaaaaatattaatttatttaataaattcttttttacatgcaaaagtaccctaatgtgatatttgacacatacaccttaactatattttatactcattataataatataataatactatacataatataattgaggtgtattatacaacaatgtttaagattaggaagctgaattgagtaaatttatgaaccaggaataggttagtactggtattcctgggtatgacccaagacatatggttttgcttttgattgcgggatatattattaaatctgccggatttgtattatctggagttgatccgttatttgaaatgacaaccgtatttaaaataatcttctcgtgaaataaaaaggtttcaacgtcttcaggcgtgatgttaaacttaagaagagactcagctgtggtctcctcaatgtgggccttaatttcagccaaagtgtcaaatgtaaacattgttattccacagtacttgcgatataatacaaaatcctggctagttagttgcgaactattagaatcccgaagcacataaacattccatccccaaaaatactttagatttttataattttctttaaaccttaaactgactgatatattgtctaatggtgaattcatatcaatttcagagtctaaatccatataaccttctccacatacttgataattagtattaagctgtgtaaacccaaacatttgtgagttagtattgaattgtgtaggattaatttgggacgacatgaagtcatttaattcatccattgtgagtctatactgtgaggagttatcatctttgaagtcttgtattgagaaattgtccactgaatactgggtgtaatattcttgtggtaggtgtattaagtactcttgtggtattgagtttatgttcataattccctggaagtaagagtcaaaaatccaagaaatatcaacgaaattcatattaaaactgtttaaataatcagtttttaactcattaaacgatcttatcatcttgacagtactctttgaaaacttgctaaaatcaccctcaatcaatggtacacacactaaattaacctccgttttattagtctacaaatatatatatatactatttttacaatcatctgtgataataaatatataactataatttatgtgttaagtataaaactgatgtcctgggggactaactaaatgaggaactagatagttgataccctgagtttaatgttgtgtaaatcttgaatatcaaaatcagaagagagtatagagtatgaaatgaggtttttggttaaaattttaggtccagttgtgaaatcatctggaaactcatttgctgtaaaaaggctcataaacttaataacgtttgagcgatttaacacatttaaggagaaatcatgataattaaaggtttttgttgaaaacttgatcaggtcagagtttagaacatttcgaattacttttagatttacacactcatccactgaaggatcgttactaaacaacaagaccaatatggtgtgggagtcgagtttccccttactagattttggataattaagtgaattgtcagatgaatccaacaaattataactgttgatattatcaaatttgtcttgaattagatcaaaattacattcatatactcttccctcatttcttgataatgaatacactgttcccaattcaaaactatactctttctcaatactattattcacattgataactgtttttattgtaacagtttgagtagtagtattaactgtatcaagagcgtcaactgtgttgttattatcaggaatagtatcagtagtgttattggtgtttttgtcgcttgaatcagatttcatgccgaaataggtattccagcctgaggaagtttgtaaaatctcttcaacattttgtattttttcactttggtataaattaaagtcaaattttggctcagtcaaatattctaaaaaatccattttgaatgtagttttaaactgcttattaaagttgatgcggttaacaaggtgaacatagtaagactgttgtgacaaaggaaagtttagagactttgaaataacaaattgatatacttctttggtcactttaataggtgtctcctttaaatttaatgcaaataaatcattgtttctcacattctctagggacgtttcgtcccagaaatccatctttccgctacagtgtaacaaatacaacagtatccaaattatgttcaccaagttataaggcaaaatattaacattatacatgtcaacagaattaacagtattaatattattaacactatcaactgtgttattcgtatccactgcattaattgtagtatcagtatgatttgggtataaatccaagtataacttggtattaaaatgtgtttggtttgagtagttgaacgatatagatttgaaggcctcgtctagaaatgactttgtggaacctgtaaacaagtttttagatgcctgaattggccttaaataacacttaattttagataaatttgagtaaagagtttcttttaataggattatatcgggggaagatgacgactcgtaaacagccaattttgttcccttaacacccgaaatgttgtccaaatacaactgtttctcatcctccagatacatctgtttttcattctccagagcttgaatcatcattttttcatctgtaatggagatgtttccattttgtaaagtgaacgttttgaacggaattagtttcttcaaagccttgtaggagtatatgtaatttttcttaatttctaagaagttagctagaaaatggtcgtaaatcttgctatcagaaattctcagcgtttttccaaacatttgatcatcaaatgctaagttgtattttatcctaattgtaggcctgttaattaactcagcactctctagtagctttaaaatgttcaaaaaactcatcaaacttgagggcaaaatcactcctctaataaacattttataaatatcatcggttggagaaagcttaaaatgggcctgatttaccttagagtataaaactgaaaaattgctcaaaataagattaacacatatgatgtcagatctttctccattaactggctgatttaactttacaagagagcttaatgtgttgttttccaggattttaaaaagtttctggcaatttcttctcccaattatcctaatcacattgatgtcgtaatcttctgaaaacggtaacttcagagactttaacaagtatattttactaatcctcttgtcgtcttttttaagctttaatctattaacagtactatttggtgatttggagtattggattggtgtattagttaagtatgaattaatgagctcggaaagctcttcatctttcggtttaaacgaggaagtatctctgtaaaagggttcgatatcgtcgtaaatagttgtgtattggatttcctttgcctttagttcctgtagaaacaatatatttgatctagtaatcagtatttcgttgtgagaaaaaatgcctgaatagtcagacgtaattataacagcctcatttgacgaactgtcacattgatacaactgagataaacaatcccttaaccctgaaatcatctcgtaggcagagttcctactaataggagcggggcctttggaaacatttgacgtatcatcttttgaggtatcttcgtacaatgatatgtaataagccatcgatttagttattaggctttgtaccattggttttatctcttcttctctattcggtgacgccactgagttatcttctaaactgatacttcctatgttatactgtttactgacgacaatagagtggttttcctctttaatactagcgttattctcatattcttcataatttacatcgttatgactgttgaaatagtcaattttggagagtttgactgaagaaaatgtgtaaataaaaacttacgtaaattctcgtcaaaggagtttaacttaatcctaggattcttaagggcgtaaatgagccatcttggaggttttgagggtgaattgtactcgatttcaatccgactgatgatatggcaacagtagggaatagtcattctatcctcattgtgttattattgggacctcaaattagtattaaaaccattttaatttatataagaatttaacaattaaattactagtattttaggagagaattatgtgacaaattaatccaattattgtgtaaattccatttgtgatgttgtttccccttctttatcattctttagtttttttataaattaattcctgtttattattttaatttaataacaatatggtcatttagtgaaagtaattttattttgtaaataaaaataatttaatgtgatgttatgttacacattggtaaaatatatcttgattttgtaatataaatgctttcttccaatattaacagggtaaatggttttaaaaaatgttaccatataattatacgaagaaattttggatatttgactgtttctcctcgttttatgggccaattagtgacaaattcaaaattcccagaaattaatgtaaataacaatggtaatttttacattttacatcatattatttcattattttagttttactgaaagattccaatgattttgcaaactcaaattttgatgccagttcaccgtctgaagtagtaaaatcctatcaacttctgagaagtaaattaaaaggatatgatgacttggaattcttagaaagtttgtccaggaaaaccttgacaaatataacaaaactaaagtagtcagttgaatttaattaaatattgtttagtgctgaggagttggttgatatcactgaaatattatcctctttaaagtacagaaatgtgtttctaatgcatgccataaccgagtctctatactggatgtgtaaacttagaaaagttaaattacaacaaattacaaagtttttaaagttttccattctactcaagtataccctaactctacacaattatatttatcatttctggttaataagttaacataggttcataccgaatgtgagatatttggatgtgttttttaaggaaattgatagtattaaacataaaaaaactgtcggagattacttaagattattacaatttctggtaataccaactaaccactactattactattattcactactattgtgttataggttgatagtgatttatgggtctatgaaagatatataaggttatatttgaagctttacgaacactgtattaataatttgggctttatgccacacagtaatttatcttccttttctcaaattttaatcacaattgacgattccaatgcgtatcactaatatttctcatagtattagtactatagctatatgcttaatatattatatagcttaagattaataatgtgttagggaattgtttgagagaatttgtgttaattttgaaagagaattggagaaatccgaagtaaaacacttgagaatgttgtgtaattctttgataaaatccaagattaaccaactcccaataccatttaatagagtaactttattctaaaatataacatttaggctatgaaatattacttaaactttcgtaaagacgagttcacatcaaatttgtccgttgatactctaaagtaccaaattattattctattatactattgccactagttatatatggttattgttagtatattaatataattttatagtttgtatgtgaagtactattatcgtgacactgaaatattgaataaacttgggaatattattgctgaaaatttatctaactatacatcatcacaggtatatttctcactaattcaacattaattgtagttatcaatcctgttaaacggattttcaacattttcttacaagcataagaaattaattagaggaataactcagtgtataacaggtaactaaaccctaatttatgttggcctaggatctgaaataggcaacccaattgttaatctcaggctaatttcttctctatctaatctcatttcaaagactaaatttcatcacatcggttctatcaactccattaatcgtctttcaacacttcttaccactaataatacttttgatacaattgatgctggtaataagggtagtagtgggaatggtgtggttggtgtgaaatcgggattaaagaggataataacaaccagtgatgtgataaaattgatcccaattccagtacaaaattcagacaactcgactgggaaacataaatcaatccttagaaaattatcacacaatgcttctatacgatgttagcttcccctaactatacttaactatactttgcttaacccttatttgtagaataatttattgtaattatagattattgtagataaattagttgataaggtggaaccaagtgaagtaaaaggaagactgaaatatatccctgaatcaactgatataataaaagttcaaactctttcagagtgtttaggacaattttacgagaaattttttaacggtcttcatcccgcaagtgggagattaaccaggagaaaattgatgtttcaccaactaaatagtagtaatagtggtggtaataatggtagtaataagtttgaggtaaacaagagcttaagtaaagtgtataatgagaaaagatatagtaataattacaacacttcaattaaaagggtcaaatataagatgagatattcaggttcaagatttgtacagccaaccacttactatataaatgaagttaagatattaaaacggttatttttagctcaattaacgctaaaattactcaattccaatcttaaaaatcaagattctggattatttaatggtgtaataggtagtgtgaatgataagtattatgttgatactggtgtgataaataatatacaatgtagtaagttaaagtataaaaccaagtctaaaccgtggaaagaattaagcttatttaagcctgtagaaggtgttattgactacttaactaagaataataagtggatatctgatgaaaaatctagcattcctatcttgaaaagggttcaaaaaagtgaattggagtatctaacgtcaataatttcatcactaagcagaattaactttatttcgtttccacttacaaattcacttttacaaaatatcaataaattctcttttaaaatttgcattaatgatgagtctgataattgccgtttaaggttcttaaattcttttaacacacttttaacgtcagtcaaacccattctgctaactgatcgttcatcaactatattcaactccatcatacaatttctcaagtaaattcatactttattctaccttaattggggttttaatagttatttactcattaaatattgttataagtatagtgtagtattagtttagtattaattatgttttaaatactaattaatacttttatctgggataataagtgatgtaggagtgaagaatttgaaggaagaattaacgagtatttaagaggtaaaaacgttcaaaaaaacactttaaacaagttattacgcaatttatccttcgttactattgtaaaacacatggaacattctaaggtattatttcaaccataccattatttcagtataatttagccttattttacccttaatttagcattgttttacccttagttacccttatgttacatgtgtttagcattgttttagggattagaggagtttaaaatgaacagtttggaaaatatattaatcattatgtataaaataatgaaagcacataacactgttggggatattaaatgtactactgttgataaaggtgataatttggattggttgaataatttatcatatgcattttggctacttaacagtgtggaaaatagtgtaatgaataatatgtgtgaagaagttggtaaaataatggataacgaaattggtaaaataatcgaagaactaagaatacaaaactgtgaaacgagttttatcaaatactacttgaacattatcaataattaccaaatattattaaataatagtaatttaagtgcttgtatggaggagttgatggaaaaatacagggtaaatgagaaaatgataaataacacctcattcagcggatttaaattaaaaaataactcaacttttttccagaaaataatggaaattaatgagataaatcctattccctttcatggtgatacccaactccataattttttctattattactgtgattagattaattttttaatttttaatgtatatgtaattattttaaattaatttatgttatgaattacgtatcaccttcagatggatggaaaaacgccaagtctgaccctttgaaccctgatgatgactcgaaaaactctcttcccaaagttaaaatagttaaaataacccataggggtagagaagcgcccataagatatgtattccatgagattttaaggatattagcaaagcacaagaaacccttacatttcctagaactagaaaaggctttaagaaatataggatttgaggtattaaaatcacagtactcattttacactttattataccactgttactattaatactgtagtattattataccattatacattatcagaactactatactcatttcttgataacttaaaatatattagggagtgaatatatctacgaataaagaattgcttgatttactgaggaataatgatttgatagaatttaataatacaactaagcgcttgttatataaggacaggtatgaatcgatagtgtctcgtgaaactcttcattcttttattgttaatgctggctgtaagggcctagtggttgaccctgaactacttgctactaatccgttggtttttaactggataaatgatcttttaaaatatcgcaaaattagggttgtacggcctaatttatcgaatattaaaggtacttctttgtgtccctccaattttttgtacaattccttatacacctagttattacatactatgatttctgttgtcacgagttaacacttttaccacataaatcaatttgccaaccaaataacactttttacattaattgtgtgtacattagctgtatagttaactacacattactgtgttataatgctgttataaatttataggtaaaaagaggtgtcgttttgctgggtctgtgagccagtgtggaatatacagttcttcaaagtgccaggagtgtcacagtaacttggagggcttagtcctgttcccacttggtaaggatcagttcgaacgagaccgatttaagatcgaccatgatgtcaaaaatctctgggacgcagtatattcttacattagtccatatgcgatatttatttatactgttacactagttatgtagttatatatagttatatatagttatatatacttgaatattactggggattaactgttttattaggttgtgataccttcaacagatcagttattacgtgaatataacatcacgcaaacaatatttccatttcaactactcgaaacgtatattctaccatacgattttttacactagttatatatatttaactattccttgcactagttatatatatatttaactattccatacactaattatatgtgattgtagttaatacattagtaactctataaaatgttatagtgataagaagaagcgtaaagacactaaagggtatgatgttaattgtttaatttgtttagatttaaggttaaaatgcgtaaaatatacaatacgcatctgtttactcctcaggaacttaggggaattagtcttcaagaagattgatatattttaattttaatccaatacactgcatataatatgcctaatgtactcactatagtaaactattactatagttataattaaatttggtattaaacacttaagtacaacatgatgctataaatggcagtataccctatgtaatatacacgtatgtaaataaccaggagtaggattaaattagaccattaaattactatattacactaatatcacactaatgtataaatatatgtagataatatagtatattacactatattaaaacgatttaatttgaaatattataaatttggacaaaaattaatgtcacgaaaaacttaacaaatgctatagtatggatagaagatcgtcggcctctttgggaccttgggaccctcttggatataaaaacggctcaattttcttttctgcgatttcatgcaaaactggcgtgaatattctccacgcctcattaacctgctgtatagtggggaataaatcccttttatttgaaaatgcattaaaaaataacaattcataggcgccttcaattgtgcgtttagctgctgaggactcaacgtcaaccaggatcttctcctcagtattgaatatcttctcattttcaaaatcgtaagagaacggatcattgaaatctcggacctttacctcagtgcagtcttttctccaaaacactgacggcacgggctgaattcgatacacaagatgtgttggggtgaattcatagcaagtatctactggcggatcacgttttaacgaaagtctaatctccacaagcttgtcatcaagtcccttgcccgacgttatcacaaatggcacacctctccagtactcattatctatccaaagcactactgtgcagtatgtagcacatagagagtccttcggcacacctttttcatccctgtaactacagcccttttcactctcgccatattgtcctattactaaatcgtcgagtgtcactgttctaacacatttaagggtagtgtacttattttggtgtaaatacttcttattaggacactgcatcgcaatcagtgacaacaactgcattccgtgattctgtatcatatcccttatgatgccgtacgactcaaagtattctcttccaaaggacccgatttcctccttcagtagtatgtgaacgctcttaatgtatctgcggttaaaaatgcgcgcataattgctcccgattttagttgataaaatacagcccaccaccggctttcccaggtagtggtccaccaaaaacgcctcatcgggagcaacatgcttgttcagaaacctgtcaatctcctcacatgactgcaaatctcttccaaacggcttctccaacatgactctgaaccagccattctcaggcttacaacacgacgtcacaactcttaatatgttctggtaagcctctgacggtgttgctaggtataccatcctgtgagacgtttctgagttatgttcaatctcacgcaacgtcttcttaaaacgttcaaaaaaactcgagtcatcgtacctcaaacatctacatcatattacaatggtatataatggtataactatatactagttaaaatatgttaattatagttaagtatggataatttggggtaaaattaggtatcaaattaacactaaaataccaatacactattattaattacactaatcacaataaatatacgataatactgtgatataactaatattataataactacaatactattacagtattagtatactatacaactagtacttataatactattaataatacaattgtgaatataaatagtattcttacattcttgagcatcgacttttaaattctgtgatgactgatgggaaatcaaaccgtactgcggggttcctcatgaagatgttagtggtgattgacgagaaaatgtcgtttgagatttgtgagaagaactcttcaaagtcgcagtgtgatctcgagattgctagaatgtgaaacttgtttggtaaaaaccctagataaaacaaatgaaaaagcgctggataaatcttcctgcgtgcaagatcacctccgctgccaaatagaataaaagttaaaaagtcattttggtcaattggaaccttaatacgtactttcctaatcgttgaagaatccagaacagctatgcagcctggcttcgtaaagatctgtgtggctggaaatcggatcggatcgtaatgtttatactctagcattgtgttccaaatcctcttcttccgttcacctttcaaaaagaacaacttagtacgggcacatgaaaggaatggtagagaacatgaaattcgctccctaactacagttgtctcagtataagttgccatcactcggtgcaaagagtcagtcacgtaagctgagtctaatgttgataaatactctgggaacagccctgctatgtggaaatcttctcctattcccaacgtcaccaaatcaggcactgatgagtactttggcttataatacgaatggtcgaatgattcaaattctgtgctcaccatctcacctttgcctactaaatttcctaaatcaggggtaaataaatatattacgatacataactagttaaataaaagttaaacataagaagtgctaagtgcgtataactaagtcacggggatgggataaaggtacctccaggatacggctctttagtggaattagggtgagtggtaacaacaccaaaaatttcctctaaatcggcttcatactttttaatacattcttccaagggaagagaagtgtctgggaatattaaattagactcgggaatcggccagtgttttagcagagtatttctcaagagtctaagattagacatttcgtcatctgagggcacgtaacgttcgtccactaaaaaaaatattatacggttaaagtcgaggtccaaatccttcatacttcccagaaaacggtaaatccctctgggagtgtgtccacctgaaaggccgatttttacagtagtgtcaggcgacttcgccaacttcctcctaatcttgtgcaaaatcaagtgagaggccgttaaaacaaatccttcctcagtgtgacaatccaagaggcaaggctcaaacaacacatcgtcatattcatcaaaaacctcaccatttgcattcagaactgtaaccaacattagacaagttgtgggtatgttagcaaagaggtattatatacttaactatactaactacaaataatcataaatagtgataaatagtaaaatttggtttaaaataaatgaattaagtataaagtaataataagttaatcctaaatagacaaatttatagcttaataatactgaattaatagtagaattaagacacaataatcctcatgagtctaactaaggctaaatagcttgaattttatctaaaatcagagcaaatagtttaagaacagtggaaatacccactgtgaagcatactatgcgaagtgttttgaaagtcaagaaaatcattaattttagacgaataaaaagacttgagccagctgttgtagtcggagcaaatattggaattaatggtcgaaaatgaggcataagagtccatcgtcgacaatgtcttaaaaacgcgcttgtaaagcttctcgggaactgattcttcaaagcttaaaaccttctcagttttcatctatccattaattatggacaaggctaacaaattttacaaaaattatttcaaattcagcaatttgaaaatattatcaaaattaatgattaatttgaaaattagttgaaatttggtttaaaaaaagaatatatcaaaaggttgaaaatgtttaaaagtaacaaaaaggttgaagaaagacaagacagtgaaagtaatgtacaaaaacgagcgttagaaagaattattatagagtctacatgagacagaataaaggtgataaaaggaatttaatagggacagagtcgacatcctataaaaccctaaatgaagcaatttaagactatttgaactgataaataagtttatttatttacaaaataattaaaacaaataaaacaatgacaaacaaggcgttaaatacaaattaaacgaataaaaataaaatagacgaatgacatacaatattgggaattttttaataaatcattcagacagtttataatatcatcgataaattaaattgccactaaattaagtgtcattttgttatttttatcgtaaaattgtctttatatcattttcttatagtagaatcttatactaatattcctagccagtttaatatcctcttattcttcgaattttatataataatttttatataatacccttttaaaaaattgttacaatttttataattattttctccttttcatcttgtttcaatataacacctgtattaaaatactttacacctatttacttacctgtctgccaataacagtagttgtatatagttaaatgtgtttcttcattagttaatttttttctaatagcttcacgtttttacctctaatatagttaacgctgttgtcggaagttcattccatcaatagttatataaagagaagtaattatgtagacactgtaatggtagaaattgggtagattgtgtgaaagagttatgagattagtcaactttggtgtttttgagtatgaatttagcgggatgttcggaattatcgtcggttttgtaggcgatccaagcatacagaagagtcaatccgatcaccattgccactgaagtagtgacaccagtcaacatagacaaagttggtccaagtccgaagaagcgggcgagtggtggaagtaacagcattgctgaagttggaagggcaaacatcaaaaaagaaaaacctcccacaagcttccccttgtgaaggtccggtcttctgatcaagctctttaacatctcttatacttttctttaaaattgtggaatattatgtgtattttattaaaaattagaaaattcaaattactcaaacctggttaaaataaaggacaaactaatcgataacaattgaattaaaatgaaatttaaataaaataatgttaaattagcttaaaattaaaatgtcccttaataatgtgtaataatattcagttaggcaatatactggggattcctaaacatttactctataatttgttaaaataattgacttttaacatttatttccaatgccattgtttttttaactttatttacaatgtttaattattttactaaaaatataccatatatagtcaggtaaattatagttaagtattagaaaataattaaatgagagattgtaaaaggttagaaatggtgctttcgaagttattatctgagttgaatgggtccggattgtccttgaaataaatttctttaatcctgtttagtaagtgtgggtattcactgtcaagttcaatcaaatccttgtaggtctcgcaagcttccttgaatagttcaaagttcctgatctcacagctctcactcaatacgttcccaaattggattggtatcggtaactaatcatattttcaagcaaaccactaatgtggtaactatatacaactaatactattatataacaactttgatagtgttaactcttgacaacagaatttataactacataactatgttaactttaatttaagtcccccgatgggtgtacaagctccgtaacggaatacctcatgatcttctaaattataatctaataaatataaaaaacactttgcattacagacatcaccaacagccaatagcataagaacagctcttaagtaaaagaaatcaccgtcatcctcgtcactttcagccttccactcattaacaaccttcagtaaaagctcaacatcttgagaatatatcaaattaccctgggccttactgtactcatttacgtgaaagtaatacacgcctaaaaccctgtgcaaaataggattaccattaggctcctccacactcttactatataatatcgccctattcatatattttacatacaatagcattatctcctccaatttattcttatcaataatattattggtgttttcattagtacttttagggctagcagtattggtatccacattattagcaccactattattagtgttagagtatgtaatgtgtgaataggggaattgaaaaactgtaacgagttggtttacgatattggtattgagaggaatgttataagtctcacaaagtttcgtatattcatccattaattcaccagccaatatatactctttttcatctaatacatatacacaaaatttatagtattaactttagtagtttaactgaataaatagtaattaaatcttaaactactctagaatataaatgaataaaatgtagtagttatagtattaccaagataaatgagtgaatatttgtataaaatttcaagagattcgtcatatttctttcgcatagcaagcctaaatccattattacaccataatatacattattatacatgatatatactaattatataactattagtatagtaataatattgtataaatcagtagtaataccgtttaatgagtgtaagaatgtgttgcatggattcgtagaattttttctccttaatttcggagtcaattctggccaaaaaagtatcattgctcaacatattaacacaattactaataataataatataaaagtgctaattataattggtaatagtaggtgaatggggaattgtatatacacttaagattccagatcatttttatcgttttctgttccaattttatatcaacagtgttattattttaataaatattttttcttttttaacaatgtttttggtaggtgtttttagacaaaattttattctccgattgtttaacttagatttatcatttcataagctttcaagttaatttcactattttctcgattaatttcttcaaaacaccatttgtaattttgtattgataaaatccataaatcttagttgaaatggatgatagagttagaataactgtattaggagctggttgtgaagttggtagatcatgtgtatatgttgaacgtgagaattcatgtttaatgtttgactgtggtttacacccggctctttcaggtgttggagctcttcctgtgtttgaagctgttgatatttcgaaggttcaagtgtgtttggtgactcactttcatcttgaccactgtggcgcagttccttacctcctcagcaagaccaaattcaacggtagaattctcatgactccagcaaccaaatccatttgccacttactttggactgattacgcgagaatggaacaattattaaccgtaaaaactatttttaatggtatcatactatattttgtagggatatttagctattattagctatttataactatagtaataagtgtgttaaaattgatagtccttgacaacagaatatagtactagtaacaacaaatcatactattgtacgaatattagtattataattatatagttagacattgacgtgtatgtacagatgatgatgagagtatggatgaattggtatgtggttctgggttatattcatttgaggatgttgagcatgccttggaccggattgaaacgatagattttcatcaggagattaccgttaatgacatgaagatatcgtgttacagagctggccatgtgcttggtgcttgtatgttcttgattgagattggtggtgttcgtattctgtacactggtgactattctatggaaaaggatagacacttgcccagtgctgaaatccctctcactaatgtccacttgttaatatctgagagtacttatgggattcgtgtccacgaggaacgaagtcagagagaaatgcggtttcttcatgttgttatggacataataatgcgtaatgggaagtgtcttttaccagtttttgcacttggaagatcacaggaaattttactaattcttgacgattactgggaaaataacaaacaattacataatgtgcccattttttatatctcaccccttgcttcgaaatcgttaaaagtttatgaaacttttgtaggacagtgtggtgaatatattaaacaagtacgtcgcggttattgtactctattgaggacttaattattcatacagagttatattcgaccggggttatttatatattaactaccttggacttagttttccaaattatttacattatttatttactaatataattaatcctgttttaactagtagtcattttttaatgctagttataacattttagagtgtgtataatggatttaatcctttcaattttaagtttgtaagatacgcgagatcaattaaacaaattcgtaactatctattacgcgacggtattacttaatcactcggatactagtcatatacttatccacttttaacaccagttataaatagttaaataactcttaccaggtggtataaaactattataggaccttgtataataatgacatctcctggtatgttacagggagggccatcacttgaggtgtttgagcttttgtgtcctgataaccgtaatggtgttgtgcttacaggttatgctgttaaaggaactctggctgatgaacttaaaaaagatccagaacttattaatttaggaactaaagttattaaggtatgacgttaccgtggttgcacacactaacttagttatattcctcagtgaccaccagttttagttatccattacttagttatatatagtatactattaattgatccctaacgggtatattatataacttttgagaaaatgtgtagccaagatgtagtgttgagcagatatcatttagtgctcacgctgactataatcaaaccaagggctttataaagaaattatccgttccaaatgtcattttagttcatggtgaacgtaatgaaatgaaacgtatgaaagataaattagaggtattactatgttttacaaggtcatttagttattttgttcctcctttacactagttatttatttttatctaggtatcccgtgttgggattcagaaaatgtaataggaggatataccacaattaacggtatttatgcctgaagtattacaagaagttacattgacatttactcctcaatgttttatcgataccattggatcactctcatcagacttacaacttttagattccactactcttggtggtgtttttagtgttttagacggtaataaagaaattgatgaggtagtttcagcggtgcttttgaaggataaagatgaacgtattatttatagtgacgatgttaaagagtttgataatctgtcaataaacgctttgaatcaaaaaatgttttttacattccctcacaaattggaatacttggtaaaagctctcaaatcggtttataataaagttgagttaatatctgaaaatgaagccaatgttctagatcaagttaaactatataaaccaaataatcagttactactcacatgggaggtaattcatttactcagtcatatatagataattatatttatggttaattacctctgaatgagttataactccattgaaaatgttgcagtctggaccagtatcagattttatagcggatagtataattttaatggtgatcaagttagtgacgagtaatgatagtgtaatggaagaagtaaaagtaaatagttctatgaacattgaggaatcttttttaaagtttacagaaatacaattgttacaaaagtttggaacctccctggaaaaggatgataggattttaaagtataagttgaaagatgatgaattaaaagaggtttatttaacaattaatctgggattaagagaggtatcacattacggatcttggtattcccctagcgtgtcctattttcattgttatttcctatttaccaattctaatcaatcatataataccactaacgtggataatggataatggtataggtaatgtctgaagatgaaaagataaaaagaaacataatggatattattaaccattgtaaacaacacactacgtccaatcatattttaatataactaatttattctccattttagtctaatttactccttatttggtgtattcaatgttaatttggataatttatattttcgcaaactttatattataaaagaaatttatatttaaaaagttgataattaaaggatgtgatgctaaagttataatatggaaaaaagataatagtgtggtgagtggaataataagttgttcaaatgacaatcttagaactgtatttaatttaaaattttaaatattctaaactgttttagtgttattaatttaaataaatttctgaaattatgatgattggaagtgggttttggatttacctcttttctgcccttacttggtccatatattcttatactatggacctttctaagatttctaacactggaaatgacctttggactttcctttgtgactttccaacactttcttcaggttcagaagaacttctcattccaccttattatttctcattagagtctggaggtactacttactcactactaccaatcattaccattatcattaccattatcattatcattattattatcattaccttattaccaaactttaagcattcagttagttgtatacactaatatgtccaatccttagttaccatttaacactcaatgtattgcttaaatacagctacacagttatgtgcagtcattattgtatttatctggaaattaggtcgattacacggatatgttaaaatcgcagctattgaagacattgaagatgatttagttatttcaaatattcctcagaacaacaatagcactatccatagtaatacctacaacactctttactctgataattttcacaacaccactgataccatgaataatgataacagtcatacttcaactatcaccactactcataattcagttgacactgtatcactagacaacatgttacaatttaacagacttaagattaagactaaacctctgctctccattagtttgagaaaccgaaacatgactaacacctctaccaacaccttcactgaccatatctcacttctacacctctttcgaaccatatttcattccatcaaacatctcaaaactgacaataatatggatatttcagttactgctactaaaaccactactactaccaagaccaacactatgactaataatactcctaatgctctaagtgacaacctaaatctaacgtctgcatacactaacaccactaacaataactctactaatattttatcacataacactaacaccaatgctaccttggaagacgattcatttattgataatgtatacttgatattattttcacattctcaatggcagttatacctatctaatggtccttacgagactgttcagccatctcgtaactcaagaggttatgtttactacagtagtgccatgtctaagctaagagttccaatcactaaggtttcagatactatcacatttcaattcgtttccgatcaaccagatcgttacattctgctcctacttaatcctgatcaacgtaagatgactcttgaaggctatgtcagatttgagaatccaacctctcataacctacccctggaattgaaacaccactttcacatcttagccacgtggttcttcgtttacctaatctcgtttgttatttcttctatttacctccatctgtacgtacaatctgcctctaaggctaactactgtctatcacttaactacctgctctacacttcctttctcattttagacctggtcattatttactttgtccgtttgactgataggattcccaggtacatttgggccatcagtcacatcttcaagcgtcttcacgagatctacatcttgactctgctagtggtgctatctcttggttggaaggttctcagagacaccttaagctctcttgaatttcagctgataagttcaataaccttgatttgtatcctaatgggccttgttgaagttgctgtaagtggttttgacattagccgatatctggttcatgctattgcctgcatatgcatactgatggccactaacttcaacattgtcttaataaacaccaggattgcagatgaaggtctgactcctcaagcagccgtagcctatcagcatatgaagttattctctaacttccgtattctcttctttgtccacatgttcaaaccagccattttctcactcattaggtttgtccttcagcctactctagaccaagtgattatttgggatcagcacttgaatctcttcattgacctatcattcgatttcactgtttataccttactgtttcttaatttcctccaaactgataagggattattcaatcacattcttcaaaactccagtgactagttatgaaactatactggatcatctgaactcctttgttatagtttaagtggattacttctacgagattaatgggtaattttaatttatgtttaattaattgaaactaataatctatttaatattaataatatatataaaatgattagactccagttacaattggttagatctgaatcaagtgctaatttactttaagtttattgttctataagtcatttgaatcggatgaaattgaatcgttcataaataaattagcacctaatgtaattgtacaatgataatttgctattagattaaaattccgacttccacagtttatcacaagagttcttaaacggtaacatatattaatactattatcaatttcaatacaatttactttgttttgacataatttaaataactggctaattaaagattctcttggtgatctccctgctgttcagctatttcaattcccagctttagttactccaggtttttcatcatgttttgcgtcttctactaagtcgtaaacaccatcaggtttaagaaccttcaattcaccagttacgttatcctataatgaaacttgtgactcataaacatacttttgaggaatcccaatggctaagactgtcctatatcagttctttatctgaaaatccaactatcctttcatcatttcatgttattctgccttaagattatcatcagtgtttcgtaagaaacttgactttaaagtggaaacttagttccaagtctgtttaagagtgataaagaacaaaaaaggatatgaagatcaagtacctagttatgtcctcaacgtaaaaccttaacaaacagttccttatctttaaaagattatcatcaaaaccattaaacttattctgacatgagtctaatacattcctatacattgttcaacagcaaacaactgaataccctaatatatcattaatgatatcaagtgtaaatatgaaataactaatatgatgacacattcaatgatccaagaatagaagatgtaacaaatagataagaaattggactagttcattatgatgaagatcaagaagtaaatcacaaggtaatggatgtaaaaggttaccaaaattttttagtatttagttcgtataaattactttttctatagtcatccatttctttgttccacttgagataatattagtatggatattccaaattgtaaccttgttgtaatgatgatactttaatgtttgatgatgaactttaatgtttgatgatgaagtttaatgtttgatgatgaagtttaatgtttgttcttatggatactatgacttaaataatatttctgtaccatactaattaacatcgcagtcacttacaactagttcctaattgctgtagtccaagagcactcaaaccataagtgactccaaaagttcttaaggactagctatctgtactactactgtcactactactcataccactactactactcataccactaccactaccactatgtctgaagttaaaggatgggctgcagcttgtggtgtgctgtctgcagtcctgggtgtagttctggtagcctttatgaacagactgtcctcagggtggctcaaaaccctactactcctactatcagtcctggtcatagccctcatggtcctcattgtagttgatgctgtccaaaaacctgatcaaggtcacgatggcaccagctgtcctcagcgtaaggagtttggtgacaatcctaagtgtcctctgcttatggccgcatttccattggccggatttgccatgatgctcaatattagactatgttattctacagctccatatgccctcatgaggttcaggttaccagaaaacctattcagtgtctttgtcagaagaatggcaacgtcactggagatctggtgtctgccaggcttcgtcattggtgacgcactggaccacgccgttcaagctgaagccacaattaagaaagactccgacagccagggcactggcaacccagagtttaagcggtggaagctctatgctatcatttggccatccattcttgctcaatggcttaatttcttatcttacgttatattgttgttagtctatgtgccaggagaacaaggtcatctcactaccttttactacgtgatagcagtttcaggctttgtctttggtatctctaatcctttggtatttgcttgtgacactagctacctgcccatatacatagctggagaaaattcatttccagtcctaacatcattcatccactaccttggaaccctcctatttggcaacagaaggaagtggaacagtgacttcataatagtctacatagacatatgggttgccatcctaatatcccttgtagctgctgttctgtggacagtaggatacctgatcttagaacttactgaaactgcaactcaggatcccagtgagatgcaacacattcatccatttacgtttggtgctgctaatgctagcttcgatcaactttcaccagtcctcatgatcattgttggaatgggtcttgtttacatggtatatccagctatagctcctggtctcattgtgccattttacctcgttgataagattgagatggtactccttatagccacattctttccaccagtcattcaggccgtcctaatcaaacacaaaggtgagtggtcagttaaatactacgaataccctagtttccagaggtggtcacaatatggtgctggcaatttttatcatttccttgttacactagctccacttcaaatctgtctagctatcatatttgtttactcacttcatcacagagaatccaatgttgccagatccatcatcaaccaacctaagatgtctacattcctgaccattctattctatatgtgtcatgagtgtatgttagctttaggattcagtggattcataggtaataaaggaggtgacctgattttgataccccaatacataggtgctctaataatgatctttggagcaatgtactctgaaggctacattattgagtataagaaacatgatcctaaaaattggcctacagcaggaatgactggctggaatgcctttaagtactgggccaaaatgggatccaagaactgcaaccacaacctaaagcatctgtttaccaaggatctacggagagacctgttactgtgcatagaaagaaatgagctgatataacactaggaatagtaatgaaatataatgtaatagaaagaaatgagctgatataatataacactaggaatagtaatgaaatgtaatcctaatatagctaatctaataaatgctaatctgataccaagtgagatatgtgatagatactgaataagtaataaaaaacaggtagatagtacaggtagatagttataataagagactactaataaactaataagagactataagagactactagcaaccactaataagagactaataagagactactgagagactactagaagactataagatactaataataaggatagtggtggatagtacctaattgctgtagtccaagagcactctaaccataagtgactccaaagttcttaaggagttcttgaggactagctatctgttactaccactaccaccactaccactactactcatactgacctgtgaccacaatgaccgatactggaactgctaaagcttgtggtgtcctgtctgctggcctgggtgttgttctggtagctttgatgaacagactgtccaagttctggctcataacactcctactcctactctcagtactggttatagccctcataactctcatcgtagtagatgctgtccaaaaacctgatcaagatcactctgatgccaccaactgtcctaagcgtaagaagtttggtgacaatcctaagtgtcctctgcttatggccgcatttccattggccggatttgccatgatgctcaatattagactatgttattctacagctccatatgccctcatgaggttcaggttaccagaaaacctattcagtgtctttgtcagaagaatggcaacgtcactggagatctggtgtctgccaggcttcgtcattggtgacgcactggatcacattgttcaagctgaagccacaattaagaaagactccgacagccagggcactggcaacccagagtttaagcggtggaagctctatgctatcatttggccatccattcttgctcaatggcttaatttcttatcttacgttatattgttgttagtctatgtgccaggagaacaaggtcatctcactaccttttactacgtgatagcagtttcaggctttgtctttggtatctctaatccattggtatttgcctgtgacactagctacctgcccatctacatagctggagaaaattgttttccagtaatgacttcactaatacactaccttggaaccctcctattcggcaacagaaggaagtggaacagcgacttcatcatagtctacatagacctagtggttgccatcataatatcccttgtggctgctgttctgtggacagtaggatacctgatcttagaacttactgaaactgcaactcaggatcccagtgagatgaaacacattcatccatttacgtttggttctgaaaatcctagcggcgatcaactttcaccagtcctgatgatcattgtaggtatgggtcttgtttacatggtatatcctgctatagctccaggaatgattgttccattttacctcgttgacaagattgagatgtttattcttatcgccagcatagttccaccagtcattcaggccatcctaatcaaacacaaaagtgagtggtcagttaaatactacaaatacaacagcggtggtttccagaagtggtcacaatatggtgctggcaatttttatcatttccttgttacactagctccacttcaaatctgtctagctattatatttgtttattcacttcatcacagagagtccaatgttgccagatccatcatcaaccaacccaagatgtctacattcctgaccattctattctatatgtgtcatgagtgtatgttagcattaggattcagtggattcataggtaataaaggaggtgacctgattttgataccccaatacataggtgctctaataatgatatttggagcaatgtactctgaaggctacattattgagtataataagttgtagtgttagttttatatcatcaggattattatgtatattagtatcagttggtactaattatattcgttgtacttattaggtatgacttaacaactaagttaaggattatatgatagtgaatcaattattcttgaattttgggaacataatcactgatgttttggatcaagtcttgagatattgtttttcaagttgaggtgtgtttgacaggttaatgaatagttaaagttttcgtgggactttggaggttgagtaaagttttagaactatgtcggtagatctgaataagatacgtggtgttcttaatatcataaatagtggcatgagtaatatataggacaaaaaactgtaaataaattaaagagttacataatattaaaacaataaaaacacaaaaccaacctgaaatcactaattaataagaaaatcattactgtttaatgaaaaacaaaagccaaataatccttgaacaaatcacactctaaacgcattcttctacttaacagttaaaagcttaatacatgtaaaggtattatccttataatacaaggcattaagtatccaaaccattgagacagttaacttggtattatttcctattaactagaattatacaatatatcatactattaatggtagttatattaatatgcgcgtgtaaaaaaacaataaagtgtaaaatcgatttaaagtataaagtgtttgatatacaatctcaggaaaatagaaccattaaacggaaacctaaaaaataagtttaaaattttatacttgagtacccacataaggtaattttatgttagctaagtgttaatatagtacattcaagcgttaatattgtataattccataataggtggtgtatagattatataacaataagtttgttagtatggtgtcaagattctcgtcatttgggaaattaatatgtaacattgtacaaattacattatttttaatttataccattacattgaccaatattagaagataaactaagttatatcaataagtcgataatcacaaacgattgtttttagttgaatgttgtcgaaaatttatataaatatggtaatggaatcttgtggtatccacacattgtgtatagataaattccccatgttatttattctcgattttatttcatagagttatttcttataaatatttacaaattcaaaatgtctagtggcttattaaccactcttaaatatggcttgcttactctaggttcttcttacacatattttactaacctacatcttcttccaccactctatacatcttttccttacctattaactataccataccataagtagtaaattactttctcttttttgtcactaattaacacattttaagaattattattagtttgtatactatatgattaactaccattagaattatatataggaggattatcgacatttgctccatatttgaatagacgtttgagagtaaatccttcactactaaggccactactcaacatgtcttgggggtatctttttggctcacatctctgggaactcttgtcaaattcacttcaatccaaacgtatataaccctttacactactatactatatcatcaattataacaatcctcttataacgatttaacttttatatagtacttggtttcgtttttaaattataaagtattaataatattatagataatgaaagaactggcgataaaaaaggtaattttcacttaatttttcaatttattatatttaatataatttataatacgaataatagtgtatagtaatattagtttgattgtacgacattgaatatagttgaggtactggaatcggatgttttttttttattggcaatattgggtaacagtttggtgttgataacaacgtttggcttagctccttcttttaagaagttacagtggtgtgcatacggatctctgctctctactttgaccaactacttcctcgtctatccaaacttgaacggaaattctgaattgtttatcttcagaatggtaaaaccgaagactctatcaagactattactcttaactacactttcaacattattgctctacactgtttcttaatctttcccaacacacacattatactactatatttctatgccattatatatatcattacacttatccatgtaaataccatagtaataatataatatgtaaattgtattagattaaaaaataagtggaaaataaggtaaattgagttgatttgaataaggtattccaaaaatattattatggtgttttattggtaataaagtttgtgtgcgtttcttgtaggaataaatattgtgtaaacatttccaaccaatttataccaataattattttaaatattttaaattaataataggattccgacagcaaaatggtaaaatgggataactaagacaatttgaaattatcgggattccatggatattcgtctctttttcgccaaagttaactcttccaattctaattctactagtactactacgaatactaatgatactagtaatactaaggcgggtgaagtcaaatctggaaattcaaaatcttttaagaataaagaagtggatgaatcaaaacaagatgagaataagaatattgagtttgaggagtttgagtttttgaatattgggagaaggtcattgaagagtagaattatccattccagtgactcggattcaaattctgatgaaaactctctaaccatttctaaccataaacctcttaaactcttggaacctgatggctcagaccaaattgagcttgtaccacaagaacaaaaaaatgaaaaagaggagtcggtgagatatgattatgaaaataaagatgaaaaacaagataagagagatgtaaaatcagtttctaatttggccttgaaagaattgaagaccgaaattgttgatcaaaaaactggttcgaatttacaatctgatattcaattttgttgtaacgatgagaagaaggaagttgacctttcaacttttgttagggttaaaactgaagaaaaggtcgatgttgatatgaacacttaccttaatactatttccatgtctaaaactcctcccaaaactcgttctaaccctgataaatcaccatctaatacttctatttacaccatatcatctagcaactccaatgatttaccacccattaacactaccaataataccaatactggtaataataatgtatttagtaatcagttagttaatacgcccatcaatacaagtgatatccatgtaaaggagaatactggatttttaacacctaaaaggattattgaggacttaaaaactatttctttctatgagactaaggaaaaaatgccaatgatttcactcttttcatccgaatccccacccacagttatctcagttccttcagactcttttaacagtgcttccactcctaattctagtgttaccatacataacactactgatactactacttgtactacaactgttaaaattaacaccggaaataagaaatccattaccaaaaagaacaaagatacttttgagaatgagaaaagtaccagtagaatcgagggtaagaaatttgtgtttactggtgagatgggtattgatcgtttggaagccactttaagggtcaagaagctaggaggaattgttgtttcagcagttagtggtgttactgattatttggtttacggtgaccgtttggaggacggaaggccttatcaatctggcctaaagtacaaaaaagcaattgaacttaataataaaaagaaacgcaatattcaactcctaaacgaagaacaattcttacaactactccaatcaaatatcgatgagaatgttaaaactgataatacacttgagaatattgttatagaggataacactataaaagatgatggaaatacggagaacatcaatagtattgagaaagagtgcatggtgttgtttgagaagtatagaccgaagagattttctgaattaattggtaatccaagatcaatacagcgattaaaagactggctacaacactttcccaaaggtttaacttacaattattttatttattccatattttaaccttaattatggtataatttatctcaatttaatcttatttatacaataattacgtaaaatttacaagtaattaaagtgtatttgagtgttaatttctaccccaaaccacttcacaacttctaatatttccattagacaaggggaaagatgaatttaaagctgctcttctgagtggtccccctggaattggtaagactacatgcgctaaattggttggacaattcttcaattatcacgtcatcgagttaaatgcttctgaccaacgcagtaaaaactccattgaaaatattttcccacttgttaccggaacactaactcttaacactatttattctgcttcctccatcacaaataacacttcatttaagaataagaataataattctaatgttaatggactaaatggtaagttatagatgtttaaacgaattttacagcaaaaacattgttgatacttgatgaagttgatggcatgagtagtggagataagggtggtattcaagccatttctgagcttattgacattaccaaatgtccaattattcttatttgtaatgatagattttctcaaaaggttctatgactccagttaattccctctattatttactttatttatcccctctgtagtttcttggttttacaaactgtatcgagttttactgtttatttgtacccaattgaatttattctatcttattttatcatacttaaaaatacatatttgaaaccattgactggaataaaaaatgttgtagatgtccacattgagtaacaagtgtttggatttgcgtttcaacccaccacccatagatttgtacataaaccgaatcaacaagatttgtaagttggaaaatataaaagtgactgaaaacttactcttggagttgtatcacaagtcgagcggcgatctcagatataccctcaattaccttcaattctacaactcaaacacaaatataactccctgtatcaataaaaaggatgaatccgtaatacccttaattcagttatatactcaacactatactaatattaaaatatacctaaaataattgtatattataatatatgtatgtaaatttgctttagcatttccagaatctatttgataattgtaacaaggtatttcatttgagtaagttgagctttactgagaagattaataaagttaatgagctgttttttactgattttagtctaatgcctcttatgttacaggtacttcctgtgcactcaattgttgttacaattcactcagttacacttactttatcctattatagtataaattatggccacttaggtgttatcttaccatacattgtttatatataattaaatactcattaatgattaatcaataataggaaaactactttaagtacacgagtaatgtggtactactatcgaagttatcactaacatatgtttacgctgatattgctaataaaatactcacacaagtattttccaataaattgactctgtttagacacaagtttactcattattgcctgatctatcatctttaactgctattataccatcaatcgaggttttttacatactccaatttacactattaacatagttatctagcattaaatatggttaaaattatgttattgatggattagataaataagtgtgtaagtgttttgaaggaaagactatcatttccgcaatggctcggaaagttttcaaccacaaacaaaaacaagtaaaaaatatcaattaaaattctttagacgacttttaaaagaaatcagtaccaatctatgcaataaaacttcactctacggatataaccttatcatcgacggttttctaaatattctctatcaaactgtatcacccccaactttatactacaaatactattagtaatcttagtaaatagtagttaaataattaaacaaacgttcaaatatgatcgtattatgaaactaaaaatttcccctcgattgactattttgcttctcttagtaaacactaatttaacttagttatatattataatcagtgtagctaagtgtattaaactcctaccgatatagatcataactacgttaaaatgtttttagaccatgaaaaaattgatgatgggaagtttagaagattgtgtagagtatatgaaaaggatgggaataacaaaggatatgttagtcgataatattgcaagtttgcgacttaaaaacgaggaaaatttatacgcaaaagtcccgacgtcaattaaaacaaagctgaccaagttattcacaacacaaatgattaaatcttcaagctctaaaagaaagattaaacttgaaaatagtgatgttaaaacttctgtggacgatagatctgacgacgcgttaagttcgccggatttgtatttaacgaaattaaaacctactaaaaaggttaaaaaaacaagaaataatgtcacttacaccccatcctaatttttctacacattaacatgtataatcattaatatttaatttttcctctatagttctgtttataattttatttaatgttgttgatatttttggggataataaccagttaatagtataatagtgggaatattgtaaatagtgtttaatagtgtagatggtggttaaagctaggcgaaatttggcaaggaatgaaggcccacccaagtcagtagtagaacgcagcaaaaccaaagacaataaaacaacaacaacattctatgttattttattttttctattattagttgttgtatcaggtatcatacatttttaccccaaatcaactatttactatattagctgtatttattgactaattaattctataaatggcgaattaatttgataaataatagtataatatatatataataaatagtataatgtatgttataggattagtagaaatgcaaaggcacgtgaaatttacaaagaatctattttcaagattcagataattcataaattattgtccatttccacatttttaattcgtaaaaactttaaaataaattccactccaattaccaaattttaaataaaaaaccttatccacctttcctcacaactaattcaaataatggtaacaataatgatacaaataatagcacaaataataacaataaatataatgagaaaaatgttattgaaagtatgaataggagattatggaatgtattggtacctgaaccgacttgttcattacattctcctcaattttgggcattattgttaccaaccttggccttgtgtgtttatagcgggtttaaagaaaatgtttcaaaagatatcccatcccttctcaaccaagacaaaattaaacacaatcaaattgtacacaataatctgatctaaccttactacacatttaccactgacttagctatatttactaacccggtcgactttcagcattaataagttttggtgaaaattatgtaaaattaaagatgattatggcgggagtaggaaagcataatagatagtacatacaatatgtaaaaatctatattagaaacactagtcttaatatgtaataatagtatataatattaagaaactgagaattattgctgggagttttgaccacgtcttttccccgcaacgttacttgcgaatcttcggttgtaagtttgtctcttcttcgctcgcccagtcaagggcttcttcttttcctgtttcgcgaccttcggagtatgattcctcaccttgccagccctagcgagcgatccatgaactttcacggctataacaccgttaattaaagtaatgaattgattatataattattataataaattacccataattcaacttatatttcaaaatctcaataaaaatgattcaataatattctaataatgatattaacaatattttaatgataatattgccagaaatatagtggataatagtgaaaattatagtgcaatacgttgtaattttttaaacaaaaaatttcttacacaaattaacttattattgggaatttatcagaatttattataaataattttagtcccagttcaattatctttttaaaaattatttacataaaaatttacaaaatacctattttatctaagttatccaaattattcaaactgatcataaaccacataattaatctaaaattaacttattaatctgaaattaggttaaattctataagatatctgaaacttttattttttacaccatttaatcttcatacaccttacttactgctttttacccattttttacgttttttcatgattttataatcttttttatcaataattctatatgattaaagtaaattaatagattaataatattgaataatgagatgttggttttatattgaggaatagtaatggatgaggagagtccttacggatttgatgatttggtatctttgatgcaacagaatttttcatcaataattgagaaggttaaaggtttgaagattctggtactcgataactctaccagcaagatcatttcccttgttctcactcattcttatctcctacagaatgaagtgttattaacgcttaatatcaacagtttacaagtggagcctgatgaaatatatggtaactctgagatgggtggactggtaccgggttcagatcccaacctcagacacctcaagtcagtatttgtgattgaacctaatgtcgataacgttaatagactctgttctgaactcaagtgtcccacctttaagtcatatcatctattctttaccaacaaacttgacgaggggtttcttgaaatccttgctagagctgaccaattcaacattatcaacggagtgtacgaatatttcattgacataaatgttctacatactaatttatttacgataaacaattttaaaatttgtaataatacaaatgccagtagtattattaatactcttaacactaataatacttataatatactgaagacagctggtaacgatacgttggataataatttgatgagatgtgtgaattcattgttttcagtttgttgtttgttgaaccagattccaacgattgtttacaggaaaaataatgtgatttgtcaaactttatcaaacaaattgcaaatgctgtttaacaataataacttaaatttgcaatcaatactacaacagtataataaatataacacaaagttaactggagtagaaggagttggatgtgtactgttagtattggacagaaaagatgatttggtagtacctttaatgaatcaatggacttacagagcaatgatccatgaacttattgggattaacaataataaaatagtggtagacgattctgagtttgtgctcaacgatcatttcttcaactcacacatcttccacgaatttgtacatgtagaagaagatctcaatacccttatctcacaaaataaacttaatactatcaatacagttaacattgttaaatccagtaagacttataatactaataataccagtaacactcttggtactggtaatacagttgaaaatactgttaatattagttctgtagcggaaaatgttgaaaatgtattggaaaatatacctgaaaaaaatagaatgataaatgatgtaatgaagcatgttaagatattacatgaattatccaagataatacaggagaataagctgttggattcaggtttattggagcaagacattgctactaatagaaggaacactttgaatgacgtgattgaatacatcacagataagaacaattcctactatgaaaaggtcagaatcgcacttcttttcactctcacatgtaatgacagttcaaagattaagaaggtaaaggactatttgatgatggggaagatggacgaattggtgtccctagttgaccatgccactgaactcgtaaaaggtaaaaaaaatgcgaatagggacgaattcacgatatcaactctcaaggataaaataaccaaagtttccttagatactcaaagtccttatctacagttcaaatcaaatctttatgcaactacatacaatctcataaaaggttcgttcagttcactacattccacccactcctttatatagttttactatttatacagttctaaagttatacaattctgttgttactagtcaagacattttctactgagttatataattttactatcacgaagtaattatataataatacaacaaagttcattaggtaaattggatagtgagatgtatgtgatggttccaagtgcatatgatctgggatatacactcaaacataagccagcatccgtaactcacaacgctagttatactatctattcaactatatatcatactattataatggtataatctactgatatatagacaaatttagagaattaactatattattactatattaattaccaataacactggcaacactactcttcactctttagtttataacacatttgataatgttgaagatgtttatttaggtaataatatttatggttggaggagtaacgtatggagaaacttgtgactgtaacatcattagccgtgctactggagtcccgataatactcggcgggtcctgcgtccataattcaaaatcattcctctctgattttttcaattttcctagcaaataatgctttttacacattttaaatcaattaatctgtttaacccattttatcgcactattcataataattttaatttgtgtagtagtaatgtacgtttttatggtgttggaagggagcacgaaataagtgaacaaatgcccaaagtgagtgagttggatagatttaaggaagttttgtctggagataaaagaaaacaaatcagaaggtctgattttctcaaattcactggaggcaaaagacccatcatctcctcacatctcaaatcaaacctcatttgtaatccttctacttatttttcatctactcacttattttaacctttaaattatactttattttcttagattattgtttatttacatttaattcgggttaaattactcttctcagttttattcattattttatcaataatttgccaattaattaggaattgaatggaatatttaaaaataaattaattaatttgaaaatgtgattaacaaatgttgtagctagtggattgataatttggtgtgtaatagcattttttgtgacttttaagataatgaaacctgagacctatgaatgggttgagaatgaacgcaagagaattgaagccgcaaaacagaaaatctcgctcatcaaacaagaccaacacagtgacaatacaaactaattttaattttttcacaatactctgctcaacatacactaattttcctatcctaaacagtataaactgtagtataatatatagtatagaaatagtatagaaatgtaaagattaagatttattgaaattatctacaaattgttcaagtgtggatttaagtttagcttcagtttctgggcttaaaactccttccctctcaagcgtagataacaaatctgaatgctgagttgtgaggtgttgaagtagttgttcctcgtatttacccacaagtttggggtcaagtttgtcgagtaaaccgttaactcctccgtaaattacgcaaatttgcagtggaattgacaatggtgcatactgtttctgcttcaacaactcagtcagaagagtacctctagtcaacaattgttgagtactggaatccaaatccgaaccgaattgtgaaaatgcttgaatctctcgaaattgagccaaatcaagcttcatagtaccagaaacttgtttcattgcctttgattgtgctgctgatcctactctcgatactgataatccaacatttatagcaggtcttattcctatattcaattcactggtgtcatattcgggccaggggtattatatacttaactatatactatggtcttaaattagcaataaataagcaatagtaaaagtatgtagtagtagtaatagtaaaagtatgtagtagtagtagtaatagtaaaagtatgtagtaatagtagtaatagtaaaagtatgtagtaatagtagtaatagtagacaaaaagagcaaatgactagcaaataaaatggtatagcggaacctttatagaaaagctcagattctaggaaaatttgtccgtcggtaatagaaatgacattagttggaatataagcagagacatctccggcctgggtttcaattacgggtaaagcagtgagagagccagaacctttagtgtcactcatcttagcagcgcgttccaataaccgagaatgcaaataaaatatatcacctacatacacagatggaggctagttatataactggtaaattgtatacagttaatagatgagtaaattatgtaagactaagtccccagtagaacaaaagagctgaggaaatagtgttcttgggaaaataaagcaccgtaacgtaatacctggataagcttcacgtcctggtggtcttcttaacaataaagacatttgcctataagcagttgcctgtttagacaaatcgtcataaataataacacaatgcttcttattattacggaaccactcgcccatactacatcctaaactaatattatcactatactgataatactgagatacaatacgagtaaaataaaagtaaaactatgtcgtgaatgtataactaggaccagtaaaaagaattaaaagtagtgaatagctggggaactaagtagcagtacaagcaccgtagagtaccagtaaaaggagctagaaactgtaaaggggcagggtctgaagcagtagcagcaacaacgatggtatatttgagggcatcattatcttccaagatctttagtatcctagccacagttgatctcttctgcccaattgccacgtatatacaatataatctcttattctcttctaaaccttcattcactaggcgttgattcagtatagtatcaatggccaaagctgttttcccagtttgcctgtcaccaataataagttcacgttggcctcgaccaattggaacaagagaatcaacacatttcattccagttgtcatgggttcatgaacacttcttcggtcgataattccaggagctggaacctcaacacgacttgtctccttagtaacaagatcaccttttccatcaattggacgacctaaagcgtctacaacgcgacctaacaattcagggccgactgggacatctaatatacgatttgtacgtgttacagtatctccctccaatatattcctacagaacacattaatattatacttaatggtatattatgtaaatataagaataattagtgtcttttaaaaactaagttcccatgaggagatggaaagctgggtaacgcattacctatcatcaccgaaaataacgacaccaatgttatcagtttcgagattcagagccataccagcaacaccggaagagaacataacaagttcgccagccttcacttcttttaagccataaatacgagcgattccatcaccaacatttattacatgtccaacatccctcacatctttctacacatcattttctacggagttatctactataacataggagaatttagtactatgtaatataccaatatactaaatacatattacgataacaactaatttaagtcagaattacaattaaataataatctaagttatgatggcaataaatgtaaaactgtgtaaagaagttgtaggggaaatcactcgaagtgacaaaatacctgagaatcccatccaccaattttagtttgtagtaattttgaaatttcagcaggtgatactttattagtgctgaatggccttaaacccaagtggaatccagtggatatttgtgcctgtaatttacccttcggtatcgctagttttactatcctattaatatatctcatttttaacacttaggtgttgattttataatttaattaacacagtaccccatcccattatacacttgttacactattcatacaccttccacatcattactattattattgggaacactattatgaatattactattagcattattgttattgttattgttgagtttgcatgaaattgatgtaaaataaaaataaatcatgataaaatataaataaaaaatgagtaagaaaaggtatgtataatatttaataacgattataaatatcgttaaatttatcattgttgtttccgtaatgagagttagtaccagtgacatgagagccgtttggccctgtcacatgaatggcctttttgcggttgttgtccataatgacttcgagttcgaccttttcgttctcacgcagtgatctgaatccgtcggcataaatttcgctttgatgtacgaacacatcctctccattttccagggttataaacccgtaaccctttttgttattaaaccacttacatacgccgtttaatcttgtcatttctaacaaaactctcaaaaatatatttttttcaatttaatttatttttgaaaatttggttatttaaatttcgttaaaacagttggtatcaaaggtgttgagaactagtattgaggtgagtattggagacaaaaaaatttaaatattttttctgaaattggtaaaataaatttgtggtaattattgggaataaaacctcacgttactacactcagttaccagatcttgctgctcatactattactacactatcacacatatattatactcataccgttatatagttatatatagctgttgtttatgttatggtgataagagtgtggtaaaaaaatcagaataaataaaatgacaacttgaacgggtttcgaaaattttctattatttttttctcctacacgacatcacaattggaattttttgcgttattcctccacacattttttatattttataatttcctaatttaaaacatgattttaatttttttgcattatttacattcttttatttgttacattttccattacatttcttatcttaaataatttaacaaattctaattaactcaaactatttattacatggttcaagttaaatttaaaatgcttagggattaatttaagtaatggttggtaaaagattttctgagaagtgtgaaataataacatggctatcattatcatatattttaaacctgattttgctaaatttacaatcaattggtttaatgtattacatgtacatttgccagccgaagtttatctacatgttaattgtggacgcgttttgcctgtttaaatggacaataagcatgttaccaaagcttgtaggccataaaggctctaactgttgggtgttatattctcgtatattcacaatcaaggcctttataatatttttctgggtattacctgttaaaccacattcgaaaggagttcttttaaagtcacaaggcggtcgttctcttgagattatgttactgctatttatcacgccaactgtgtatacgattttggcatttagtactggaattcatctttacggtggagttaatatggtttcttcagagcgtctaatacattctgatttgattcttcatgttatttttgattatttggacatcatcgatattttccataagttttctattgattacaattcacttattaacacgttcaacttttataaaatcttctgttcagttttcctagtcactccaatcttcctgcatagttacacatttccacatttttctactcctaacactgttaatactgataacgcacttgatattaatgttgggaatgcgaataatagtggaagattgatgaaaagagatgaggtatacttttgtagaaagtttgcgggaattgttggcattttttttgtagatttaccatttctttttataagaatttatacatggcaatcaactgtacattattcaggtatccacatcatcagctgtgttattgttattgtacctattattactattagtttactcttaatttagcattagttttacctattctattagttgtacagtaatttgtttgataatgaatttctgtttttagcttttgcaccgtttatgttgaagaatttatgttttatcctgttgcaaatttctagaataagacacacttcatcgaaagttgacttgtttcaaacctcaaataaacataaaattactccacacattgattcaaccaataccagtagaaaaatgtattctcgtacttggttttcctaagataacttatttattattatacgagtccctactgggcactatatatacacagtctagttacatatagttaagtataatttaaagatagaaaatattatagaaatgagataaagttgctgaagatgaatgaaatcttattgaagatattattgatgataaatgtggatttgaagtgtgaattggctcattatcttgacagtactttgaacttatccaattggattaatattcttctctcactaccacatttcatcttttcactttccaagttcattcttatcattattctacttaaaatgttacaagtacgtttatggaaattcttgccattaactatataatatactaatattacaggtagcactacagtatatattacctttataataatagtataatattataagtatatatatagctaattaatattcttgaactaatagtgcggatagaaggagtatttgatacatggtatggagttgttggattacaccaatttggaccgcatatttatattggctgattatcgcattttcctgttttgttttcatttgacaatattagtttctttgttgattctattcatttggtcagttctcgggcaatttgttgatgcactttttgtctctattctcaccttcacaaagcttacagcattcgtattctcactcattgtaatgtgcaactatgtcgactcatttagttcattggagtttatctcatcaaaatggcctgggaaatctattcactatatttttatatttttctcttttaaaccggtattgcgttagtgacaattccttctgtaacctctttaggacttagccttacattcctaacattagttatacggccttaatttacttaattatttagttatttactgagtaatacccttattattccattaataatgatatttttatagtttatgaatttgttgataaatttgtacccatttttatgcgtgtttttgggcaaaaggaaggtttactatactaacccatcaactttcaaacataaaaagagcaaattacaccaaaatttacttttcaaaaatctacaaaatgttaataaaggtaagttgcagctagttaatatctctataacttattctgatctagcagttatttactatacgtaaatgtaaatagtatatataactccttagaaaagtgtcaactcgtgacaacaaattatataaccatattattagtatattctaatccataactatgactaaagtgactatagacttgatgagcagtgatgagatttgtgacgtgaatttaacatcatttgtcttattgacaaactctaaggagatgtgctgtacgtgttctagttacactatgatgataggtcctaacctgatcaagtcttaccgtctgcacaattcactctttcatatacacaaaaacaaactgattaacactctgattctaagactgttctgtttggttttaactatcatgagaggaggccattttggactacttttgactatattttctattgaagcagtgttatcattagtttactggatctacagttgtttaattaggaacttgtcacttgaatcgcttgaagtgcagatgttggcatccaacattttcaaacagaggagtctgaacgagtttggaaattcaatcacagaagtcaataagaaagtttataaaaagtacaaaaaacaccaaaccatgtttaaacacaccttttactcttttttataatggattactattaattgagtttaacttggtgtcaatttattcttaattcattcattatttactattatactactataatacactattacataatacttaatttatatttaggataaatagtacataaatgaaaattagtttgttagtgtggtgttgtttgaaatatttatgaacgacaatataacgtttaagtccataaaagtccaaaacgctaaaggaattaactgcaacagaccaaatgagcatgtcaggaaactgctgattattctgtcatcgttcaaactatttccaactacatcatccctgtcaacactatgatccgtgataatagcatcaattgtattattagtgttatcagtgttaatgttggtattagagttgacagcattagtggcggtatgagcgttgactgctgggtcattgagtaaacgagtgtaaatgtgtgaaataacaaaacccttaatggctgacatgataatcgtaaggaaaattccaacattgtatctgaataaaaaactttttaggggcatctttccaaacctagtttcaagaaacattagtagcactatcaaaacttgaaagaatgccaataaacatgcgactgataaaggagttaacaacttctttcttgaacactcaccagcgttaactctgtcattggccctgccgctaatatcgaaatttggttctaaatagttttctgagtcggttgattgtaaggtcaaactgttggcgtcaaatttgattaaatgctgtaagcatttgcctaaaaagtcaaaagaatctctcaggaatactataacaaacgacttcgccattgggttatacagttcgttcacatcaatagcatacatcactacaatattttctattgagttatctaatccccgataagggtacttaattagatgcttaatatattattactatataatactaaaaatttgccaacttccggtagaaaatgttcactcgtgataagaatttatataaccacttactttaaaatgttaactcgtgacaagaggattaagatatagttaataacagtatataattagtatagttagtcatacctgaaaaaaggctaaaaagaccatttgcaaacagtacaataagtgataacatgacatatggaaagtgatgaacgagtagttgaattgaactgaacaatttctgacgctgtctaatcacatttgtcttcatccagactctatgttctctatccctgtaattagtggatgataaaatcagtaagctgataatcagcactaataaaaatataattgtgagtttgtaggtgaaaaacacaatggattcagttgtaaagttgtttaaaaccctgaaaattgaagaaaaagcagcaacaggggcaattatagttgctaaaaaatcacctacaggatgtcctagcaagaagaacagcatcttggttgaggggtttccaagcacaaaggggtcagtcactgaaccaattgaaatcatcttaatggcaccaaagaagcaacacgaagcaccactagtgatatataagaggatttttacacctatgtttggcattaattctgggcttttaacagccacgatcagagggaagatggtagacaaagaccccaagaatccaccaaataaagagacttgtaacataaacaaactcactggaaataagataaacgctgttataaaacctaaagcgtagaatatgagtgaaaagaccttgatgtttaatacgaagtacaaaacctccgatattgaaagctgaaccattccagtgaagacagtaaaggaatgaaagaatataatgtgaccaaaactggtcaaaattccaagcagaaaccaaattaaattactgattcgagtgcttccttttccagactggaagcctgaaagggctaccatgcgcacaaaagtcatcatcacagctgaaattaaagccaaactattaatacaaatttgaacaaattttggtaaaaaatcatagacaaaatttgaagtaatcaattttttcaagttttaaacagctagctaattatcattctaccagacacagtttacgacaatattaaagttcaattattataacacattttctttaaaggggtttttatattttattatctatattagcgtatatttagtattttatagttaattatgtgagcaatgactctgtcgcatatgttacagacacatatattatacaataaaagggtttattttaataatttattaagtcttattttaggcttaaattactctatcatttatccttaaattattcatttaaatgattaattttagtgttattttacgcttatacagtgttatttaagtcttaatttaacaatatttagcagttaataaatagatatagtgatgaaaaatcgtttatgttaataaaatgtaataaaatgagtaaaatattattcatgatgagattttgacaatatttcaggcgttttattgttcttatccaaaagtaaagctatccatccttcctacattttgttactggtgacaactactgtatagctaaaaacccccaaaaaactaagtagaataaaattacttcagtatcgactagttctggttcattttctagtctagtatttaattcgacaacttcaactaaacacacataaaaaacttggaaaccaacagttcagtaatttttcgggcagttttactataaattttgtagctccaatttctaatttgcaaatttcctcaagtatctgattctcaatcttcttccgcttagtccgtgattccacacgtatatttttacacatcaactcgttaaaagttatttttacattatttccagaaatttctttaatcaaagaatgtgtcaaattaagtccaaatattacgattctttttaaaaaatttaattaaataaaaaattacccattttccaatgaataataataataataatcctcaattaaatacttattactcaatatcaactgtagaatcgaatttaataataaatattacagttaataacactttaataatacaatagtattcataataatgttaatgttgagtgaatttatataaaaatttacattatgttgtaattgtggaatctttgaaatgtgtatatcgtttttgagtagagattgagaatcattttccttaatttgagccaatttagaaaaacctttaattacaaacttttcatccaaacaatcctcgttacccagcacatatggaaattcatctgactctggtagtgttaatccattttctccattattaaaattaatatttgagatgaaataattttctctatataacaaatatataaaatccatattatattaaaattatactatatattgttgtgttttgtattgtgttagtttttggaatcttgcatatccagcaagaattcttctgccagtgagttttcgtctaaaaaacaatatcagagattattttacctgtatttggttttaactttaccattatcttattattcgtctcaacatccttttctaaaattcccaccctttctaaagtattaaaattatcaataactataacaatagtataacaatagtataatgatagtataatgatagtataatgatagtataatgatagtataatgatagtataatgatagtataataattagtttgaatacctgattgatgttttttatttagaacccattgatcatcatcattggtattatatagtgaaatgagttgttcttgaatcccttcctgcatgagtttatttttaagttcaaactcatcatcatccccttccaaccactttttctcatcaaagagaaacttattattgtaaaaacgcttcagatttccaaataggtcttggaaacacttgttctgacccttgatccattccatagcagacgaacaaaaagaatccttaaacaaataacgaaccaataaatccgagtctgtagactcaattgtcgacagtaacgacagacaagcactctccaacattgacccatttgtgtaactactgtccactttataccgtaatatccacattacatatctcaatacattatattttattatgtgcttatcgaccaatgtgtcctattacattttataactaccctatcaggcatatataactatacttaagtaaaataacactaaaattaggtataaatgttaaatatgtaaaaataattaaataatatggtgagaaaaaataagaaagactgttgactaggaccagttggccctcaacctagctaactatactaataattaatatatataaatggtatggtaaatttattgaaaaatcaaataaacttgaaaaatgatcatcatacgataaatcgtattattaaataaaactggataagacatgagtaattaaataaaattaagtaaattgtgattgaatatacaaccgtaaatagggattctaaccttcatttgtatgcagactttgataaatttgattgatccaatcactagaaacttgtcataaggagacattgcggattttatcacccttagtggtatcttttgtgattgaactctcagtttaaatctatgcttatgttctcttgcacacaaggacaagatttccattatattcaatattgcgtttactcgcaattcgccagttacaggagataacatattttccttcattatctccttgataaatttttcatgctcatcctcactttcaaatgaatcctcaaacttgtaatcaatcatacaataactatcaattgaaccgaaagaaatgccagcaaagatatcattatttagacactcaagggaaccagtcagattatttttagcggacaatttgggtgtactagtaatatcatcatcatcttcttccttcttatctatctcctcagggacatttgtgtcaagatatgtcattaaatagtctaaaactcctttatcataaaatatgttacaaatttcatctctgtctgggagatccatgcttttagggtctaaaagcctgcttacgatttcgcgtgtttgagactgtaaaccctcgttagactcccggagtaaaatgttacacaggtttatgaacagcttcggggtcttgttaacctcagcgtcgataaacaccgaagaacgcactatcgctgggaatatctcctgacagatgtgaaatatctcaatcaccaaatttaatggttctatcagcttatatctaccagtacataacaaattaggcctcaattcatctctatccaatattacactgctaccattagttttattctcatcaactgaattattttcaccattatcaacaatagtgttatcaggacttacagtcgtaagagtatcaactgtattactatcattaaggtcactttcattattatcaatattatcagttgtaagacggagtttaatcgtatcataatactgattggacattaagttaagtggtagaagagtctggttgtaaatggtgattgcatgggcactaccgtccaaataaccagtcaactcatttagaagtttatagttacgcaccatgagaatgagagagttacgatcaaaatgtgatatgagatttgtagaccgtgccactaggagaagttctctcaaaaagaccggagccatataattggtagccagcttcggcttcaaatgttcgaagaagttgttctcttcattcaaaataatgttcataatctctgccatattagcgaatacggtggagtttatgcgctggattgaaaactcgtccaaatgacgaggcaaaatcacgtctttcaggtaattgatcctgtaattggcttggatcaactggtagaacgaggtgttggttatctgaaccacttcatggtgacgcacaaactccttgaaaaacttcacatgttccatcttcaaattatgtttcatcaagtccgggtcatctacatcattttccatagacgatagggtgtgtatatataatcaagtatcccagataggggtaccatgtacataactaattataggtaaaacttcaataattattaaatttagtatataattaatagaatatataatgaaactaagtctcctgaacggatgaaaagataacaagcttgactcacattcaaaggcctttagtaaatggaagaaaatatcatctgagacgaaaatgtgcataagttcaagtgagccgcaccacttaagaacaagctttagaagaattgacgaaatagaggaggccgtggcgatatcgttagataaaatacaagtgtccaacacggcaaacaaatccttcagccacttcttgtcatataagtccaaaaataatccatcagacatagtaccaggacataactaccaggaacattatactatatataatacgaataataaatgcaataggattgtatctgcctatcaatgtttaaagaaatacgtaagtttgcatatttgattctatttttggaatagaagtgacagtaggtgtgggaaggactcgaaactctgaatttctctcagacaagagcgctgacacgctcgaaacagtcgtttgcgcatcaaaatcatccacgaaattcctcatatacttcctacaccattttcagggagttgttcactacggagctaaatgtataactaaataataagttaaatggaactaagtaataagttggctgaatgagcagtgtatatatgtaatttatggatggaatttaatgaatggaaaaagtaccagcaagcattgtgtccgacaatattttgaaatgaaagcgctctgtagattcttttatcactgccatcatgccatattattatggattctaagatcatattactactatactgatactatggtgtaaagctaggtgatactaagtaaataaaggataaagttaaaaggtgataaggatagaaataactgtataaataagtagttaattgtgtaaacttgtgaaatggtaaaaggcagtaataaatcagtaccggcttgtgataaataatcagtattgtctttaatataagtagaaaaaagagtcttgatcccataatgatcaagacttaccaaaagcttcggattctcagaatcaggatcatcaaaaaaacaaaatcctgtgcccttatctacccatgtttcctatgaccattttccaccagtgttatatatatacatacttttatcgacttaatatataactgagtatactagtgttaactcgtgacgaagggatcagtatataggtaaatatagtaaagagtagtaattgaatagaagccgatactgaagttggaccgatttcataaaatttaactgtccgataactggacgggagtgaatttacgggatgatgaccaggctcatcatccaaattgtacgtgaaggcagcatcgccgcgatataagaactctaaaccaccaaccctgttatcatcacatagttcctcatccgtcatacatatgaattaactattatattattagaaaattactagttttaaaattacatttacaaattatgtcaaaacaatgaaaaatagtgtgaaaaataaactactgctaataaaattaatttaattaaaataatatttataaaaaacaaaattaaaatgtagaatattttattctgctttgattccatcccacattcgatccgtacctcttttaaaattttaatttcctaattaaattatcaaaaggtaattaaaatattactattttaactaaaatattgaaaatttaccctaaactttaatttacccctaatacacttatttttcctccaaagctaaaatctattcatcaaatatacttaaattacttaaatatcatttaagtgtatttaaacgtgaaatttcccttcaaaattaacaaactaacccattattccattaaattatccagaattgctgtttattatttcagagtagtgtagagtagtgtaattctattttgtatatcgagttcttgtaccggttcatcatcttctttatttcccagcggcgttatgtatatttcagtgtaagtgtctattacctttcccttaactcctagactattattgtggagacttacgaacgctctttggtttgtgaactctataaatggctctggctttactgcgctgcaaaagagcagcacgtctggtacaagatcctttgagaactcgagttctctcagttttttcaagtctacggggtattcagcttgcagtctataagctggatatcctgggaaaaacgatctctgtaacagcaattctttgcaaaccctgttcaattgatcttctattcccttatacaccatattcttatctatattattttttagtgagttattccacattttaaccatataactgtacaccaataataggcatactaatatactatatatatatcattattaaaaagtgttgactcgtgacaacaaatatttaaatgaataactaatattattagtaacaaatagttagtaataagtattggatacaaatggatgatataggatcacaggaagtaatagagaacaggattccgtttaatcggaaataggctgggtttgagaggaaaattatctaaaaaatgtgaagaggatttaaagtacgtttggagggaatgccttgttaaaaattggagtcgatttacagttcaacggaggttgtggtaacggatatccaagtatcactaaataattttatcactttatatactattaactactgttatattactaaaattagttaattttatctaattctaaatatataattctgtattagtatgttttataaaaataccatcataggggtgaggaacaattataaatttcgtgttcttaatcaagccaatctatacacatatacacttaaatgtgccattaactaacggtactgtaaaaagtagaatacataaatatttgttaaaagtccattggattacaatgaataaccgtaaaactaactaaaaaatgtataaacaaatagattatagaaaaaatagtctgaatgtaaagcaaacctgtgaaacatttgccaaatcatttaaaaacttcagatataaaaatgtaatatcacccaatcgactcaattgatatccttcagcctgaacatttcaataacactatccataaatattaactatatataatgttaaatatatataatattaataattatataattaatttgttacgatgacttgattaacgcttataaatggtcctgtaaaaatgaccacatgtggcttatctcttttaataacttgatatatttcacctgatcacattgattactggaaaaaataagagaaaaatcaaagtgattagatctcttataaactatcaaatagttgataaactgagtaaaaatgtactgaatgaagtttgttcaagcttttcagtcagtaacgatcctttaacacacattatatgtaaattttcatccataaactataaaacgttatatccataactattgtaatggtatggtataattttaggtgggtttggtaaaaattaattaaaattatgatcaattttatacatagtaaaactatgtagagtgtagaagtggtatgaattttcaggtataaactaactctgttttgtgatgttaaagtaacaaatggtttatcaacaggtacaccagaaactaattaaacagttaactatgtaaaaaatacgtatgtcgttggccaagtacttcattccaaaattgtcctcgtaaaacaaaccactaactgcaacctatggaacataattccaaaataaaaccaaaccatttgtcctggaaatagacaaaattcatcgattgaatgctattaatcactttaataggtgtcatcaggtgttaatagatatcaatagtaataagggtattaatagttgttaaatatctgtcaaaataccaaattttgcagttgaacttttaacccataatccacagttctgcttcctaaacattttctagtattaaaacaataatataaatttaggtaaaaataggcagtaaataaatgtcaacaagtggagtctatatataactgtaaaactatgtaaattgtaaaagtgagttttcctaaacgggtctactatagttagcaataccttgtaaagtaacgttaaggggatttattggaacttcaccttcagtcccaattctaccataaacagtcgcatcagactaatatcaatattaatttaattaaaaatacgtcactactgttacgtaaacgtttaagatcacaattaatgcccttggatttacaaaaatgtgcaaaaaggtttgaaaaacgaataatcttagagcttatcgcctcctcaagtaaactaggagtgccactattacatttataataatcaaaactcatgacaacatctattaaaactttattaattcaatcaagcaaattaaattataactaatttatgattaaaaatttcttaattaaagataaattatgtttcttttgagccgtaaatagggctttaaaagtaaaaaatttctcacacaaaagtaataactaaaggcaaaacaatagataaataattaataattaaggggatctaaatgaaaaactacccagtgagaggtttgacttattattaacttcggagccctttaggagtttgtatgttccgtctctaacgtatggagctgtgtagattaagacgcgttcgtcatctagatcgaaactggacttgagttcgattaaatttagaatacttttagctcttttgatacgtttgtaatcgaaatttggggagttttttggactaacgatagtttcaagttcagtcttgaaccagtcgttgacaaacaacaaatctttggtgctttttgtttcagattccaacctttttaggagttcactattcaaattccacagaaatttaagctctaatttctccctctacaataatttatgagattgacgtagaatcgagtaaatgtgtaaatagccaatcctagtaaaattctaccaaatgatcagttatgttataaatcgttaaatcatctttatttcccatttatttaatttattataacaaaaatttttataaatattccaacatctgagatcaccatactattactacactatgacactatttttcaatgatttatctatttttaacacaatatttaattatcaacactgaaattatattaatttttatattttggataaaaaatgttaaaatgtgtttaaaattgtttttctttccctatccttattatttatttaatattctattatatataacactatccaatgtataattacaatctatattagtatattattgatttttaaagagtcttgaaagcgctgcgcccttgactgatccttttacaacgtcattttttgtcattcttgccataataacatccttcccttcatcctgtttcccagattccttcaagctctttatcttatcaacaactgcctgtttccttctagtaaacaccttactatatctttcagcctatatatatttattacgtaatggtattatgcattgagtatataatataatatattaattatacaactagtatagttattaataaccagataactgtgtaaagaattaatatgtggaagataggaattactttatatttggctgaggatttgctagttcttttcctattttttctcttgtttttttctacattttcaagttcctcctggggaaatttggcttgagaaaggtctctagaataactaccaatcggttgcatagtcaaagttatggagtcagggggcaacttttccagtaacctctggacttcacgatccttccttatctaaacaagttttaaaccaataacactgttaattatatatatatatcctatcatactattattacaaatatactatagtgtaacaatataataattgtataacaattaagtagtgtcccagtgagattgaataagaagacaaaccttccctgtttcgtatggattttgttctaatgaatcgaaattagaaagacctgagccaggaataatcaagtttgacaggccaaaagatgttcccacggcacaaacatcctcgtagggctgaaatgccactgattttatctcctaaagtatcccattaatataaacttaattatatatattacaattaggtaaagttattaaaaaagagtttcaaaaatgaaattttgaagtatttgtcaaaagttaatagtaatacaaataattgtgtatataaccgagaaactaactacataactagaataggatataggggaagaggcagtaactaacctgtgagttaaactgatgtttaaggtacaaatttggcttaattgatccatcaaaaacattattataaaactctaatcgacagccaaagttgagggaaaggacaccagtttgactggaagttatgcatgtgggaggatttgagccaataaactggctaacgacagcatccttgtacttcctaaggtcccaaactttccagtaaccatcaattcctaaacagtcaacttaataacaattagttacctgaggaaaccatgtaattgttatgtacacacaacgcagttacaggccctttatggcacgacattctcaaaacgttctacaagaatattaccataatataattatattagtcatatgtcggcataccataactatatatactaatgttaaaaggtgttaactcgtgacaagaatccatataggtatataatactaaatgatataataaaacctcatacttttttaatgtaaaataaccattaaagataaatatgtatataagacatcttggatgaacatagttgaggaaataccttttccatatttggtacatataatgaaactaaaccatctttatgcccgagatgtatgacggcattatccttgttttgacacatgacatgacaagggcctttcttagtattatgttttgccacgatttcaccggtggaaacgtcctggtaactaagccatgttaatatatgttaacttaccaaagctctccaaattctcctattgtgactagcaagtagtgataataaagatattccaacttgtgcgttaactgaaaattaatcatttggtatctaaatagttaagcagtctgaatattagtttaccattcggtctcgtaaaacgtgcacttcagcgccagtgttgtcgtaaatgtggacgtacaacttctgagctatggtaatttagttatcaaattgacttaccaactgccaacatagtgtgattttgtaaaatctttacatctcttatattttcattaacctaaaatactaattatctgaagaataaaattaagcaatttaacacttgtctaatcaagttgactaattttagtaacaaatgttaaatttggtgaaaataaataaaattgagaattgacaaagaaaaaactaatagtacaactaattaaataattgtgtaagtatctaagaatggataaaaaatatcgggaatcaccagtgaggataaaacagtaccgaaatatcaaaaaaatccttataagtatgagtacaaattaaagaaagttggcctttttcacccccaagaagtagataacggccattatgagagaaatcaacagcatacgggccataaggtaaattcaaactcagagcctgtttcatccattaatagattactactatgaattaagtatataacgatgtaatacctaattttaatccgcaacgaagcaataaatagtaaaaagtagtaaattctaattaaaatagatacattaccttctttttagttccttgatcaactaatgttaaaagattagtttgggttagtttataagttttttcgttttctccgggaataatatatccaggttcatttggaagcaaaattgaggttaaatcagttgtctttatagattcctcacagatagtcctgtttttttggaagtttttattagaaatcgtttgtttcttctaaaaattaaaatttaacaaaaaatttgtaattgctcacctttagatccttagatcggaagaatttgctataaataaaatcagtactttcaaaagtcattctaagtccaattcaccaataattttacaagaatcggatcactaatttatacttaattatgagtaattttatcgataatttggaagaatcaagcagaatttacagtaactaatcacatttatttttttttgggaaaaatatgacaaagatttggatggatttttctatgctggaactagttttagtttggtgtcatgtccccagttatatttacactaccgataattatttaataaatctaataaattgatttgacggattgatagatttgttaaataatttttaaatgggtttttagtgatgtctacagctcacagacctacttggaataactcgactggcgtaggtcttgaaggtattttttccacataaaaatttacacctaattattattttagaaagcgggttaactgcttctgtttctagcaaggatttaccctcccatactgagctcaagcgcaggtccacttgctctcccggctcatctgagaccggggaaacaaagaaactgcctgagactaagaagttattgcgcgaaaagcttgaggaaactgagaatgctcacaaaactaagaacgtaatcgaggatcaggtgggtgtgactaaggattttttaacccttgaagatgtcagtcacctgttaaaccttgggattaactcttttaaccatgacggagaccattctactaaggttggcaaagagaatcgcgaggatgaggaatctgccttattacgtgagttggcgaagataagaaaggaaagggaggaaatcaaacagcgcgagatggaagaagagcttaattctgaagaagccagggggaaactactgaacaaaaaccctctaatggacccttccaaccatcctagaccctgggacgaagacgtcgtttttaggaatccacaaacacaatctcaacaacccccaaggtctgaattgagtgcggttaattcctgataacccttccctcaaccacagtagtatttacttattttaactagttttatggctattattcaagtatttttatttctatttttaagtattaaagtaatatcgaatatagttttttgaatgacgctgtgaggactgattttcacaggcgttttttgcataaatatatccaataacttttctaccgatttttatacaaactattatgaacatcaatttaatggaagttacatagttttgagccgatataatattactttttactggatgtaacattgaacttgaagaaaataatatccccgtcattgacaacgtagtcctttctaatcacgttaatacattaagcttaccctttctgcaagtatcttccattcgccctcacttcagattctgttcctacacttcattttacccttatctatactgataactaatagtatagtcgaattttataaaaaatatctgtgggaatagtgaataagtaataaatataaaaagcccttctgaatagaagtaatagtagataactacttaaagtgtggtaaagaatttgtaaatgatgaatcaaatagttgtagagggaatcacccaagcttgatcagtaccgaactgtacaatatcttggtaattataaacttctgcgcaaataaaccccctctcaaaatctgaatgaatcacacctaaacaataggttgggctagatattggtgtttgtgataccagcggcctgaggagcttttgtaccattccttatagtccaacaacggacttcatcagggccacaagtaaaataatgtattaactgtaattcatgataaccactcgttattatctttcctatcttacttattgcattattcttatcctacaacattttcagaaccgtgataaggttatttccccagttaggggtgtttatgtaacttttgagccgaataataagaaacaactttcttaagttgataataaataactggtatcaaatatataactaatgagtataaggaactttaagatatcttttgcgtgcttcttcggttgggaaagcttcaagtgattgttcaaattctgcactatatgggatgattggacctgggttgttttcttggacccacttggcgatcttggatagccacttgttcttctgccttacaaaatcgttttcagacatattcaccaaatatacaatgggttttgcagtcaaaaaattatactcgtttatataaggaatttcactcgatttccaattacctaatgaaatttctacgaagttattctctgacgagttaactatacaaatactattattatactacagttaatataaaataagtaatgaataactaggtcgaccgaaagagacaatgagaggataaataggctatggctggaatcactccgtgatgtaataccttgagaaatccatttattactttctaaatgttccttaactttaatcagagtatcaagttcttcctttttagacttgaccttcatgttacgctggtaaaccttgtcaacctcagaaatagccttggaacacttgtcaaggtccttcaaaatcaactcctggttaatagtgtcgaggtcattcacagggttaacctcaccgtcagtgtgaactatctcatcgtcctcaaaggcacgcacctattcataataaaaatatcctcaatagagggtttatatagttaacaataattgtaggcaaataattctgaaattagggattatgggaataaatgcaaagagtcattctggatagaaataatagtagatatctatgtaaagtatgataaagaatgtttaaatgataaaagcagtgtaataagtagggaaataatccggagtgatgcattaccacatgtaaaatcccatcaacagcatcaatgtgtgatagaaaggcgtttccaaggccctcacccttgtgagcacctctcacaagaccagcgatgtcaaaaattgtgacggtggctgaaatctccttcttaggagtaaacaccttacagagatgatcaaacctatcatcaggcactaaaattttgataaatcagattacaagtttacctgaaaccacagcttcatgcggatctaaacatataattatcaagaattttaatctaaaattaaatatacttaataggaaatatttaaaactagttatatatatataattagttatatatataaattaagagtaaatatataaagttaaatgaaaaatatacttattgtacagaatgggaagttttcagcaggaacgcattgcttagacaagagattaaaagtggtagattttcccacgtttggaagaccaactaatccaagctttaggttatttttaggcctaaaaatggattaaatacggaaattttaaaaagttaaacctcccaagaagaactttgggttcagtctgctgatttttatcctttggagtcatttatagaaaaatcacaaattaagtcccgtaaaccatacgttatacgatattacagaattcaagtcccccatgttaatgtgtaacaattaacatattttttggagggaaaagttaaaaatacacaattaaacttttaaaacctaaaattgtctttatctttatcattatctttagatttttagtaaattatccaggaaggttagttattcactcatattatagtattataatcaatatgaatgaatatatcaaataattagattaattaggtaaaattttatattgaaaagtgaaaatttggtgaaataatttaagatatttgattaactcgaaactgtataacgaggtgtggaaggacaaatttcagattttaaacacaaaccgtaaaattttggccccttaaaataaaattcaatttaatcaaatcttacgaataaaccactttgaaatgtgttgaccacaaatttaaatgtgtaaataactataaaaccaataactaagtaaagtatgaccaaattatataagaggaatagaaatagaaaaattagagaaattttgttttaaggaatatttatttacattttactttagatattagagaaaggggttagataaaattacaagtaaattgtagtgcattcagtgggtaacacgatagctacacagggcgattctggatcgaggagcagctttcacccattaaaaccatagcggttgggcagtaaaaaataagccatagctgtacacaaaagaaacgagttctcaattgcagttaaatcttggatttctgtacctaatccaataaattttaaaaaagtcctgaattctcttggttttgtctaaaatttcaaaagaccagtcgcgaaaattttttataactctccgtttatgatttatttctgaaacctctgaacttgtctacgaatcttcccctgacatgcctgtatcaaaaagtgtctcgaggaccctctcaaaggactccgattcactgaatttcaggtcaactcgaacagggagcctccgatccgagggttcttccactagaagccagtcttccaccacaaggttaagacaaagacttatcactagttccttcctcagacaggacgagtattccaaatcaccaagaacctctccgggctctgtcaagagagctgttaggcatcagagggagacaagggcaactcaaaccccaaggagaaccctcagacaactcactctcttcaaggcaaactcaactgactctgtcaggagaaccccgtccaggcgttcttcaagctcaatacaattcgatgactctgattttgagtatacaccaccaagaagacgtgctagatcctttaaaagaagtcgcagcagctcaactaccaagtcctctccttccaaattaacccccaaaagactcaactcctataaaagaattaaaccagacaataaaggtaatgccttgtagtcaatcaattctttccataaattacacaaccctactaatttattagttacttaaatatattttggtcatttttttcctgattaacttttgatacctattccaaaattacgatttttgctattattacctaactatataccatactataattcgtactatagttctgtatttatagttattgtagatgcggaaatatctcagcaggattccatatcgactaaccaggacgaatatgtcgaaggagaatctgaaattaaaatcacaaacttatccgaagtcccaaaaaactttccactcacaagctcagttgacaaaggttattattactattattattattattttatagtactctgtagttaattatataacatccattgactatataacgatgaatagaatctaccgtaagtattgatacttcatattccttgattacaatccaagatgaggatgatgacgatcttaacgaaggatttcggtttaatcgcacgaagcgccctaataatttacaggaaagcattttgggcctcatttcgaagtacaagttggaactagagagtctagatgagaagattaagattctagagtctcagttcttcagcaaccctcccgaaaccacaggccttattaagggctgggaggggaatctatttcacaatggctactcaaacttctctggacacaagtcaagacgaggacccaactcaaagctcaaaaaccatttcacacaaacacaaaacctaatcaccgaacacattttctcacttacatcctcaacttgtgctgtatccaaaatgctccttaacaactaattacatcactatcactacctatatatcactatattctatacactgttatatataccataatataaattgtattatatatatgaagaatgaaggatctgttgaaaataataaatgtaataatggaaaatcatttattaataaattaagatcaagtatttatttaaaattaaattgttggtttagaaaatgacaaatttcctatttcgtatctagaatttagggaatccgagtgtaattttaaataatcgcacattttttaattagataaaatagcaaaggagcggaaggaggttttaaagagtattggagcttcaattagggacaagtgcaggtaacctcttttcaaaatcttagattcaggcctgaaattgatgattacgtcaattgctgttcagaaaagcgttttataatttttaattgtaaaaaagaatctaaggagatgcacagatgcattcgacattatcaacaagattccgtatccaaaactcccacaaatatgttattcaatgagtaaaatatatttttagacaagccccgaagctattcgcaaggcaatgtcgaagaggtttgaggaaggtcaaagttcagcagtaccctcgtaccttaagtcgggtcaagcagagagctccaaaccatgtaactaaacatataaacaaatggaaatgtaaatcaagtaacatattattaagctgcgtttattcaattttcattatttctcgattgaatctttaaacaaaaaatccaaactggaaattttaatctttttgataaaattgatttatttctgaactaaaacaccattaaatcatgtattttaattgttaaacctttgtttaactcattaaatcttaaatgtcaattgaacttttgttagtaaagcctttttagttgtgttaaaattttaaattgaattaaaattttaattaaaaaaattcagttattctcttaattatgaattttcattttcattttcatttaattgttcaagataaattattttatttttttataatccattatttttttagtaatggtgaattgtggttaattggttttgagaatatcagatttgatatcggaagagaaagtttcagtaaatgcctcccatccgtgttcgaaggatttaccaagccagtagaagaaagccctcggtcccttcatgtcattcgtggcccaagtgtcgatgttattgaggtagtccttataagtcttgaggtaaccttgggacagtagtactatgaacactgtgaagaagtatgacaaaaatgtgttaaaggcagtcatcgaagagttatactggtcatttgtttgcattgaagcggcggagtacccgactgtgaccaggactgcgtgtaaaacgacgaaaagaatggtaaaaaagcctaaaaatgccttattcttagtcatcaattcagccaacttagtgtctgggtagtgacgcggcactataaataggattggcataaggaggaatggaacaatcagtagagctgagaagttccaaaatgagtgactatgacgccagtttttgttagggcctaagtttgtatattcgcaaaggaacacaattatagttgaggcaagaccaaccgcgaaaacacacacaagatcaatcctataagcaggccttaattcagttaatttgtacggggcaattgctgggtaaacgatgtatacatagcctaacccgaagaacgtaattaagattggcaactttgacatccaaaggttataaaagaatgaagaccctctaaactcaaatgaatcaggcattagtaaactggaatcaattgagaaataagtcatggtccaaagtacagaagtggtaatgcacatgaaaatggccaaaacagtctggatagtaacaacagcaaggttaatgttcctaaggctaaatttttcagcaaagaagaggaaaaccagttgataaaccaccacaacaatgcctgaaactggaattgcaacggcgtaccagtggatctcaggtgatgagacgttcattacgaggccctggttaaaagagaagaccagagaggaaattgcaagcatgtaatagaagaaggttaaggaaccatgatctcccttagctacataggagaagagcaagagaattgaacatactaccgtggcccagttagagacaatggacaggaaattgttgtgcctctggaaccgctggggaacgaatgaaacgtacagagtgacaagcaacatccctaaaaaataacaaatctgggttgagttaaggagcttagaaatgaacaggtccacactgctctctggcacatggaaacgtctgacggtaaagtaaactgcgttcactgccaaatacaaaggctgaagcaaaacgagacctgaaagaaacatagaatatttcctcaaggtcttatttgcctccaatttcatagtaaacaacatcttcccactattaactacttatagactgataatcacagaaattattggtatgaatagttatatatgattatggattatgttttggtaaaaaatttaaaacgggtttatcaacaaatcggttgatatatcagtgattcacaatcaaattgactttatcagaccccatacaggaatccaataacaaattaaaccacttgtcagctctttaaatgattaaaatagttgtaatataacagactaatttttattacctttacctgtgacttgtcagattttactcctgatttctatgggttcaaaatccataagctttgtcattctattttcttccaccatctatgtagtattagtttagttaattttataattaattttgtataatttcaggtttacacctttttgcctttttatatactatttcacctagggtgtaccttttcatgattacattacttttatcatttgttattttgtgatagttttaattaatttcaccttttacctgggttttcctatttttaaaattttgtataaaaattttaatctattactacactttgtaagacttattttagttttgttttccaacattttgtggatatttatttgttaagatcatgtatcttcttcctctgaatctaattctacagtaactgtttcttcctcctcctttttcttcttatccggtggttcttgatcttcagattcagatggttgacctgatccttcaatttcatcgtctgattcttcagaatcagttatcactataatttctggttctaattgaggttcttccaattgctgagctgtttgagtaggaggtggttgtataaattcttctgaatcatctaggctttcatccgcataaagttcttcagccgttgtttcaagttcttcttctattgtatgagtagaaaccacatcttcttcaattttgttcttatcaaatggataatcatcctcaccaagctgtttctttctttctataaggctcctttttcctcctttcttcctttctagataattagaatcgttaattaccctaaaggtaagtctactcactatgttttcgtcaaaatcagttacaccagtactgatatttgccaactttttttgtatttctttatcatcatgatacgttctcttaatttctgtaaaaagtgcttttataagagcatgattttccgaatcttcaggggaacaatcgtcaagaggtgaagtgcgtccaggcccactcccacttttgaccaaaaacgttgggtaccaattttctttttcataataaaagcagtacacaaattgaatcttttggccttcaggcggagcttcaaatagtaaattatctttgttgtatattttacaaatatattgaccaggcattgtctggtaactataatatgtcagacccataaattgatgtctccttactataaattttaaacgacttgcaaaaaagttaacgtccaatataatattatcagaacctcccaaggcaaatttaaacaaaagaaaaaatacaaaatcaaaaaacataaccatacttatggaatttgttaagatcttttaaacaaccactagatagtatcattaattatttaaattttacttaattaaaaaatattaacattttatcaacctattaacttattaagcattagaccaattgatacaacatatttagatttaataattttttaagaaaaaaattttcattagacaatattctacattaaaatctatgaaatgcaattattcctgaatttcctcatcggattcgctagagtcactgatcactataatttcttgttctaatccatgatcatgtttcggcttcttggaaggtggctgagaatctcccggttcagattgctcatcatctgattcagtttcctcatggtcagattcagatgcatcagcttcatcataatcagactcactaaaatcactaattacaatagtttccggttgcagttcaggtttatcaatagtttgttgatcaggttgtgtaggtatttcggatttttgcgtttctgatggctctacaatttcagtggacgtctcagatttttcctccttttgataaaaactgccgtccttaacagttggtctaaggttagttgagttaaatatctctttaaatttgggagtctcacctttataagatacacttttataaagtctgtatataagactatttaaactcgaaggttgggcaaaaggatcgtactcggaatcaagatcttttaacttttcctgtatcactttattttgtgttagattttcttttatgaaatcaaagaataacttcctgcaattattgcgttccgtctccaaagtagatgaatcaactataggggtatgttcatacccgtgagaatgaattaatattaatggcgttccatggttttcttcaacataataaacaaagacagaagcaaccacttctactgaaggtcttacgaataaagaatgacctttgaaaactattgaacctacctcatagccaggcgaaggatggaatacgtaatatggtattcctttatagtactgttttaaaactagccatttgcttgattttacttttaaatcaagatccattacaaagtagatgttatctgatagacattttccagcaacaaatagaattattatcataaacaaattcataattataaacttaattaaaacttaaataccatatctagacttacacattttgtttaaattttaaataacttggattgagcttacaaacattatcccaaaaataatagattaatgatatactaattaaaaaatacataaagataaaaaattcttttcttagtgattaagttgtgttgttgatctaacaatccaaataccatagaatggtgcgatgtggattttaaaatatcagcttccagttttcatcaaggttcgaatctaaaaacccaattttggcatcttggaatgttgagagtatttgaagatcggatttgggtaaaaatcttgagaaggttgggaagttcttgaagtatgggcagagctaaaaggttgagggagttaaataaatgtggtgaactaacctccttatgagagatctgccagtgttcaccacaacaccgttcactacagtagcttggtatcccgcatctaaaacattttataaaaaattacttaccttttgcaatagaaaaaattaatttgttcattgttgaagagatgaatgtgtgggagatctatgtggtaaactctggagcactcgtagttgaagcatggcaatactctgggaaatattttgttggaagagaaattaacttttttttcattgactgattcaaaaatgtttttacatttgtaaggaactgtgattttagaggatgataaagaagaaagatcataaatcaagtgtacttttttttcaaaatcctgtaaaatacattttcaaaatgttaaataaaaattttaaatatctatttattagcattattttaaattaattcgccaattcattggctatattctagttaataattaactaaaatgaattcctacaaaatacttgggtattagattgtaaaacttgataaagtctttctaacattccaacacaggcattggaatgatacatgttaaactcgacatttgagatagagtctggcgagttaaaaccttctgaaattcccttatccagtgatcttttcacgttatgttttagagccttaaaaacctctttaggtacttgatcgaggcatttatcagaaatggtcaaaagtaaaatgtcagaaataaaagaaactattttacacaaaatcctcctatccatactccaagaaatcaagggtattatggaattccacaagtaacatgaggacgatgaatgtagtttcttcagaaaacctgggcccctagacccgtaaaagtaaactgttgaaagctctaagaacgtgtaaaacatcttttccactggttcttcatgcttcgatttgagttttattcctacatgagaccacatgtacttccataattttgatgaaacaaagcgaaaacacatttgcgataagtttgcctaaacaataaaattttcataagaaatatacagatttgtattcaaggaggtatggaaacaaagttattaacgaattcatattatagcataaagcttcatgatcaataacttttgatgttaaaagctcatttattctgttttcaaaaaataagtaaccatttcccctaataattagcctgagagagcctggaattctattctcgatcatgccactgagaagttgaaaggcgacctcatttctcagagtaagtgtataatttggagtggaggataaattgtcgccaaaagcagatttgatgtgatattttacaaaattgtaattgtcaaagtaaggggtaccaatactaaacactgacttcaaaatatcaaatccaaagttatgggtgacatctgcccaaaatttaaaatcatgtcttctttcaatgtttatattagtccaatcagtttttgaggtcgtttttaagttgtaaaatatatctttgagtaaatcaatatcatcctgttcgtttgaaagattacacatcgaggaatcatgggactataaattcaaatagtatatataggttataaattaaacttacttgtttgtttttttcatattctggaccaaattccgacggttcaaattttggtgagtcgtatgttacaattccacggtcagtcatgggtagattcgaaattttaattattaattttcatgaatttttatgttttaaattttaaggaaaatgtgtgaataactatccagaatattaacttatagcaatacccacaatcattatataaattttaatttttatttatgttttaagcttaactgatgattcatttaaattaattaatgaattattttattttttgataaaaaatgcctaaaggggcaatacatgtaagaattattagaattttgtttaataattattttagttcactggtagcaattttgccataagaagaaggttaagatgggatattctagacagaatgagaaaattaatagaaaatgggacatacaaaaggccaagatggatggattgggtaaaaaattcctaaactttatttaccgtgtttacaggtagagcgttatccaccgcttgagactaggaaccttcttcatactgaaaaggttataaaaaatgtctatttgcctctaataaactctcttcttaaaaagtatcctcatttgaggttcgaaggctgttttaactccgaaaatgagtggcaaaaaggtttgtttaaaaatttcttaattaattaacaggatttgacaattatactttcgatcatccggtgatgcaatttgtatcatatcaactaagtcttatgaataaaggaattagtaaggaagaagcctttttaagagtaacaaacttcttcctcacgaatgtgcaggctgagaaagtgttttataagaatcgaattgaatctgagaagaaacaaagggtgtcaatggcatttggtctcgatgaagaggaatcactctcatatactgcgggatccgcttatctagccgtacgttgtttggtttaagtgaattttcaggaaaaagaggctaaagataaagttaaatttcttactgagattagagatgagcttcggttattttttcctgaatttatatggctttaggaagttaaaggagggagttttaggagataaacgacaaaaatctggtgattaatgggttgtaaaatgaaactttaaattcccttattttccctgtttatgttatacttttattattttacactatctacaaatttataattatctggtgtgtttgcaaattattaagccacattttagattatatgtattataactatcaatgcagttaaaatggacaaatacgatggatctagagtgttttttagagaaatgtgtaaaaataatagggatgattttccgtatcggaggggagtaataatgtcagagctccatactccttgctgtccagtggtttgtaaattaattctaccagaccctttgactattgattttatttctaaaatacaacagaagccgtttttgtgtatacaattttgctcagttttgccgtgtttggaaattcttgaggaattcgatcgtagatctaaaaatgacaaatctctgaggcgttttgtagattatgaaggagcgacaactcttttaacttttaacgaactatttaataaatattcgaggattgaaggcaatcagtttgtcttccatgtggacagcgacaaatatcttctaaatgaacacacatcgaagaaaatcattgatttaattaacccttctatttcaatcatacccactttatcattaaagcattcggaaaggaagaaatggagcgcgagaaagaggacaaagttaaatgatttataccaaacttattacgaaacactatcaaggtatccaaacagcactaaactggttaaacctattcatccttgtattgaacttaaggaaatgggtgattttgaggtaattgaatttccgggatttgggtttggagaatctttaaatgaaagatatgaatggataaaagaaatgggaaagaatttgacaggaaaagaggtgagaataattcaactcaaaacgggaacacctttggagatactccatgctgttttaatgggttttgatgtggttatttctccctatcctgagtctttatcggagcaaggatttgcactatcatttgaattacccagtgaatttgaggggaattatgaaccggaatatgttttaaatttattgaacgaaagatgtaaatttttcgatggagtttataaggaccaaattaaagatatcgttgatttgaaaaatagtgtgcacatcgatgttgttgaatcacttatggacgaaaaatcagtaaggaaggaatcaagggcatatattaatcatcttctaaattgtaaagaaatgaatggaaacataatattatccagtcataacttatacatgtatgaattgttgtttcaaaggatcagagattccattgaaaatgacacactggtgaatttcgtttataattttatacagcttaacgttaaaagagattaatttcccttttaataccactaattttgtatgaatatacataaatattagcaatatataattattttttactttcttctggggttcgagtggaataattttaaaaatatgaaaaattaattttatatctaataatttcactactttaattgttgtaatttacaatcacttttcataggatggaagatttaaagaatctcggaaatgatgcctttaaggctggaagatttatggatgctgtagaatttttcactaaagcaattgaacttaatccagatgatcacgttttgtattctaatagatcaggcgcatatgcatctatgtatatgtacaacgaggctttagctgatgcgaataaatgtatcgacttgaagccagattggcctaaggtatagatttcccctattaagtacactgtttagggatattctagaaaaggattgtgtgaatacaagttgggaaatcctgaaaaagctaaagaaacttataatatgggtataaatgaattattttaaattctttaggtctggcttatgatccaaataacgaatcactaaataaggccttgttagaggttgaaaatgatagtaagtcttttaaatttatttttgtatcccacaaatattttaactatgaaatattttttaataaaattcttagaatccgacacttacatccaatcactattgatggtttcacaaatcatccagcagaaccctaaactcagaaaataccaggaacaagatcctgaatacgcatctaaactcgcaagattggtttcacacatgaacactgatcccgcggttttacaacagatattaactgacccagtaacgatcattgtaattattaattacttagaacccaggtttgagagatggcttaatggcttgtatgggtatgaatcgaaatacagaaaagagggaagacaatattgaggagaaacctaagatgcctgaaccccctaagccaaaggagccattaactccctcccaagtggtaagaaattattagaattgctaatttataggagtcaaacaagtataaagaggaaggaaacaatttttacaagcagaagaaattcacagaagcattggaaatgtataataaggccatagaactggatccaaataatttattgctggagaataacaaagcggctgtgtatttggagatgggtgattacgaaaagtgtatcaaaacatgtaacgacgctattgatagaagatacgatgttatggctgatttcacagtagtttcaaaggtattcataacttataaagtgtttatttaccgagtaaatgtggctattaactactatttagatatacaacagattggcagcctgttatactaaaatggagcgttacgacgatgcaattttatgttaccaaaagtcattaattgaaaacaacaccagacagacaagaattctattaagtgatcttgaacgactaaaggagaagaaagaaaaggaagcctacatcaatccagaattggcagaacaagtttctatacacacaattacttcattatatattatagttattcatgatttacaatcaatttatagcatcgtgaaaagggtaatgaatatttcaaggcttttaaattcccagaagctaaaaagggtaaataattacatttaaaatatatgaataactttaattttagaatatgatgaggcaattaagaggaacccaacggatgccaagttatattcaaatcgagcagcagctttgttaaagttgtgtgaatacccatcagcattagcggtaactaatttctatcatatgtttgattaggactgtaacaaggctctggaattggatccgacttttgttaaggcctgggcaaggaaaggaaaccttcacgtcctgctgaaagagtatcataaagccatggattcttacgacaagggacttaaagttgacccaaacaacaacgaatgcctgcagggaagaaataacgtaagtgataaattcccacttaatactcttagtgtttaaataagatacaagaaatgaacaagggcgaaatcgatgaagaacagtgcaagcatgccatggctgatcctgaggtccagcagataatctgcgaccctcaattccagttaatattaaagaaaatatcagaaaatccgatgaccatggcagaatacctcaaggatcccaaaatctcaaatggaatacaaaaattaatagctgccggtttgttaacaatattatgactttttataaaaattttaggtttaattagaactggctgaagttttaaatatgtgtaaccactaatttctttcattatatattttttcaatatacatttatatatacactgttgttatacgttccgtaaattatgccatgtttaatttatagcctagtatattaatattattacgataatttagtttaaaataattgattaaagtgataattgaatattttggtgttttgattcaaattaggaagattattgggcaggacactttatggctaaagagtctcactccactcatttagtgatatttagaggttgcctggcttattgctgtaactcttgaggcacgagtgtgaacatgagggtttgtattgggtcggcggtgctcggcggcgcctgtctgctaaaattctgagtcggttgcgcgcttttgtgtaagctttagatcgcgactgctacggctaggcggaccgctccaggctggcaacagagcagggaatagctgacgctcagactgactagcaagactgcagatgtagcttgaacccgcttcgacttgaactacattgtacccaccaggacatgctcgtatttcttttatacaacacttgttatactattatatagtgataatatacagttaattgtattatttattaacaccatattaatatattaaatccttttgagtacagtttaattttttcattaatattaattattcctatttaaagtattaaaatccacctaatttatcatttatttgtgaaaggagctgtgttgtggtcaatattgagataattttaaagaaaataaaaccctttccataaatcctgtttggctgcaacatttgacgggtcacagttagcctgaatgtcttgcaaagaaagatcttcctgattacggcatctgacgtaaggctgctccttcttctcccacaatttcatatcgtctgcgttacaaatacatgcccaaggatagtcagtattatcggggtacatgaagttgtaatacgccccgagattcccccctccaaagttctcttccttcttaccgtcagcacctcccttcataacctcaatagcagttagaatagggttacccaattcagcaaagctaatggcggtcactaagaaatggattaaagtgctatttaactaattttagttatagaatcttgatggtgggtttcgtgaacaaaacttacattctgtggtgtattcatgtgaatgtttagtacttgagaaggtcaatttgaagaacatgaacaagattaaatatttattacttaatttggaaaccatttttactactaaaactaaattaattcacgcactcccgggcatttatcaagacattccataccccctattcctgttttattatttcatatatattcttattattttttacaattctttcttaattcttggttaacagtgaaaaattaatataatttctaattaataagtaaatgtgtaaatgaattcataagatgctctaatacgttcgtatgtacacacaatgagtaacaacaaattcaaaaggtgttgaaaagtatgtattccgacactacatcttcataatttgccatgtttctcgggtcgcaattggcctgaatgtcctggtatgagaggtcctcctggttccggcacctgacgtaaggttgttgtttcttttgccagagtttgaagtcttccacattgcaaaggcacgcccatgggtagtctgtattatctgggtacatgaagttgtagtaggctccaaggttcccacctccaaagttggcttctttcctcccatcgtttgctccagttaaaatctcaactgcagttaggatagggtggccagtttccataaaatttggcttttcaactaaataaaaaattaaattaagataaaattacgaggatgtgctttgtgttcaatgaactgcgatgccagtcttacggataggatgagaaaaaataaaattacattcatttttatcaagtaaatttaagtattttaggaaattaattttttcttgtatattaaactatttaattgcactgattgcagatcatgggtgtggaatcccatcccagaccctatcacttgccgttgttacatattaaaatccactgcctaatgattttattaaaattaacttaatcttacctgatcaagtcggttaggatgtttggtagactatttatattgttgataatcgaatagtattcaaacgggaagttatcaaggtacttttctatcacaatttcacctccttttccatttttgatggatttcatcttggttatattatcgtttggatcgagtatgatgaggagtggcaaaatatgattctccgtcagctgagttatgtattttctaatcttgttcttattgaatttgccatccgttatgatgatcaacaacttgttttctgataaaataaactcatactgagtcagtatgaactcaaataagtttattagccctttttcataagaacacttactttcctcagtaaaatcaagcaaactcaacgaacttgatatgttattacaattatttccaccaagtattatctcactactaaatctacaacacagattatcacatatagctgtatttactcatatatctgataattaaagtgcataactgtgttcaagtattactataattatttatgacagttgtatactaataaacttacgctccgaatttgataatatttaactttgttatgtttaacttgtataaagcctaaaatacattttgaattgatgctaaattacctggtatatgatatatatcgtctctaatgttatgtttgaaattggcttcatcgattttgtgttatctatagctagttgtatgtaatagttcctctgggttttcttaagtctcttaagccaaattttagaattttggtagtttgtagcaataaaccccatcagccgtttaatgcttatttttttaccatacttatagtaacccttgaagccactgcacttgttatactccaatattatactaaaataagattattttaagagtagtatgttattatgtaactatagagtgacaataacttactttaactggtgtaataaattgtttataagcatttcacaatcacttgtttgcagttggttttcagtttcttcagttaattctgatgattggaatgagtttaatggatccttttcatctctatcctctgcagttttaccttcagattcattcaatgattccccaagttcacttggttctaagttattcctttccttttcttccaagtgtgatttgtcattatcgatttcgccattatcttcagacgtgttatcattgttttgtttaagtgtgttgacatcaacatcaagatttgataattgattgagtcgactggtcaatccacaagcaccctcacccacattgttttcattaacactttcatctttggaatctataggtaaatattagtttttatatagtttttgtataataataatgatttcagacaattcctcctctaagttaattacaacattgatattcagaggcctcttagttgtgtcatcattaaattgtaatagaacttaccctcagaagtttcttcttttagtccagtaacatttccagcagtttcttcattctcgtcaagggatttgtattcctcgacttctttgttttcaacttcttgttcctcttctagctgttgctccttttcttcaacttcttcatcagaatcaaactcatctagttcgtggtctatcgggtttgaatattcttcaatctccttctctacgttatctgaagtctcttctaagtcatcttccagtttattcttagcatctaaatccacttcctttacttcttcagagtcacctacattctggatatccttatcttccagttttggttctccctccatttgttctatatattcgacgtccatatcaacatcctcacctaaatcctctagatctttatttatatcatcgtctatgtcaatgttatcttggtcttcgaaatcttcaacgtccaactccacatcttcagttctttcttcttggttaagttgtaactctccatcttctatttcatttgatatattcttaattccaacttcattgtccaatccaacaccacccggctctatatctccttccttcatttttccttggtcctcatttgcggtttcctcacctggtattattaagtatatgtacattaattttaccaggtaatttagtacttttacatccaaatctaacctacttttaatttttccattcgtaaagacatttaatttggattcttcaccattattaagggttaactttcccaactttgatatattgtttaatagttcattcgaatcacctaaatcttcgaccatcttttcgctcttaataacaccgttagtcatgttctttttacgatttctatttattatactatattgtctagtacataaagtcaaattataatgagaatctgactcatcaccaactgtgttatcctccgttgaattacttcgaattaattcaaacaacaataaaacaacgttgagaagtttaaaattggtttctataacattataaaagaggtcagtgttgaagttcaattctggttgtgatgttatatagcttatgttatacaggattactaaggaatcaaagacagttctggtagtcatattagtggtgatatgattaataatataatttatatcaatttggttattggtattttcaaacttatagtaattttgaatgggatccacggttagtgatatgagccgtttatgctcattgatattcatcttactgtaattttccaaaacattactataattggcaattagcatcccaattattaactcaatttctatcccgtcacttatttctttatacattctaaagccatttaagtttaaacccgaattttctaaaagcttcagctccgtacttatatattgttttttattattaggcaacacttgagccttgtaaatgtgtgatagatttttctccgacaattcagtgttaattagactttcacacatttcaaaaagatctcccaagttatcaccaactgtgttactactatcaatatcatttggagtattaaatttgttaggcttgtcaactattttaacattgttaaccattttcttacatttaataacggaatcattaccattttgaatggtttcaatgactttttggtgaactgatgatctgatttcggaaagaaacaaacttataaagtctatagaataaaccaaattgttatccaaagatttgaaaatagttaggactccatcaattaagaacacattcacacaattgttattaagcaaatgtgaaagaatagaactacaaatcttcttgcctgaacatattattctcattaagtctttaaacaatagattaaatgaaaagcatattctgcccattaattcatttttcttaacagaaataacttttttagaattcataatactggtgtggatatttttgtaagaatgtattatcacgtcgttgaatttattattgtgtttaatattcaagttaagtaggaagagtaagcaggaaataacgtagtactcgtcaattaacttattcccaactatcagttgaaccatttgctcgttgaatacgtatccttcggtacattcagtcataattgaggcctttattataccgagaatatgaacactgttaccttggtttctacaatactttaacttatagttgtagtaaagtatgaaaagataatattgtaacattctacgattgttcaaaagaagtgtaagaattgagttactgcccagtagttcatttatatttatgtttataccaaacttgtaaattgttcccattcctgtatttccattctggactacagcgttactatggcttgtatagtataatttgattgaattcaagactagaatgggataaattatcacgtctttaatcattttatacttgttaattgcgtaattcacataattattaatactctcaattagggcacgtttgtcattggttgaagctccgtcagttataccaccgtttgcgttaagtgttcctaacttcaaattgacgacaaactggttatattcagttataaaattataaatcaattttacaacaccactttcataggttttacattctaactcatattctattttctcctcagaaacaaaagcacttctgataacctctggaacttgactaacatatcccattgataacgagtctaaaatattaaatgtgttcgagatttgtttaaattcctgtttcttatatttttcaaattgttttctgtaataatcctccatttctcgaatatacaaactaacatttggtatgatttttaaattctgttctaccaaaattttcaaaatctgatacagaacatcactcgcgttttctctattcattttccccaaacaattcaacacttcattctccttagaatgttcttctctaaccattagttgagttggaccttggaattcatcttcaatccgagaatacccgaataaaactttatatttttgtgataaaagacacttgaaatccgagtggaatttggaggaatctgcagtaaacaaaatgtacataaatatcaaagtgttgtgcaccttttcaggctcgtattccacattataagtcatttcttctatttttgcatcctcaacgccgtttatatatccaaaataatggtacaactgactattagaaaaagattcaaggtgctcatgatcagtgttattaaacaaaaggtcgatgtagtgaagtatcccctgatttctttcaccaataatggtattagagaagtgaaatgcataaaataataagttgtacaagttgacaatttttggtactcgaacataatgttttatctcctttatgatactgttaaccacatcgttttctgaatcaattttctcagcgtattgtagtattttagaaaaatcatagtctttaatatccagaaagtaatttctataaatgatatagattatatacaacaaattgtagtaataaatgttggtttcgttcacgttggatgacatagtttccaattctattggacgtaaggatacactcagcaaatccaaatctaaatgtttattttcatttattaggttgtacatttcattcctatcacattttatcttcgattttaacatctcattgtatgatatgtacttaacatctaccaaggcatcactcatagttttgttaatcaacccattagggttaacgtccaagtgtgttgaattcaagaatgaaatgtaataaatagcgtcaatgaaatcattgttatctataaggtatagattactctttaaaatatggttatcgcgtagagtcagtaacaatagagttatattgtcacagtcatagtatttgttaatataccatataattgagtaagtatcaattccgttattaatcatcgttgaaatttcaccattacccattacactgatataagttttcatattttgactagcatccatttcaatttcatcaatttgataaaatttagggataattccttcaacttgcatgcgggaacaaacaatggagttgtacaaacgaactaggtgaatgtcaagtgaataaaaagtgtgactgctatctaacattatcatgatatattttcttagaagattataatacttgttatctacactcaatagataatttagtatacaatcaccaactgagaacaaggtatcttcagccaaactcggataatatttttcaattattttatgaaatatttgtacaaaatcatcattatttatgtaaaaacgaacaaaatacaacagaaactggtcattgaggtcatacatcttactcaaaattaaatacagcattgatattattatcattgcatctacatctccaatttcctttattctatttactattgaatatatttcataaacatatacttccacatccactgtgctctcaattccttttaatatgttttctatcaatattggattttcgttgtgcaaaaattcatagtttttaatattcaggtgtatacatcggttaagaaatgaatttgaaattttgtacaaataatcgctatcaatagtaaaatatatcctaaagttatcattaacctttacttgcctattataaccgcactcatttatattaaaggtttcacagttggaaaattctgaattatctgtttgagagtaataattatccaacaatgaattaagacgatccaacaatgaactgttaatcaggtgtatgttattaatgattaaccaatgtcccttttctatacacttgattaggtcactatctatccacttatagttgactgttttcctattatacaacttcatattttcatccatctgctttagtattgaaattacctcttctcctaggtctcgttctcttatatgattacataactttgaaatatatgctataaaatgatcactaccacatagacaatctctataagggggtttaagcataaactgtaggtaaacatcggtatttttaattttactcaataaactcgtatacagttgaacaattttgttgtaggcgtaaacactgtttatctgctcatatgtcccaattatgtcattaacatcgttgttttcatacaaatttagtaaatggattttttctacaaactcttcatttccgtgttccaattgaaaatcaatcaacttgtgataattttttatgatttcaattatgttatttgtgcctttgtacagaaagagaatcggtgttttaaacttgtagagcaacatcaaattattatacacatctatataatctattatctcaattggtgaaacccctttcaatacaaatctctttggaagagcataacctggttctagtttgttacttaatcttctcaatatacttgtgttcagcttgtaattaatgttaatatcaatcgaaacatgttggttgtagtgttgaattagtttaaatatgttcatcaagtctcttatattatatagtaacaagttatgatgtgaaccaaatttgtcagaataatcttctgcactggagtttgtcagttcatgattaattgtatcaatgagttctatatactttgggattaaatgtttcattgttggatatttttccaataaaattgaccgataatcgtcatgtgtcaggtcttggactttgaatataatgaagcggttaaggagtgattttgggagctgctttctataatttgttgtgattgaattttgtgttgcaaataagcggaaatccttgtgacatgaaaacgttttattaatctcaggtatgtaaatatttcttctgtggtccaatatcgagtttattcctagatcaatttatacaactgatacttccattttaactaaataatactatgtattagatatataatcatgtaagttatctgttaccttccaaaatttctgaagatgctagattcaattcatccaacaacacccaagaaccatttaccacacactccaacaatggaccatttttccatacaaaacttatctcaccactatcgtttttatcactgggtacaaatgagcctaacagatcacttatatcggtgaactcatttaaattaactctgataagtttttttttatattttttggctattttgcaaacattatatgtttttcctatacctggattcccttccaacagtatatttatatctggtatattctctatacacttttgcatataatataccagatctttattaacgtttttcaaaacatcaacaacagcaacgtaattgaagttaacaacattaactgtcacattcatggagtttaatataatcttttggacttcactggaattcaaattcgtctgaactgagtttagtattgaaatgtgcaatccatcaatgaatattgaaatcttgtcatttaaactaacatctgtttgtctagacaaagtgttataataatactttgtccatattattatatttcttactgtgaacctagctgaagtaacatcacctataatctgtggagtacaatttgagactaagttgagaatttgaataattgagtttattatccaatgttcaaccacttgagttgaatttctattatgttgtaggataatattgtaaagaacactaaaatctgtgatatctatggcaggaacatatattaatgtgaatctattagatattgatggtgagagttccttctttccaaaatcatttcctgggttcattgtccctattacacggaaattcttattactatatacatattccatgtcgtttacacgattaggctgtggacctgatactgcattgttacacgggcgtgagccagaattcaatattatataggaattaaactccaggattgagttgattttctctaatatagaatcttgtacaagattaatttcatcaaacagaaaccagtttccttttatcatgctttctattaatttgccatttttccaaataaaatttgggaaactgtcacctttatttgttggaacgaatgatccaataaagtctatcgtatcagtattgtagttacagttaaaaatgttcaatttcgttttaaagaatttggacaataactgtactattgttgttttccctataccggtttcacctactaaaagaacatgttctccgttgatcagagcctcagtcaccaaatacactattcggtctgtatacccttcaatccaataatagttattattaaaaaaaaactccttcagatattctacttcaaagtatttacttttccttaacaactccacataactcttttcaacatcctcaatatcatataatcttttccttttatcattaactatgttgttattagtttggtccaaatcacttttatcaattccgttgttcaaattctggctgataaaggaacctattatcgtattaaacagtagtgatttttcattctggttatgtaacttttcacatatcaatgcgtagtaaaaaataatcaaggcctctttatacagcaagctcccagatacttcagtgcttgtgtaattgtttagcctatttgccaactttattaaatctcttatcgtgatcaggattttgttcttgttgaagagtattgagtttaaggtagtggattttatgttattatatattcttaccatcaaatctgactttgttactggcaaattacacctcttgtaaagtattagtttcaggtcctcgtttgtgatctcatcaaaataaatttgtataaaacgattcttaaatgaggtagataactgttttcttcctccatatatcgaatcacatgggttctgtgttgcgaacaacataaaattttcatggcacttgataacttcattggtttcgctgatatatatctccttgttgtcgtccaatatacggtttaaacctaaaaaaacaatcagtgttaattataaataaaatattattatcatacattccaagacgtttgatgatgccaaattaagctcatctagtataacccagtatccgtacttcattgctatcaccaatagaccgtactgaaagaccaactttccatctaaaatgaattgttaaccaatagatcttacttatgaagtggtattgtccaatgtactcggttatgtcaatgttatcataattgttaattctcacacatttgtttccggttaacttacacaggtaagtaacaatcgacgtctttccagctgctgtagggccttccaacaggatcggcaccttcaatccgctgattattctaacaagtttgaccaggtaatttacattattactgcatattataaatttttcttcagtatttttttgatcttgcaatgaattatagttaggcgaatttggttcttgggaatttcctaatttaatccaatagttacatatatttatgtatcccttttcagtaggcatgacagtattattgacttcagtggcatataagttattaaaactgttatcaggctgagtttcgtaatatttggacagttcatttggtaacaaatcaattaatttactgatggagttttgttccagagttgacaggaagtttgaatagatgctatcgaatattaatttactcaagttattcactggtttaaactctcttgttaacttgtttacaatgtataaaacacttctcacaaagttcctcagtgtaaaatttggtaaattgtgtgctccatcctctatctcgcattgttctaccatctcagtgacccgaatgtaaaacctgcacaactctcccaaattaatgttcaggtgtcctgtgtagcagtttgccaccctaagtaggtcgtcataactccttatcggatcaacatatattgtggtgaataacttcaatatgtttggtggaaggtccttcttaccggtgttcaccctgataatattgttttttttaatcattggtggattcatacatgcgaacaaacgaaagtttctattaacctcaactctttggtttatatactcgtacaactctagatatattttattttcattattttcaacatccatattagaattagaatatatacttgatagtagagagtataacttgtacaataaatcgtactgtgataaattaatctcatccaacagcagccaataaccgttttttatacattccagtaaaatcccatcattgaaaatgtattttaccttctctaaaccagcttcttcagtagtaatattcttaggcataaaattgcccaaaagatcactagaatctgaattttctgagaacacaaacacctttaacacgtttccggttatttgtgcaaacttttgtatcaatgcagtcttgcccgttccggtctcacccaccagcagtacaggttcatttcttatgtatgagctatatatcatcttcaatatttcattgttatattcttcatttttcaggatcttatcatatattctctcattcggttgattatccttttcaatagatattttatcctctgaaacgaatctttttaataatttaaatgagtgaaaaacatcatttaagctatcaatttggaggtttaaaagttttgagaaggttgacgtgatttcaaatctgagcttggtgcaaccaacatcagaaacaaatacgttgaaaaaatcaaacaaaatcaatttcttcacattatcactcgatatatccacacatgtattcgtagaagtatcaaactgggtagtaaagtatttgagatacggataaattcttttcgaaaactttaagagtttacttaagttaatcagtatttcatatatttcaccaatatcaaatattaagttgagtatcaagggtgtgtagtgattagggtacactctggaacatatcccaatcatgccatatttatccaactttttagtatatattgttggaatgttggacagctttaatccactattcagcaccggagtatttaaaaagaagatttgaaaattttcgtccataacaatagtttcattgagttcgtttatatacagtgatttagaactacataggttaacaaggaaagatagtactgaatctgacagataggagtcgaaaataagccatttaccctcttttactgctcttgccacaattccgtatgagtatacaaactctcctatattttcacccgtgatccaactaccaatcagggccttaatctcagtggattcatctgtatatacatttatcacttcattatctgccattccaagtccttttgacaataatcgtatgtagtaattcttacaggaaccagacaatactacacctatgctacaatcaattccaaacaacaaattggataatatttcatagtcttccatgtcaattggaaccaatgaatggctttccttattgccatgttcaaacaccttagcatcttccactttactattttttcgtaaaaatgaaatatgatttgatgtttgtatcaagtttggtactaaagtattatcaattttaacaacattgaatgaatatgtgataggataggtttttttagggtttgagttcaacacactttcagaaagattaaatatttcctggaattcgagatcatttaacttttcaatctcaactaactgcccgggatccaacattcgtctaacctcgtcccatccttcaggagtactcagcttagagtacaatatcaaattgctcaattcattcaaattcagcctataatatatatgtcaattcaggaaataactacttataggataaagtaaatgactagttaccaatttgaaagtcgggaaagtatacggattctacgaatggtgacattatttagtctgattcgaattaaatcattcacaagagagtgcaatcttaagttatttctgcattctgaaagtatccttgagcattttcttccaattatagaatcatttctcagtctgtgggcaagtaacaacttttccaatataaattcgtcttcacatatggaatcgatcaactccagtgttatagataatgagatatctgggcaagtggcaaatgcgatttgcgatgttttatagtttaatatacaagaggttatgagagagagatatatatctattttacaactagtcggtatatcatttctcgataaaaaaaaggagagttttacaaaaatactcgcaaactcatttcggtcataaaaattatgagaaaaaagagttgaaatcgtgcgagattctatcctggttgttcttttttgcgatctttcaagaaagatttccttgtaatatgagaaatcaatatctttaagattaaatctatcatttggaaggtatttaattaatgaatttgagattattttacagtaatatgacaaaatgacggaatgatccattttgggtgaatgttttacaattttttaataaaactaacattttagaatatcgaaatggcgcaaactagcctacaaatgaaaaacataaataattatcactccatcactggggcaatcgttatctttatattcccttattatcaccatacacataccatatatgtgggtaaatatagcatacaattgtcattaataatttgtagttgtttataaagagaagattatttggaagataagaatttttccaagcctttaagccagaccatatactccctttgttccttatcgatgctacaagcgtcaataaagtcgcaaagttcagaatccactcctagacttgcaagccattcatcgaaactgctttgtagggtatcatcaagatcttcaaactcgggtccgttgtagcttgagactgagttcttggcctcctgatcggcatacattctgacattgcagataatgtatctgtacttttcgtcgttttgtagagtactacaaaagaaagtaacaccttgtcctactgggttctcaactgttactgagaaatcggtcatttctgcttgagtttctccgtctccttcggcctcaaatggtgatacgagttggaaatcaacaaccacagacaaatctaagacattattagacattttaaatttgtaaatatttactaatatatgattttattggtagttagtaaaaaatacctcctactttcttttcaagagtcatattaacatcaccatccttctctacaaatttccaacctaaaatgatatgaatccaaacttatttataaaatttgtctaacctgatttagataggtaatctttgactagatttggagcttcataatttgacgtttcgtggtggatttctccttgaacaacttgcaggagctttcctgattctgtagttaaattcctggaagacatagctattgatttaatggacttgctcaggggcgccttaacggtgaagaatcctcttgaattagttctcaaggttggcaatgtcttggaaaggtttctaaagactgatctgactaacatttcaaaggataagtatgaacaattatcttttcgggaaactacattaaacaaggaatttataacttttaaagttaaactatattgaattaatttaatacgtaatgggggtgtaaaggtttgaaaataaatcactattaatttttggaaatattaattttataacgtccttttcaaactgatattctaacattaatgtaatacaattttaaaatggagtagaaattaactatttaaatttatttattacacataaaagtgtatgtgaacatcaattatttaagatttaatggaaaaaattttggaatattcataattagtcctttaaataattgtactcaattttttataatttgttgatgtgtgagaactgtacacatatggaagttcaacaaatttttagtttcccattttcaaaaaattttgttaattttaaaatattatttctcttcatatcctagtttaaaatgaaatcaagttaatttaaaacttgcgaaaagattctgcacggagtggggttcgaacccacgcggtcatcaaaccagaagatcttaagtctccccccttaaccactcgggcatccgtgcgattaacacatcttaatattaggtttataaacattacattcgtaatacattttaatactctattcacactgatatacgtacatatatactgataatatcatatattgaataccatagtatattatagtatattgttaatgaaacagtgttatgtgattttacgatgtttaataatcatcacccctggataggacttccttgcaagttggcctgaggagtatggtgtgttccatctgagaagtaaaactgtgattgttatcggacagaggagggtatgggacaactatgccggcatcaacaagactcctaagtaccatcgatcctctcctgtttgttaaatcatccagccaccttttacaaaaggggagtgtagaaaactcctacaacaacatatgtagttgtttattaaataactgaagtatccgttttatgtttcttaccctgttgattacattaagggcctcacgagctgatttgagtctgataggggcgtaaatggagtttggatttttcatatagtgtgagcactccattttttcaactaccattccacttccggttgttgcaaatgtctcaatcgcaaacacttcgccttcttccattatatctctgttgttagtgttcccgactattggaactgcttttcctatatcagaatataaaatttcattttgtaactctattggttataaatattaactatgagttcatagtaattggaaataaaaattaccggcgtgtatgacgtattgaccgatgttatgtccggttaggtttcttattggcttaattttgtgggtcttattcttcagagttatctcataagattcaattacttcttgaatcgcttctcccagttctgatgttcttgcatcaattccagccaactttacccctgtgttagttgcctcctttgtggactcaattagtgggtcatatttttcatcgaaagctatggtaaaagcactgtcgattatgtaaccgttcacatgtgtcccaaaatccaacttcataacatcgtctaaaacattttatagacattattatacggtatgaatagtttaaatattgtaatttagtaaaaaatacttttatggaagatggttttatcgccgtggtttggggtgtagtgagctgcgcaggagttaagcgaacaaccagtaggaaacccccaacctgacttaagtccctgagattcaatgagatacttggtcttgaattcaagagcttgcacaatatccaagcaagatagtcctaaagcaatttgtaaaatatacgttggtcggtacaaatgtatagaataaatcgtacctggctttattacagattgaatataccttctagcctgtctgtgaacctcagccgcctttctcatatcattatacctttcaaaggaaagattttcaagatggcgtttttcctcatcagtagttcgctttttgttaccagacgaatattcagagatctctcctacaatcagtttacacattgttatatatataggacaacatttaatatgataacaaagttagccaaatgagagataataattaatataaaccttcaggatatattccatttttgaattgttgaactaccgttttatcggtaacaagaggagaagtccattctcctatttttctaatagattctccattttcaggattaaacagtaaaggatttcgaatagttatatttaaagattcaagttctagtatggcatcatcgagttcgtcaataatcgtttttgatttctttttcttcttagaatccgatttatttttaacttcagactccggaagaacgacttcattttcagctgaatcattcattataaaaagtataaactgtaccattaatctattggaatggggaacatcactttttataaaatgcctgggaaactaaaattttttcctaaaacaagtatttatgatcaaaaattcgttaatttcctaaaatctagctttagtattcgtgaacaccgttgcgtctccaaaaatcctcctgctacacatacgggggttaatgtaggacacgtttttccaccaacgcccaagatccctaatttaatcaggaatgttggatttagcactcttaactccacacaatttgtgttagaatccccaattgttaaaagaggatttgaaaaaaaggtcggatggtggcttatgggttagttttttaattaacatttgttaaaggttgctctggcttaacagcctttattatgggatttggggcttatgttaggctcaatgaaagtggcctttccatgattgattggagtttttttggccttccattacctcaaaatgacagtgattgggacttagagttccaaaaatacaaagtatttgctttcttctatatctattcttaatttacatttctgtacatttgcatttcttttacatagagtactaataatgggttagaaaacccctgaatacaaaggtgtgcactatggaattagtctcgaagagtacaagaatatatttttgaaggagtggctccataggatgatagggaggggttctggcgctttttttgcactcggatgtttatatttttcatttaaacgctgtttaaaaccacgaggttatttacttctcacaggtataccacttaccattcatttatgtacattaaaaggtactaataagttcttcagcaattggaacaatcggtgtgtatcaagcatttgttggtaaatggatggtagaaagcgggttttttgaaccaaaaactgagaacaaaacacctaggtaccgggtaatccacttattactgtttagagtatctccatataggctctgttttcacttttttaacgcgctggcaatttactctttatgtttttacaactcaattaatttattgtttggaaatcttagatcaattactccttcaaaggatttactaaggatgaagtggttatctggagcaactgcttttttgaccttgcttaccatggcttatggcacctttgtagcagggaacgattctggcttatcttacaacacttggcctttaatggatggaaaatttgcaccagatcaagtcttaagcattaagagccctagacaattttttgaaaatgatgccgttctacagtttaatcacagaaatctggcatatttaacagttctaagctcgttggttacgcttgtattgtcaaagaagttaaatgtgcccagatcagtgagtaagttgtcaatgggagttttacacgcttcacttttacagggccttattggagttttgacggtattaaaccaagtacctttacacggagctttagctcatcattttaatgcagttgttctttggtcagtaattctagctctattgagagttttaaagtaatttttatagagatttctacaaaatacatatttattaacatatacagtatatgtacaatgtattactttggtttaaaaaaggaagtgatggttgaagtccctttggggatatgtttaattttaggtcgtttagactttgtagtaatcatttgggggttccttgggattataataggcttagaaatggtgtccagaatatcagatggtataatatgcttgaaagcagtaggggataataacgattttataattgaccaacagaatcttctgcacatactctcatcaattcttactaaatttttgcgatgggtttgtgatttattagtttgtatattcgaatatgttgagataaaaatattattaccaatggcgtatttaaccatatttttaaccttaaacttgagcaaatgtgtaagtttcaaatcgttcggcttaaagagaaactcgttcccatctgaagattccataacgtcagacaagtacttcattctatccttcaccttatttacattgttttgccacagatacattgcagaagactgtaagttggtcaatgtgtagtctccagatttccccgagtagaactcaattatcctggaaaccatggttaaatacttatttttatcttgatatagaattgaaataaaaataaatattacatcaaaatcgaaagtggcataaacgaaatcaattgaagttaaaatattacaaacaaaaaaatttacagggttaagatttgggattattccccggagcctataaaatttattattgcaaaaaacaaaataatcagggtctaaaggattactaggacttggaaggaagactatttcgtaccctttttcgggatttaaggaaacatcggaaatgagcaagtgcgattttgtcttaaactcaaattctttatcagactcactggaagattcactcgagtttaaaattgaggagcctagaatcatgttaaattagaagtaataagggaatagtatgcaacattgatatcttgttttagttcaggggtggaacaaaaaaataaaattaaaattcaataatagttattacaatcaacctaatattacaaaatattaatatgtgacacgattcaaaaaataacaaaaaagtatttttttgaaattatccaaatgtgtgacccaatagttaaaattttaatgggtaagtgaagttaacttttgtttattttttcaaatatatttaatggcttcttttgacgatttttttggtgataaaactcacattcctgatagtaatatttcaagtaataatccaaaagatgctggaataactaacaccagcacttttgacaaaaatcactcaattccctcctctgaaagtaaacaaaattcagaagaaccattgaatttatctcaggttaaccaaaaaaaatcttcgattaaaccagagaatgtaaagtcgtcaaatccatacgaagtttggcagagaaattttaccgaaagaatcgaaagactaaaaattaaagaggctgaagaaattgaaattaggactaaactagcagcagcagaacttgaacaatggcataaaaatcgcaaattacaaatagatgctaagctcaaaaatctgttagatgaagaaccctccgtagattcagtcaatcgcaacgaattcaactggattactgcttcaaaatatttagaatcaagtgattttttcttaaaagaccaatctggaggtcagaatcaaaaacttatcgaaatgattatgaaaaagaaacaaattcttgaaaaatcgctaaattccaaaaaatagaaataattattttaagataaaacttctttattttgtaataatcaacatcggatgatgaaaaaatcattaaattaatgtactttatccagttatattacatgaaacacagtatattaacagtattagcaatatatatataacattgatattatttattaagtttgatgataaatcattctcggataattgatgtttgctctgagtgaaaaatcgaattcagggtgattcttatacgtttcaggtgagtgtaccttagttcccaaactttgtgatgatgaattataaatcgatagtagtcgctcatatttagtctctataagacccgtttctctgttttcattgtgatcgtcattgttgagattatgattataactgagaaaatcgttttgtagagaattgtcagaattaagtagtgcatttagggactctttcaggctggaaatttccctagataactggtcattttcccttagtagctggtactgtctgttataaagtgatttggactctgactcgaaggtgaacctttctctctcaatctgttcattaagagcttgttggatcctctgagagttgtttcgttccatcattatctgatcacttaggttgcgattttcctgcagtagaaaatcttggttctctttcaattgatccagtgaaaccagttttgtctgaagaacctttatcatctggtccttttccaacgaatgcttcataaatgagtcctttaattttgacacattctctataaccatatataacacggctttaaaagtatgtaagtaaatactaaaaatatataactataaggttatgtgcggtaccttcggaaagtgagttgtctgaagtggaagcaacaagtgtgttgattttggaaatgatcatggaacaagtagtagggccggtcatttgtagagcatgaatgactcttagtaattgacagtttcgtttggcaagttttgctttcgacagcagtatcgatctaataagagtccttactagaacagaattatttttgtgagccataagagtaacctttaccttattaatagctaattctttccttagtttattgtaggagtaaaggacccagaatagtcttgcaactgcctttgaatgcaattcctgaagtttggcttccctaaggtcattatctgccttgaacttgtcaacacagtatttgaaggcctgtaattggcgtaatagctcttcattctcgtctgatttgatctggtattcacgtctaaggccctcatcaaagtttttaaatttctttagtgagatttcaactgcctcgtatgaagttcttagataattgtagtctcttaaaagagtctcataactgttttttatatcaattctatccttcttaatattgttaacctccttgtctttgtcactcaaacgtgaagttaaattgatattatctttagttttgtcttctagaacttttttgacacctaagagttcgtttcgcaaagaatgattaatgctctcgaccctttcaacgctggattgaagttgctggtattttgattcaagtttgagtttctcaacccttgaagtctcaaatgaagttttgaaatgtacaagctcagtcttagtggtctccaaattttttaacagcaccgtattgttgttttccaatattgacatcttagactctagtttttcagttttattctcataatctgataacaacaatttagtttgcctcagttcctcatttagtctcacgtcattggtccttaatagtttaacttcccctaataattgtaattccttcgttcttaataatttgttctcggcggttagttgatgttctttggtccttagcattttaatttcatttgatagctgatgctcatttgaggacaatgccttattctcactggttaatttaacattggattctcttaactctgcaaccatttctaagtttgtttgatggtctagctctataatatgtagtttttcatttaatgatctgacgttgttggatagaacttcgttttcagacctgagttcttcagtttgagccttgagcttattataattggttttctcagtcttttcagtttccttagaaatttgaagcttgttatattcatcttctagctttgaaaattgttgtactgcttcaactttctcacgacccagacgcttgattaccattttatgttgttctagagtctcatttagctttattctttcttgttccatcatttttatagtcgtgttgttttcatttatagttgatctaagcttatcttcagacaagaaattgttatttattacatcttccaactcatacttatggttagatttcaagttttttatttgttgcctcaactttgatattttactcttgtattttgcaatctcttcgtataaaaaatcattcttattgattaactcgttaaaatcgttcaacaaattgtttaattcgggtctttcagatgggatgctagaggttgaagattcttgatccttttcttcggtcattttaatttcctttgagtcctctttagttggccttttagctccataccaacatttttgtaacatcttattggctagtacatgattgttacataaaagttcatcattaaaaaaactagaggaattttctgaaaaatcacttaaattatcagtttctggaactgattcactcaacctatcttcaacgtcttcgactacttcgtttttacaatcctcgatttccttaactaggttggtgttattttcaactgtgttaacagagtcaaattccttgttaggtgttttaataaaggattctgaagctctttctaaagcttctgcgtattcttcaacaaaaccatctgcatcactgtcaaccagttctgcgggttgaactacatcggtcacacctgttaaattttctttatttaattttacgttatcaagggataggtcaccagagcgattaacagaaaatggataagaagaattattgaaaagggctttatcaagacctaataatgattccttggttttattgaagggcttaagttgtaaatcatcaagtttgacatctgtaaatttatcattaaattctagtaattggctatcagagactgaatcagtaatagaaccaaaattctcattttcaaaatttgaaaaattgtttggattattaattgaagcttgagaatcaaaactcaaaagatcgtttgttgacatgctcccgaaacttttgtttgccattaatttgtttttttgggttttagtcatattatccttaacaggagaatttctatcctctgaaaataagtttggaagtggattggaaagctggttactgttgactaaaggaccatctcccttatttggttgaccatttaatgaaatagagggcggaactttgtccccagagaccatatctgaagaactgggtaaactaattgcttctgtgttcttattaatcacgttggtaagagaacctaaaatatttgttaaacttgggagctcagattctttttctttaacttctttttgtaccaatttgtcaatttcagcgtcattaatccttttcattggcgataaattaggttggttatccaataggtttaaacttgctgaaagtggtgaacaaacctgacctggaatacagaccccctcgtttattctcagatttgatgcatatttatatgcgattgagctataattaacctgattaatacctccatcaacacatttaatagatgatctaggatatctaacaggcggttcaatgtatctaatgggtgatataatacggttgggagggaattcagagggtgaaacagtattcataggtggaactaactttttagtctctctattaagccgttctttggcagtattagcaaagagtttctcctttaacggggaattatttacgttgggctcaagtttttgttctggtctaagaattttatagaagtttaaggaaagcctgtttattttgggccctttcctctcgacagcttggaacagcttttgaattaaatcagttgaggtgttgatcacattgaatccctcttctaagcctatcctaagactgtaggaatcaagacgatcatttaagttcctaacacttctaggttcctcagcatacttgtttcccactaatctaccttcttgtgtgttgcccaattctccggtgttaaaaactgatttatgaacatttgtatggttgttaaataagtaatataggtgcgaattaataggagtgttatggctatttccgtcacaatccaaaggaaacctagaaacgcttcttacacctaaacagtaaattataaatgtatatcttgttattatacatatgcaatatatatatatatataaaggtatttagcaaaataaaataccttggagtccaatattactagtgttattcttgaacctattgtaagaattaatataagaagtaggatttgggttgctaattttgttcttttgtgaacactcaactctctttaatacgatttcaagggggaggtgaaaggaggccaaagatttagccagaagttttagaacccattcacttttgtaaatgtcaaatactgacaaattcttatcgatgaagttgtagagttcagatgctagttgtttcgcagtggaggaatcaccgaatacaaagaccgataggatttgtgatttcaacctgtttgtaagtaaggaaagttggggtatcaaaatggttccttgtgaaagcatcaccactgagctggttggttcaaaaatcacaagataaggtgcagtatcaagactctcgaaattacgatgagatgccttccagctcatgggaccatgcaaaatggcccggtacaaaacttttgacattttccggattaaaataaagcacaaaatataaaattgattttatttaatctaaaacggaaaagataagatgataatattcaaacacatatttgagactaataataaatttaggaaaaaacgagatccttaaaaaatcaaaataattttatcatttaaacaatacaaaaggggtaagatctatgagataattaagtaatattaaaggtaatctaacgttaaggccaaaaatcaagttcgatagcctgcaaaaatgtgcgagttaatgttgtatactcttgtaaatttacataggaatttctcttagttttaaatatgattttttaaaaactaagtggaatctaacagaattgtctcatttttactttttttcaggcaaataatacacatctagatatatttcatagacaactgttttaaacttaatttatgttttaatctagtaattttattttaattaatttattaacttcattaattaaattgttcagattaatttatgaatttatattttgtaacttaattaagaaattagtggtgttattaatattatttagatgattggaatgacgaaatttgtaaattattttagttaatcatctatgtagagtagctagtaaaatattgtttaaatttgtcagttaataaaaatttaaaccttatgtttgtaaaattaaaactaaattctgtagtttcacctcccttgtaaatttacttaaaaaatggcaaaatgagtaaagaaatcaacacacaccaaaaatccgattcaactgatattgacttggatgatttgagcactagaccaaattctagaagtaactcaaaaacacgaagaaataatttaaataaaaaaatcaaatttaaggattccggccaattacaagaaaatgaactggactattcccattcggacgatatatttgattcagatgagggagaaggtgatataaatagaactggaaatgtaccaattaattggtatgaaaccgaggatcacataggtattgatttatctattcatcaaatccatattatataattaggaaaacaagtatttattaggatacacggctgagggtaaaaaactaataaaagagttggattccacacagttaggccagcttattttcaattctgagaatcctgatgcctggagaactataattgatccgaggaataatcgcacaattagacttaatgatgaagatataaaggtgttttaaccttctattatattaatttatcaaaatttagataattagaaggataagaaagggagtgtacccatcggaagcatatgacccagaatctgtaactatcgaatttgataacagggactcgtaagtcacaatcacaattatttgttcctaggatacacccagtttcatttgaacttccacccaaaaataggttcctcccttctaaatgggaagccattaaaatcgccaagtaccactttacaaattgtcaattctattatttaattatccatttcctactattttatcaccttaatatggaatataaaatatatatttatgtgtttaggttagttaagttgataaagagtggaaacgtatatacttctgaacagaggagactgaacgaactcaagaaaccggaggattcggaaggtgtagaggatatttgggaggactcaatatatgacgtggatcctacaaccgcaaagaggagtgttaaaaatgaaataaaaccgcctaaaatagaactaccttccaattccgagtcctacaatccacctgaagaatatttactcaatgaagaggtattttttacacttattatatattcatctatatgtattactataaatgaggtgtataattttattaggaaaccaaggagtgggaagaaacgccagaccatgaaagggcaatgaattatctaccaacacaatacaacagtttgagattagttccgaactatcacaacttgatagtggaaaggtttaagaggtgtttacaacttcttatgtgtccccgagcagtgaaacttaagatgaatgtagatccagactcactgttgtcagagttgccaagtccttcagaacttggtccttatcctaaaaaaatcagtgttgaatataggtttaaaggattgaaaaagatttcacttgactccacaggcagatttttggctgtttcgtcctcaaaatcagttaatatatgcgatgttttaacagggatttcattcctaactcttgatttcctggatgttcatgaccttttgtggcaccctatatttcaagccttaattatatcacaccaaaattacgtcaccgccttaccagttgatttgccaaataaatttcaccctgactcagtacaatccaatgatattacagtaagcttagctaaataacagatactagtgtatatattattgatttttcacactaatgaattagaactatgaaaaggcagtaaaatacttaagtatggactctcccaagggtaactggaagccatataagaaggtaacaataaggtaaaattttattatgttaggataaatatgagggattaacaattcaacataaatacccagttaaatatatgtcaatacaccctggaggtaagattctatatactttaactcagtaatatgattcattaatgcaggaaattatctagtttgtgtttgtccagattcagcagagactattaaccaatgcattttgcattgttttcctaaacgaagttccatgaaccttgggaacaaagtgtctaacaacaagatgaaactggcaatattccacccaaccgaaccgaagctaataatagcattcacaagaaatataagagtctataaccttaccaccaaagctggtcatgataacaagtattatttctctcaccaattaattaaacttatagataaccgtaatttatgtgtttattcaggttggaagaggagagcaagttcacaggattagactcacctgtttcaattgacactaatggaacatatctgttgaccggagatgaactagggaaactcacaatgttcgatcaggagatatcctcatttccatataaatcattcaggtacttttttacatagtctctcctgttttacataaatatacagtacacatttgcatttgattatagttttgagaacgagtccataataaaggttcaaattcataagaagttgcctttggtcctagtggcatatagtaactggtacgtttatacttaatatacaattcattagtgtaaaatgttttcatctgagtactacccaggaaaacgaagttttatttgtccctcttggtgaattaaagcttggggagaaaattacggattgtacgtggcataacaccgaaccctggttatacacaaccactaataaagaagccatcatgtgggtctgatacacccggttgatttaacacataatttgatatattcgaaaatctgttaaaaataatcatacatatgtggaatctccaagattttacgatttcataaatctttcggatgtaaattgtgaaaagtcataaaataaaaaatgagggttgacactgatccctgagacggggagttatagattaatttgaaataaattaattttatttgtgtaaaaattacataggtttggaatcttaaatatttaaaataaaaaatgtccacagatcaggatgagatagctcaagttttgaaaaaggagatggatcaaggacttggagattctctaactgacgaaaacacagaagctataaagagttttaggtctctactgaaaaaataccagaatttggtaatcgaatatcacaaccacaacatcgagtctaaaagatacattgaaatgatcttggataaaaacaataggctgagagaaatcaacaaaaaattggagcatgaaaacatgttagtgatttacgtagattatactgaaaatattttacccagacaacatagttatacaaatattgtaaagtatgataataatttacaggatattgaaggggaagattaatagtatggcaaggaaactagaagcactggattgtttggaatgggaaactggatgtttaaaaacgcgtggtgtcaaaattaataaaaacgaaaatagcggcggtttccctgtcaattgctctaatttgagagaccaatagctggaaaaagttaaaattaattaaattttttaaaaaataaatttataaaaatgtggttgattttgaacgcaagaattgtaaggctcgaacaaagcaaaaacacttttttcattttaacaaatgtaatatagattgtgatattaatatatttttaaagttctgggatatttccatttgaattcaaaatggataaaattccagtaactatcatcactggattcctgggaaccggaaaggtttcataatatactttatttcctttacacatttcccattaattacataaatattatagtacactttaatatatatacattacttccttgttaatgtaggtttagacaacattgattagaagaatttgctctgagttaactcataagagagtcgggattattcaaaatgagttttctgactttatgggaattgagaaaccaattttactgaaaactggagccacagtttatgaacttcctaatggctgtctttgttgcagtgctaaatcagatttggtttcagctctggatttattcctacagttgagtgataagatagactggattatcatagaatcctcgggtacttctgacccagtcgccctcactggtaacctttggctcgatgataatcttgaatctaaattaaaacttgacggagtcgtttcaatcacagatgttaacacccttaacttgtttctgtcatataaatctaaacattcttacaaaaatcagtcattaaatggtaattctaatcctatctatatatactatatagttaatacatataatcctataataaacttagatgaggtttcaaggtgtgaaggagaatattctgagctatttgaaacattttctaagcagttatccgtgggagacttgatagttgtcaataagactgacataaatcccttgtcaaatgagcttagaaaatacctgaaatctgtaaatagtagtaatgtagttgaatgtgtgaggtgcgattttgatcttaagcttcttttcgacctcggaaccttcgatactaaaaagttactctctggtgatacaaattctgagaagttttctgttcatgttcagagcaaactcaccagcatttgtataaagagtttaagagtgtattcattaaagtatataaacgacactgtttcatcccttctatgggaaaaagatgatatttaccggtaatttccacctttaattcttttttcaatatttaattttttcagatgtaagggtattttcagagccattaatgattgctcacttatttccaaggatgacgaaaccgtctcaacatttgagttacaggggattgggaaactttacgagattaatcccgtggaggctggcatatctgaaaacatctttctttttatcggaaaccaactaaacagacccgttttaaatgaactatttctctaatcaattataaaactatatacactatatactatacactttatactagtggtaatatacattatatactatactagtgtattagtaattcataatattaagtttttagtgttaacttgagtccgtagttgacatctggctcgtgtaacggactctttccgttaaagtcaaatccgaaaaggaaagtgactaatgagttgaatttctggcagaatgagagtgcgactctggcttcattgtcgactttagccttgacaaaggaggcgtgagggtcgtccaaagtggtcaggttccaatgagctccaaaggccagtttggtctttttctccttcaacaggtgttcgaatgatacacccaaaacagcgggcttaactgattcgtttttagagacgtgtacgttaccaacaaggcggtttagatactcgtccttatttccgaacagtctcagtgccaataaaaagttgttatttccaaattcccttttgtaggcggacccaacagtaacatttaacttgccgagtttttggcctgaaacttcagctcctaacaaacacctgtgcattgagccaaatctcaacagcgagaagaaattatactcaaagtccagaggctttaactctagcctgctccacagtaacttattctccacctgcgaagacaacagaaagtggtgatggttcttgtcggtgtcgaacaaatatttcgagccaacggtggcatcaggaaaaaaaggcagctacaaaatacagtaaacaaagatattatatattaaataggagagtattggaggttaaattaatatataaaatataatatgataattatgtgtataaattagtaagggaaaatagataaatgtgatttgaatgtgtttggaaagtaccctggttgtaacatccaaatggtgaactcctgtggagtttaaactgagttcagttgcgaaattgtggaaaacatttttaagggtgactagtcctgctagttcctcacccctagtcaagcgaaagtccgatgacatgtcgagcgtcggctcttttgaaagagtctcgacatgccaaacattgttgtgtggaaagtctttttcaaaaaggtcaactgagggacctgccaaaagtttttcgaacttcaaggtggacatttttaataaataatatgtgtagcaccacaagttaaatagggtattaatagggtccgtcaaagctgttaacttggctgaattgagacaatactttttcctcgttggttttaatcaatttcttagatttttacaaaactatgaaatttgaccaattaactacgatagtgcttatggaatctttataaaaaactaatttattccactaaactaacttacaaacaatataatatttaacaagatagataaggatacgaatctataaatagagaagttcttaacaattatttgcaacattttcatttatccagatatctgataattgataaattcagtttaaatctcaattttttatcagctacacatagattttattatgtatattagaaaattgtaaaatgtgtatttaagaaaaaatcaaaaaataaaatggagggtaaaaattcataggtaaataggttattgagatggtgcctaactgtgtaaaataatcataaaattctgatggtttggaatcctgtgaaatttagtattaagtgctctaaaaaatagtataagttcaattttaagtttaaaagataattattttatttcttgagtggtttatcatttttctgggggtatagtgttccttcctgttactatttcgttatttaaatacttttattgaattttaaattaaaataggattttacaataattctgtatttttatttttccttaattaaagttttacaatgtctgatgaagtagagaagacacgcccaaagaaggagcctgtacgactttacacccgtgcggtttttctgggttataaaaggtattattttattcactatatacattatttttgtgagaattttaatctgtccaatatatcaacaaatgtatttaatatatactacataatacatgtaaattatatacttttctgtatatttttgtagatcaaaggtgaaccaagatcagaaatctagtcttttaagattagagggtgtaaatacacgtgaggagacctctttctatttaggaaagcgtgttgcatatgtatacaaggccaaggctcttaagaatggaaaaaaacaccgagtagtttgggggaaagtcactagacctcatgggaacggtggtgtagtaagagctaaattcaaaaagaacctaccaccaaaggctatgggacatagagtcagagtcttcttgtacccatcaaacgcttaacataatcttatttccacgtgctatatataatatatagtatataatatgtagcatataatatgtagtataggatgagaaaattaagtctcaaatttatcttcggttttggacttaacgagcattgtgaatttacgtgccaaaagttccgtgagatcgggacggtcctttctaacggtggtcttgacggaatccaataacttaagtgattttataagggtcttcacagagattttagatgaagggcgtctaataaaatattatattcatatacttaaatagaataaaagtgaataaaagtaaaaatattccattggatacctagaatttttaagattgtttttcttaaaagtaactagtgacgctgttgaatttaaaacaacgttatacgacggtttattggtataccctataaaagttatacaaaagtgtgttaaagataatgtaataaataaataataaattcgtttttaatgaacaataaataatatagaatagtggattgattattaaataccggtaaatcttggacagtgtcttgagagaaggttatgtgattcaagagaaaaggtggtggtgcgagactttttcaagaaagcgtggttgtttctaagtaattcccataaaaggcagtcgggaacagtaccagaatacggaacattcgttctcaaggatttacccttcatattgtgaataatgatttaaaaattattgaggagttttatattgagtggggtcgaataatacttaacaaagttctataaatataacatacccaagtatatctatacaaattttccagtctaaaatatagattagtttgtggttaatattggatattgacatggaagaaggtcacggtcatactgatcttgaccatcatttaaacacactgactggttatggcaattttatgccaggacaggcctggcaacgatcattagccaagttttctggactgttaaattatcctcacgatcatgatcatgaagattcagaacgttcactcagtcaactaaactacaaatttgaaactctcgtcaaatctgaccatccaaattcaccttgcagcccacttaaaattgaggaatttaaatgcttatcatttaataaattcaagaacgtattactctacacatttatatataattgaatagtgtatacgcaatttcacaaacgtgtttagaaccccgaactggcttctgtgaagtgtgtaaaatggtataacgaatggatccaatgtaaatgggacgaggataaacttaagtttggttacaattatatggaacctagagctcctaggaaaaggaaagcatatatcgcagctccaaactaccaatattcataacacatttgtaatgttttaatttatatttgtttatttaatcaatacctttataattttttaatttattgtatattttaaatattgacactgttgagggaatacaataaataagttctagaggattctgcttctaaattcagtggtgtttatttaaattgcaatttttcatcttaattaggtccgtggctgcaacctagcagtagtattaaaacatactgctagttttttggtgattttttctgtcgccgctgcagtggggaaagatccatagagaaaactaatttatcacagattatttaaacaacaaagttgaaaatgatgtttatttgttttgttttgcttgcactaaaatttgcaatgtcagatgtggttgtacagaatgtattaggctacgaagccccaatacgtgagattatatatcgatttgaattaaaaaattttcgggatcgttttgacctaaaaactggaattccatttaatagtacacaatgcccaggttatgataaaatgttaagaggagtgcctgcaaatattgaaggtattaatttttaacatgcctctttctcagttattgtttatcctacacatttattcagtttatctccttataactccttaaaattttaactatctttatataacctaatttaaccgacctaaatactgtttaggctttgtaacaagaattccacacatgtcattggattctgataacaaaggatcattctatgaatatattattcagagacttgataaatctcttccagaatttttggattgtccacaaatttataaattccttatcgataaacacggtgtccccttgcctaagcctaaaagtattccaaacattaaaagtttagacgatttaaaaaattatatgaagtcccacaacatcgacgttactcataaaggttcaatcccgggttctaatcactagactaatgtggaacacaaaactttactctttcaccttacaccgaacgtttcaattaactcacactcctaaaattaattattcacactataataattggatatcctttttactttcaatcaaaaaggattataccaacaccaccacagtaaacaatccaactaacacaactaatacaaacactaatactactactaactttattagtggtttaagtagtgtggaaaatgtgcatgaattagtgaacgtactgaatagaggagttgattttaatgaagatgaattgaatgggaaggcatttgaactgatttcagatgatatgaagcaaaactcggtgttatttataactttgaacgaatttggattggacttacacaagatcttagataggctgaaggaatttgaaattaccaataacgaacatatcttgctgagaaccctatcagaattgccgataactgactatttgatcaatgaggagacttttttaacctttattaataattctttcaaacgttttttcactaactcaactaatcagctttataatgctactaataccataggatcccataaagttgataattttgtaaaagaaaatgaaattatgaatggattggaattaaccaattatatatgttcctgttgtaaattattatataaaaatgtgataaattatagttatctcaataaagtagaagagtgtgtaaagaagttagacttgagtatgtttaccctttcacagttggttgacctttgttatcacttggctttgatcaaatctgagttttgcaaaaaaatattcgcccgtatgaatgagcttgagttctttgacaaggttagcttgtctgaagttatttttctttttacaaaatatatacactttgatgactcaaacttctttgaaacggtggtagacaaaattactaaaactcattttggttcctttgataaactagatggtaattcagaattgggcttaagtgaatacatcaatttgttggcaattgttggatttggtagaagatacattcccctgatagacctcattgtcgaacgtttgaagggacacgaacttagtttagaagaggccacaaaaattctaatcaacttgtctaaggttaactacaataacagaagttttattaaacaactgttgaattcagtcctttcatcagtagaccaggatactatcctagatccctaccttttatcaaatcttttcaagagttattcgaggttcagtttactttacggaacacatttgaatgaggacttgtatcaagtattattacacatactgatcaaggaggaagttttatcagatttcaaaacgcatgatctactaacggttttcaaatcactctgcaagctatgtaatatcggaacaactggatctgagggtcaaccaggtcaaggaatcaacactatgagtcggttatctattagacaatgtctaaatgtaattgctagagagatctttaagcgtgatattaacagtgatacatccttgagactaattatttccagcagtaaagtaccatacaataaccataaacttctcaactctttggtagaaaacatcaacttgaagggtacaaacaacttgacacagttatacgtacctttctacatatctacataattatatactaataccaccaattatatgtttaatacaatttattagaaattgaaggaggccatcgaaatgttatctttgcactatccagaactaaacgaaagaatactacaactggagaataacatggatcctaaaacaccttataggactgaagaggagagtgccagggacattaatgtgtccgtcccaagaaattcgttttatagaattcagagcgttaaaaaaaggaaatggacttactaactccctaaccacttgtaattatacccatatttatgccttttaattctgtattccttcttgctactaaacaattattaatattcatacaactttatactatacttaatagtatatatatatgttaatgtatctgaatgggtataaatgtgctgaggagtaaatgataataccatctgcgatcttgtcttagtgatagctttcttggccttagaaacaaaaatgacaggattcctctgagtccagtgacttctatgtacattccacaaaaaattatattttttatagatatattgagttttttgagatcaaaattacctttaaaaaatcaaaatgtgtagaatccaacattcattagtactattttatgttactaccaaaattacattaaatgtactaaacatcatagtgtgttgaaaattctaacaatataaattaaaataaaaagaaaactgctgtataataaaaagaaaagtttaaattagtacaatattaggtcaatcaccagataaatcaactggtaaattattggaaagatactcttctaaaatagtcctttcaacgagtgatttacaccttgcataagtttttaaatcaattcctaagttttccgagttgttcccaaacactttgtagtgattttcgaactgacgcctgtaatacctccagtcaatttcgtgttcctttggcaacaagtggcacagtgaaggaagagcctgtaaggcacaaatctttctatggtctatttctctgtgatcaggaagacctttcaaccaattcttataaaattcactaataaaccaaaggatacccttacccgctctaagaggacaatcaaataggctacctaagagattcatattagtattattatctctactggtaccatcagaactaccagttgtgaagtttcttaccttccttgaaaggtaaaaaagatcagataacatgagtttaaaatgccttttcatacacagataaaaaaatgacaaaaacagtatgaatctaaaggtgcgtaaagaaaaccttgaaagcaactttaaaaacagagtaagtggaagaagagttacagaaagcatgaataacgttagaacagtcgtctgataaaaacctgtgtctagagagaatctaatcttctctaaagtaatgcaaatgtaaccaagaagtctttgaatgtactttagggataacagaacgtcctttaccagctctttcagatcaaaatctgcaaaatcatcaaaaaaaattgggtattcttctcccagtcccaggaaatttaacttgtattttccaaagggtgtgaccactagagagtctgttgcagttactcctgatctatttatcagattaaaccttttgtacagatgattctcaaacaatgagttattgaacttgtcatctttcattgggtaatatctactgctattcgttgaatagttatacttttctttaccatctttaccgtgttttgcactgttttcacaacctctacctgatttctgatccttttcactcttttgttcattctcctgattaatttccttactttgttccttgattttatccttgattggggaagtttttgctaggttagaactgagattaggcgtattgggagtggtgacaggagtagaagcaattgaactgctcaacaaatcctctacattatataatttagaatcatcacttgtgaaaagtgtacaactcttgtacttggttctacccactcctacaaaatcacctaaaataccacttcgttgtaaattttttaaaacactaagccggtctccaaaggctgtaaaacgatccatgaccaccttgtagtatatcataacaaggacaattaagagatatagaattagtggcattttccacagacttgcaactgcaatcagctcataaatcagaaaccaaaacggtattatgaacaaaaggtcaatcccatcaagttgaatgactttgtaggtgaagaaggtggtgggatcatctcccttcttactctctaggttttctttactatcagtatcctttaaactattagcattatcattactattcttattattattaccttcatcattacagttgtcctttatagtacataaatccgtcaatttatctttaaatttcttacgtatacaatcgctaacaaagttagggttgaaaacaatttgagttccgcccaaaagtagccttgtgatccaaatcggaacattatacaagtatatataaagcctatctgtcagagagtagaagtggaccatttcaaaatttttagggataatccactcgtaaccaagcggaactagattgtttaaaatcggtaacaatgtgggattaatttcaaaagtcagctgtactgaaaccaaaagaaagcctatagagtctccagggttcctcattccatatgaatggtatccgcaatacggtcttataaatttaaaatcgtcattctcgttgaatggaaacagctgtaaccaaaaacaacttcttattttatatctactttctttattaccaataccattattcccttctttgaccacccctttattttcggtttctagtttatggtaatcttgattaaaatcagtgtgacaagatgaatcggaatgatcaaattcagtttcactcacattttcatcctcttgttttgaaggatcaaaatttacagagaggacctttttggaatatttaattaagaacttcaagtcttcatgaatgtccagtgatccttcagggccaaaagaagagagtataagtggtattgacaacactgctcttcctagtcttctactataactattcttatccttgtccttgtctaacttatctctaggttccttccctaccattaactctaaatacatgtctgaggaatctttatctgaatctgaagtgtacgtcacgtcctttttatccttcttactcttagatttttcctttttattttttttaacgtttactgttggactattatcacgggtagtgtggttattattattatagtcactgttatctttatcaaaaatatggttagtatttgaaaaagtatacttagtgttggaaaaggtttcccgaggggtaatgtacgagttttcagaggcagagtacaatccattttggtattcggataaattggattcaggtgactcatctgggattaatccattaggtacgttatttggtgattcatatgattgagaagatattctaggcgcgtaaattgacggacactggactgaggatatttttcttggttgaatttgttttttataaacaatatcgtcttgttcaactgattcatacttgttgatgtcaagctcacaccaaagggaaattaaaacatcagtatttatattatacactttacctacatatttttattttattttatttttaagtattaatactttaatacatgactaagaaagaatacctgtaaaacaataatcaaagatgactctgttgaaatcgtcctgcatacttcttctttcactgaaaaaacgtctattattaagcccaatttctaatctatatttacaaaaattcggttttactggtcctatagaatcaaactcaattttattctttttctcatcaactatcattgtgtgccttattggacccattacagagctatctggatgttctgattcacgaaaactatccagatttgagaatggtgtattagatgaagctgaactacttttagaagatgttgccttgtttgtatttgaaaaatatttagtgtgtgccatacttccgtctgaaacgagcaagaatataccttcagtcaccagaagatcaaaatcgcaaatagcgggatacctttccaacttatcatccaccagtttggtgtttgactgctttacagtaaatcgagagtttacgctcttcgttatcgcgttaattaggggattctaaatccattcatgtaactttgttatatatatacaacattattgtgaataagttattgacgaaatcttcattagatgtattaaatataaagttttaaggagtacaaatacctggttaaaataattcatcggtgtgtcattttttgaaaagattaaattaaccatagaatccacggctttttcgccgatttcgtttaccttgctcttaaaccacttcttcattttatgaaattattgaatttgaaatttaacattttaatttcgtagagtaaaatatataaaagttcaaacatttttgaagtataaattaacaaaaactcattgaaaataaacccgatgaagtaataaaaattgagaatttacttttatttttttaaaactgtgtatattacttttgtatactaattatatttttaagtggctggttcactttaaaaaattggttcaactgtgactatgaatgctacaccccttttctactacctgaaattttgttaaaacacctaaaatgattatactttatttataaaaccataaattccaaaaaactatgctttaatggaatgtgtaacaactcagagattctcattctttgcttgaaaaaacgtgtatcatgaaaacaaaatactaggaataataacgctaacccctattctagatgttaatatcaaaaaagtatttcaatagattattacatcttctattatcagctgggctgtgtaatctatcattcagaatttgttgaatcctaactctaaagaagtagttcttgatcaaatacacactcttatttattgaatcctcaaataacatgttatacacagttagcttgttaaatttttaaaaatttactagttggtgaaggtcagggccttactgtataaaatacttaagagaaagtaaagtgaaaatttaccaaaatactgataaaaagtcaaaactgtagtccttaatttaccatattttttgtacactttcaccacttatttatcatacaatatatataatatcatttccctataatgttgtagtccataaaatatgttcaactggataatcaattgggtaccgttaaatttataacattctactgagagggataatgatactaacctaaagaagtaaaaagtgcttgagttataaaagacaaaggaattgaataaataaggaaattagaatttaaaagaaaaatccatgaaatttttaatattcactttgaacggtttaaatagattaaaaacgggaaagggaaaacaacaaacctttaatcccaactttcccaagacacatgaattaatttatattatttttaaaactactatgaagttgttttcatgaggattgaattcctcaaaaattctaatgtaatcaacgtgacccttccctggtgggggcttacacattttaatttttttaaattataccctgtactattatatttgtaacttatttaaatttgtttttaaaaattataattatgatggtttacaaccgaagagattacctttctgaagggcccaatgaatacaacggattaaccgacgatgaaatttatgaaatacaagaagcctttaaccttttcgatactgaaggaacaggtactaatattttagtccatttcctctattttgcactaaagtatgtatagtgttacttttattatgtgtacattaaacctttatataaacaaatcttacacattatttgagtatattacacttgatttagttttagttttggggtttgatttatttttaggaaccgttgatccgaaggaaataaaatgtgccatgcagagcctcggtattgacaagaaaaatcccctcgtgtaccaaattgtcagcgatttggaaaagatgggatcatccactgttaactttagtgatttcctagatgctattactatgaaattggtatttttatacttgtttaaacactataactcatatttaacttctatgttggttagggtagcagagatagcaaggagggcattcgacgtatttttaacctttttgacgatgataacactggttctataactttcagaaacttgaaaaaagttgctactgaactgggagaatcacttacagacgatgaacttagagacatgattaatagggctgattctaacggtgatggacaactttcatttgatgacttttactccattatggctaaaagaacttacttataatattcgtgttttatctctttactttagttattattcatttacttctgttatttatgtattatatgctttcatttgaaaatcgtgatttaaaattgtaaaatcaatgataattaaaaattaaggttaaagggcatttacgaattgagtcctttctcacaagttgctttgggaattgtagattacaacaatttttgtaataacgaataacttgcactttaattttgtttattaatagcgatttgtattttgtagtgattggtcttttcaaattgaccatgttttagattcaactctatcggaacactttgcttctgtcaagtgctgacttagtaacagaactgccagttttaaatagttcagagactacaggaattttagctggttaactaactgttgttaacttaggtctagtcccaggtttataatcaatcatcttcaactctccagatgaactctttgtttgaactgtgttttacgaaaatatattcaatgacccgattgggtaaactttgtatattcagtacgttctaaaagagatagatctctatacttgatcttgcaattagctcgatcgttaaatatgaatctgtatgattatcatgtacaaataattttgtaacgggctactcccatttacatttaatatccatcttatgttaaagaaattgatattcttttaaaaaataagttaaaaaaccaagtcaagctagttagtataacattaaagtgttaatcactcaaaccatgaacattttatataaatctttgtctttgaaacaaccatgagacatattcaaaagagaacacatttataccaaactagtacatacagttaagcatcactattataacatagttaaataaagcaacaagaatttattagagtatttaaaattattcatcgtcttcatcgcggttcatccatctagcgaatacgttgtgtttgttgtttgctaccagcctgtaccatgaaaaatataggagaaaagcaaggaggaagttaaatagaacaacgttggaaaactggatccaaaatcttcctcccaaacctccccattcctcgttatccatgagagttacccattggttgagtttggggtcgtatgaaagttttggaactccagcaaaggaagcccttccaatgtcccaattccatctccgctctcttgcccttaaaagtaaccttcgctttaaattcatcaaaaacttcctcgtcttccagtaaagaggtcctccgcccgtgggagcagtaacttcctcgaacatataaggtgagtaaaacttttgtttcctttcatttctaaaggaaggaacagtttcttccttagaaacagaggttgagaatgtcctgtaattggtcttaaataaaaattgctttgggaaactaaagtttaaatttaactgattaagtgacggatcagaatacgttgattgtgttagtggatatgatttatttaaaaggttagagttaagaggtggtagaggacataaggtaaaaggaggggatcgtgaaaaggcttggagtttaaaaccaagaccataggtacagagtttctgaatcccaactccgctaaatgtaattttaattaaatttaacatcattaaattaaatttcaaataaaaaccagaaaaggttttgaaagtgaaataaaatgtttggttagaatagaattatgatgaatgatgtaacatagggtttaaaacaataaaatatgtatcataaggtaaattttataatgtgtaacatataactattataaaatcttaaactatgaatatttatatattgtttttaaaaaatattaagttaatttcttctttgtgtgatcttccccaaactcagatgatacgtgatgtttataaaatgcggtaatagtttccccgtacaaaaaccaagagagtgccataacagtcagtgagataaaaaagaatccaaaactgagtaataacccgtctaagctctaaagaaatgtataataataaattttgtataaattgactgtgccaacctggaggctaaaattgagattctttatcattttatttattatttattattaattattaaaatccgatccccttcaggtactaatttaattaaaatttaaaaaatatgtcaatccatacctccttaattttatgcttgtgattcccttgaattatgaaagtatttttatcaactttaattggagattttcctactatttgttgaagttcctctcttaaaatatatttgtttccttttgtttttcgaacatgtgtaaatgccaagttagcattgttactgtactttacaaaaacaggaagattgtcagatactgaaaaattcttattaaacaaaagatataaaaaatcctaagataaaataggtgaatatttactggttctgttgatgtggaaaggaaaaaaactgattctgttctctattaagcttttaaccttcttctttatggtaccggttagagccttggaggttagcctcatctaacactttaatggaaaattttacttctaattggtgtacaaaattttataatttatgattgacacaacaattaaactgactttgtagtgtcacacataggataagaaaaaataatataacaatacaattcagttatagaatgtaaaatacattatttttaattaaaaattaagatgagaatacatttcttattcaaaaacttctcagaagttggtttgaaaatgttacaaattacaacaattttcgataacagatattacacattttagtattttagtttgtgaaggggaatttatgatatacagaataacaattttgttagagtcaatcgttttactgtttcagttacttatcggaatattcttatttttatgttaaattcgaattcggaaacagaatatatagttctaacttgttcagaaactgactcttcatgaagaaacagttagagacaagattcagttgaaattttgtgatagtccagtatttgtcttcatatgtttgattccaaaagtcattatcacactagttgatcttcatctatttaaattcataattggagatgtattcttactagtaaattcaaataatttgaacagtatacattcattaccattagttatatagttgatataagtgaaggaaattcgcatattttattaaacagtatgttacatgcatttatacttatatatatatatatatctttactctatcaagataagtaattaaaatctacctataatttcttttaaaacccagacaaatgcctgttaatttttccttttgaaaaattttgtttttattttatatacctttttcatgaatattttcgcaaaaatttacacattttggctttattctatttttaccaattatgaagtgcatttaattttatttaaactcaagtctaatttaattatttagaatataataaattttactttagttactttgaaacaattgcggagaaatttcaccgttatttttttaattattttgaaagccattaaaatattaaaacaattaattataaactattttcattattgttttattcattttaccattttcaaagatttcattgaattcatcaacttccaattacttaagaaaagaaaattccttttctgaaataaccagattttttattatttttttacccttaataataaaaattattcactttaatccttagctcaaaattgtttccatttataatatcttttattggtgatatatatttacataatatactacatacaatatacaaaacactgtaaattgtatgtttatattagtgatatgataaaactggtctaaaatagagtatgaaaattgggaaatctttattattactagtttttattaattataatttgtttttactttaaaagaaatttgtaacatacaatgttatttgtcttgattaattcaatgaaactttaagtagattaagattcagagatatatgagtatcacctcaaaactgacttttatgggaacaagtacaaaaaactgtatcaatatggcttattcttccaagtactggtataagagtagttgctatgaccgtattcgtcatctggattctggatactctctaatcgacgttgtgataactacttacatgttatcagaacaaataaccatcaattacataacatgtgctaactcaagggctttaaactcatttttaactttttgttgctcaccaattcccgatttgttgtattattcaaataccttttcatattttgttttaacaatttttgcatcattagttatttggtttggtttatcaaccaactatttaaccatttaactactggtattagtgttaagtgatcgaggttgagtaccaccacgaagagaattatccttaagtgcattataaatttatcaaaaactaactgtaaataccatgtagaagtataactagtagtatattaaaatagtactctagtgaatgaggcattccttatcgaataggtaggagaacttggagtaaaagttctcgagtcttgtaactatttccaagttcctgttaagagctgatagtttctcgtttgcagcccacgagttcagtgatattaagtcttcagactctttaaagtggtaaacggccgttaaattcatcaacacttcgtccaaatctctactctcaacttctttaacctcattcaccatttctaaattaataaaactattatcagaattatcaggagtattaacagtgttattactggtactggtggtattaacaagatgattataaatagaatcgagaatttgtaaacttgaaactacaaaatcctcaagtgaatttaaaacaatatctctcccattttccttaccaattgacgtcaatagtgaattataagtaataacactattttcaaatccaccattagtaataacaccatttatagggttagctgtgttatgattattaattgagttatttgtggaaatgttggagggttttagagtgggcgagactccgaaaagtgtataaaagaattttgagtagaatgagtaaaagacgttgccgtaaaactcaaagacgaactttgtggccatgtttgacctgtcgaatttgaggagtcttttgtggttacagaatttagaacattttgagtacagtttcgaggtcaaaaggtcagttttaaccttaagtttataagcctttaacaccaacgctgcgttcatatttcgcttcatttgtttcagtttacagcagttctcggggtttgtaacggaatttgacaaagaaggaatggtataggagtgagaattttttgatttttgattcgattctagggtcttaaccactggtgagaacaggtgcttaagcatgttttcaccatatacaaatggatatttcctgtttctaccagtattactaagggcagtaacgtgttccagaactgaccttgcaaatggtgacaatgtactcagtttagtattgtagcccccctcgagaacactcactattcttccttcgcaaacggtgttagctacagtaaccaggagctcagttacgtagttaaagtccttctcggtataacgtgtgaatccatagctcacagaatccctgtaatgaccgtcaaatcctgcagagatgaagataaggtcaggtttgaagtgatacaaatatggacatatcttagtctcaaaaagcagcctaaactcagctgaggttgtaccctcaggaacggccacgtttattatgttaggccggttttcttcctggtaaacaatgctctggtaaccagttcctgggtaaaaaatgccgtcataagcgtgaatcgatgcgaataacacctcatctctgtcattttcatcacgccatccaaaccatttcttatgctacagcatttataaacttaattaattttaattgaataattattcttaaattaaaagttaaataatactaagtgaaggtaaaataatggtaaattagagagtaattatagataaaataagactaaaattaaactaaatacgtataaaataactgtgattaagactaattaaggttagaaaatactataatgtgttgattattaggttctttggagataaggttgggttctgtgtttatattaaaacggtcaatattgactttaacgttttttggtccgatatttctcacgatttgttcagtgccgttgccgtgatggacatcaaaatccacgatggcaatccttcgaattcctttagacgcgtacatatatttcgcgtaagctgctccaatagccacgttatttatcaaacaaaacccttgtgatccagccctaattcataatacaccatcctaaatacccaactacataatataatacattaactatatagtattaatcataaaatatattttattatagatatattaactatattatcaagtatacaatattaactatataaagtatagtattacacagaatattaagtatataactaagtaataaaggataaaatgagttaaaacaatacgcaaaatcttcgtcctcgtagctgtttgactgagcagctccccaagttccgaggtggtgaccaggtggtctcacagcacaaaacgcgttcctgcactggttagtacacacagcatcaaccgcagtcaacactataatcataatcatactcagtcaatagtattatatacatcaatgcaatatggtatataattcttctaaagttaggtagaaattaatagtaactgggaaaaaataaattttaaagttgattggtctagaaataaaaatagaatcattttaagtgagtaactaataataaaaccagtatagttgttataacaagaatcaggtggatacaatgtgaaattacctgaaccagcggcataaagagctgcagaccaagagtggggagtaactggagtatcaccatcggctaaaacaggccaatacggatgagtatcccagcgtttctgggcaatttgaacctggtcgagcagcttgtctatataggcccaatcgtgaacccttaaaacatcagccatagatgctgggggaggagagtgaataagtttaacgttttccaaagtatcactcctcaaaagtccattatcattgctgataatcacctcaagtctcgtcggattctcaggataagtcattataagtctataccgcttattaggaaagtcagttggctcaggaattgccaaatgatgaagacaagttgggtgagttattatccaagttttcgtgatatctccacgtggtttcagtgatcctaaagtgatattacatcttggcaaacatacgattgtaatttccaatcaagctagaaaggaaagaatcagaccctaaatgataagtttgaggtcctaattcagtctccttggtacttaacctgacatcagaatgaggtattccacagcccttaaaatatgactgttcattccctaatccattatataataatttattcaataattagctagtattatatactatattttgtaataattagataaattataactaaaattaacactaaattaatagtctaataaagaaaattaatcctagctaacaactaaaaaatacgtttattgtgttttttataattggcagaatcctttacagtattgcttttgggattgtcataaaggcttgtaagtgtgaagttgacagtattgatgaaatagtccttgttattcatcattgttgcaaagtttataaatctgtgcataaagcagggatttgaaatcaaatggtaggtaattgctgaattgtaggacaaaagtgcgatcaaacactcccatgaacttgacttaatgcttcggtacacaagttgctcaaataacatcaaaaactcatcaaacaacgttttaatagactgtcgagacattccttcaaattccttaaattcacttctttgaaactgtttaatactatttttaggcctcattgccactccctcacataaacttttcataaacatttcaaatatatcactgtctccaagattgtcactattaacagtatcctcggtgttaatagtattatcaccagagttaaatgagtataagaaaagatcttcaagagtgtattgtaatattgttagaaaagtgtaaggatctttagcgtcaactgagatgtgaacaggcatatcgccagactcgttaacaacaattggtgaaaatcctgaggccaagagacatttaactagggatatgtcccttaatttacaaactcggtgaagaatcgtactcttgctaaaatcccggtccttagtaaatgtttcccaggaaatcttaggcttaagccatacaaaagaagagattattttatgaatagaattcgagatagagtcacacccattaagccttccgaaacagtaagttttgttagatgcttcagacgaaatagggtttacaagagtgttcatcttagtatcagtttcctgtgtcatatcaaaagattcaacagacaaagtattattcgagaaactcattcctatataaaataatataccagtgatagtatatatattgtgatagattaggaataatatatagtataaataattaactaaataagtaaaataatgtaaaattaaatacaaagaggtggatatgaagaattatatgaagtggaataccttgggtaccgtcgcttcctgatctttttaaatcattttcaaattcgttaaaaccatcttttaaccagtatttcaaactatttaagggaggtttaaacacatttcccctctgtgtaactccaatatcagtactttctaaatggtcttttgctcctgaactcttatatttatttgctcttgtatgtatgactttgtgctcaaaattatctcttttgttcttaaatttgtttaatctggtatgaagatcggtatttccttcagttccagctgatttagtaagagtgcattgatttaatgtctgtgaaaagctatgtgtactgggacaaagaatatattttaatgatttgtacgctttttggaattcgtcaaacttgttaaaatagcacaaaagtatcctgtaacatttaataatgtttgggcggtaacttgagatgtaaacgtttgagaatagaagattaatggggaaagtcttgtcaaaagttgagattaaatccacagtttcaagaggcagcaaacgttcgtaacagttatctactacttcagacgacaacttatgggcgagtttataagtagatactccattcctcttaccacccattacaacaccattctcatttctattaccattaactattgtctttgatgatgtaatgttcagttgggtaacgatgttaaaatgtgtttcctgttttgaaattctttgataagtactgctcagtgaagtgtcatcatggtccatttcgactatttcataacttgtttcataactcagttgattttctgtagctttaacaggatcaactgactgtccaaaattatctagtctatgtttttttttaaaatctttccattgtaccctggaaggtggccagttgtaaatttggtcgtacttttgggagtaatttttgactgccgtttcaagctcgtgagtctcacctacaatgaatttgtagtgctcttcgtacagattttcaacctctttctgacaataaccattcactaagtttcgatcatcgtttgtaaaacgagtatttaagtattctgatagggttttgttcggagatgaaagtggtttcttcccaagtctcgccttagtataatctatatactctgatgatatatactcaatcccgtcatttacatccatttccccaatgggaatctggttgaactctctgataatggtaaaattttgttttgaaggaaaatttgtatcgaaattttcggtaaaaaactgatctccgaactcgtttttatcccagcacataacactttgggccgaattttccttcaagttatcaatccagtcggaagaagcaaatattttagatgggtgaatcagaggatagtataaaagcaaatatagtgcctttgggttggccgtaagaagtgacacatgaagcgaggttcttccagaatgatccaaatcgttgaggcaatcccgcctttcatcggacaaaatctgtttaagagtttcaagatcatttttaagaattattctatgtatattacatgtagatctatagaatggaatgaacgacgttgaatcattaaggttattcataaattttgaacaaatcaagccaacaaatcataaaattttggataaataatctctagaatcattactatctatttgaacacttaattacatgtattataagaaattaatgttagtgtgaacttctaaattatactttataattcaaggaaataagaataattgttatggggaatgataaagaagaaataagctcttttaaactctcttattatttatattctaacattaattagtttatttgttgatttcagatttatcttttatttttttttaattttttagttaccacacatttcaaccacttattactggttttccttaggttttctactaaattaattttttatttcatataaaatttctatcattccttttctatcctaatttaatataatcaaattttttttataagtttgttattctatgttgggtttaataatctataatttttaccttcccttttaagtttagttattatttaattttttatttaaaattttttattggtttttaaacaatacattttttcaatttttctattatttcaaaatcaactatttatttattaataattattacaattctttattcatttatcttaatccttacttattcccaactatttaataattatgtagtgttctttttatccgatttcttttatacatgtttttttgtagttaattatatttgggtatatactttactcctaattttttatttataattatcttaaaattttaattagtttattttttattttaattattttctctttgatatttctaaccatacccatttttacttttttttatctcttttctttttatacataatttaatcattttttattaatataaatatttcttaaatatttttattttatttttcactaatttcttttttttactaaaaatttctatccccttttttttcaattttttaatttactttaatatccctaaattcttttttattttttaaatcacttttttttatctctttatttttttat
